United States Patent Application Publication US 2007/0161031 A1 - sequence listing, part 15

SEQ ID NO: 18293 - DNA, 2300 bp, Homo sapien
ccccagctaatttttgtattttttgtagagatgggtcttgttatattgcccaggctggtcttgaactcctgggctcaagctatccacctgccgtggcctcccaaagtgctagattataggtgtgagctaccatgcccagctataaatttattttttaaaatgttaaatcagccttgcgttactgggataaacctcatttggttgtgatatattaccctttttctatgttgttgaatctgattggctttttttcagaattttcacatgcatattcatgagggatatcggtgtataattttcttttcttgtaatgtctttgttaggttttgatagggaggatggcttcggcccgggaggcagacgttgcagtgagccgagatggtgccattgcactccagcctgggtgacagagcaagactctgtctcaaaaaaaaaaaaaaaaggagatgaggtctcagtatgttgcccaggctggtctcaaactcctgagctcaagcgatcttcccatcttggcctcccagagtgttgggattacaggcgtgagccaccatgcctggcctaatttcttacctcaaattcatatcttgtatgtccagactcttaagtgtggctgccacggttctgcctgtctgacccctgtctccctttctagtctgtcatctctccataccccactctcctcgccctattcatccttcatcctttcacccaaatgagaaacctgggtcatttgtgactcctcctccctccgcagctactgccctcctacccctgatgctgtcctcatctcccagtaccagagccagcacacacccatgacttcctaccctttggcacttggtgctgagtgctttgcacattcagtcttcatacctaccctatgcccagttggccacggctctcctctcacagatgaggaaacgtgtatgaggtcatgcagctattaagagcagcacacgacccaaaggcaggtctggctggctccaaactctgggatgctactcactgcactgtcttaaatctctttagtcttccagtgggaccactgcaactatgtccccctccaacctggattttcaatgacctcagagtgagcctgctacatctcacttgtctccggttacccccagactccatgtggcctcttggtctgatctctaccttcatttttcatctcttggcatccagcttcctgtccctcaccctaagccgaagctacccccagagtaccgcaggcctttctgcacccagtgcctttgcaaatgctatttcttatacctggaaagccttcttctggcaaagtcctactcatgcctgaaagcccaattcaaataatcagtgtaatcctctccatgacagacctggctgtctaatctacgttttaccttacaggcgtgagccactgcacccgacctctggtttttttttttttttttttgacagggtcttgctctgtggcccaggctggagtggcagcatcatagctcactgcaactcctgggctccagtgagcctcccagctcagcctcccaagtagctgggactacaggctcatgccgccacacctgtctaattttaaacatttcctgtagaggacaaagtctcgctatgttgcctaggctgatcttgaactcctggcctcatgtgatcctcccacctctgcctcccgaagtgttgggattgcaggcgttgagccatcatgcccacctaatttttgaccgtttttaatgctggcccatgcccttctgggagagaggatccccaaaagaaagccaccatttcagtgggggatctgacgcccctatgggaaggggagacacagggcactgggggcaaacatctttgctcattggttcagagaagagtacaaggcatcaacgaagcgctccgtaaaaatgtgctgaagactgccgctcctccctgcaaagcctcaagcatcaaggagggacaactggatgtgattttttggatctgcagttcaggataattcatgagtcgtttcctgtgcacaaggccattgctccttctgtggtctcagaaccccttcaagaaccactgactctgcagtccctactccaaggcgcgcatgcgtgtccgtgagagcacatgggtgtgcaccgcgcaggggctgaggctgggagccgtagtcaggggcaccgggtgggctttggcggcgggtcgacctgcctttcaggtgccgggggtttgggagcaggggaacgggccctgggcggattcctgaccgcccccttcgcgcccctccccctctcactttcgctttccccgcctgccccaaccct

SEQ ID NO: 18294 - DNA, 2300 bp, Homo sapien
gtgtgtaagggcccaaactcaggttcagtgcagaaccaggtcagcaggtatgcccgcccgtaggttaagggggccctctaaaccccttgcctggcctcacctggccagctcaccccttttgggtgtaggggaaaagaatgcctgaccctgggaaggctccctggtagaatacaccacacttttcaggttgttgcaacacaggtcctgagttgacctctggttcagccaaggaccaaagaaggtgtgtaagtgaagtggttctcagtccccagacatgtgcccctttgctgctggctaccactcttccccagagcagcaggccccgagccccttcaggcccagcactgccccagactcgctggcactcagttccctcatctgtaaaggtgaagggtgatgcaggatatgcctgacaggaacagtctgtggatggacatgatcagtgctaaggaaagcagcagagagagacgctccggcgccccagccccactatcagtgtccagcgtgctggttccccagagcacagctcagcatcacactgacactcaccctgccctgcccctggccagagggtactgccgacggcactttgcactctgatgacctcaaagcactttcatggctgccctctggcagggcagggcagggcagtgacactgtaggagcatagcaagccaggagatggggtgaagggacacagtcttgagctgtccacatgcatgtgactcctcaaacctcttccagatttctctaagaatagcacccccttccccattgccccagcttagcctcttctcccaggggagctactcaggactcacgtagcattaaatcagctgtgaatcgtcagggggtgtctgctagcctcaacctcctggggcaggggacgccgagactccgtgggagaagctcattcccacatcttgccaagacagcctttgtccagctgtccacattgagtcagactgctcccggggagagagccccggcccccagcacataaagaactgcagccttggtactgcagagtctgggttgtagagaactctttgtaagcaataaagtttggggtgatgacaaatgtttccaggccatcggtgtcctctctcttgcctgccggcctgctgaacctcacgaccctaacagctgcctctctttgccttcttgctgagatcttttcaagtcccccttgttttggacaaggactgtttcagcccttgagtggggctgctttcccaccactcctcccagtggctgcttctagtcccaacgctgggctagtcattcagaccagttaggcaagataccttgcccggtggcatcagggaagtccctcgccaaaatatgccaggctgaggggtggaggaggaggacaacaaagcctgcatgctttgtgccactgcccaagttaggcagccccctaccaccagaagggaaatagggatgggttctgggccctgaccatccagggatgccggatgcacaccacaggccctccaccctcccctcctgtccttgaggcctggactcttaaccctttccgctgcctcctgagccctgcatggggccagggatgcctttgtgggctgagttccttggtcatggagctggggcacacggggtgctgagttccttggtcatggagctggggcacacggggtgctgagttccttggtcatggagctggggcacacggggtgccttatcgaatctggctccacactccctgtgtgcacaagtgtgtgtgcgcgcggcttgggttggtttagccggttcttggaagggccctgggaccacgaaaagggcggcagccctgagccgctggcgtgcagagcgggtgcaagtcctgtccagcacagccaggcttacctgccgcctgcctctcgctctaggcccgctgcggaagcgcgagccccacccccgaggtcttcggagaggaaggagttctggcttcgggcccgcagccttcggaggacgcctcactcgggccgtcccccgtccgcccgcccgaaacctaaatgcggctccctgcctgtggggtcgcggcggggacgtcacagaggcggcgacatcacaggcaccggcgcctctaatatttccagcgcccaccagtccctcagccaaagagcacactggaggcggagaggcagcatccaccagcccgctccccgcctccaggacagagcctcggtctgcatgggggtgacaggtgggagcggccgagcgcccgggggcgagggttggggcaggcggggaaagcgaaagtgagagggggaggggcgcgaagggggcggtcagga

SEQ ID NO: 18295 - DNA, 2300 bp, Homo sapien
tgttgaggccgggcatggtggctcacgcctgtaatcctagcactttgggaggccaacgcaggcaaatcacaaggttaggagtttgagaccagcctggccagcatggtgaaaccccgtctctactaaaaaatacaaaaattatctgggcctggtggcgcacacttgtagtcccagctactcgggaggctgaggcaggagaattgcttgaacccgggaggcagaggttgcaatgaatagagatcacgtcactgtactccagcctgggcgacagagcaagacctctgtctcaaaaaaaaaaaaaaaaaagaaaagaaaagaaaaaaaaatgcacccgatggagtccaaatcttggttcttgacagtcagataagtcaaaaacccagcttctgagagtagacatggatgttgataagcaaaaggtcccacatcctagaaattgcccagaaatttagctggaggaaaaaatgttctgcgtttggcagatttgagggcggacagcgtgccagcagccaggatgacgaatgtagggggttttttgtttttttgtttgtttttttgtgggtttttttttgttttttttttttgagatggagtctcactctgtcgccagactggagcgcagtggtgcgacctcggcttattgcgaccttggctcattgcaacctccgactcccaggttcaagtgattctcctgcctcagcctcccaagtagctgggattacagccacgtgccaccacacccagctaatttttgtatttttagtagagacagggtttcgccatgttggccaagatggtcttgatctcccgacctcgatctccttgatccacccgcctcagcctcccaaagtgctgagattacagccatgagccaccgcgcccggctggaatgtagtgttttgttttgtttttttaattttttttttttgagacggagtctcactttgttgcccaggctggagtgcactggcgcaatctcagctcactgcaagctccgcctcctgggttcacgccattctcctgcctcagcctcccgagtagctgggactacaggcacccgccgccacgcccagctaatttttttgtattttttagtagagacggggtttcactgtgttagccaggatggtctcgatctcctgacctcgtgatccacccgcctcggcctcccaaagtgctgggattataggcatgagccactgcgcccggtgcggatgtagtttttatgtggctgtttttgcacacaggcagcactccagaactttaattaagtacaagaagttgctcctgataccaagggcacgggatacacaatttagcctctgagggtccagcaggccccccaggcccctgcatcaccactggaaacagcagcagcctctgtgtgtggagcactagggtgctgacaggatgccagggacccagctctggtcccctcaccctgtcttaacagctgcctctgggcccttgcaggtgcggctggaagtatttcgggcagaggagctgatggcatgtgcaggattgacctcacccagaattgtccctttgtatggagctgtgagagaagggccttgggtcaacatcttcatggagctgctggaaggtaaggagccaggtcccactctttctccaaattcagggccaagagttcccccctgagtcttgcccaagttggccttggtcactgatctatccattgttaacctcttgaccctgtgaccctgctttccactgcctgccctgtgctcttgcccttggctggcatggaggctcgggcaagtcccatgtatagcctggcctttggtctcctaggtggctccctgggccagctggtcaaggagcagggctgtctcccagaggaccgggccctgtactacctgggccaggccctggagggtctggaatacctccactcacgaaggattctgcatggggacgtcaaaggtaaggcccaggccccacggccctgatccccagcaggctcttctctcacaccatcctgtctgatctcctctcagttctgggctagcctggtcatccccagtagcaggccctgagtcaggctgacaggactgtgcctgtaggaaggggaatgatgttctccaaccccttagccaagcactgtagtttctggtagacggtggccacagagaaccgaaggtcaagctcccacccactggtgacccctggtatggggtcggcgcaggcgagcagagtggcagcgttcccgagtaaaccctgctcctgtccctttgccctcagagatcctgcctacctctagcctgaattgataccctcct

SEQ ID NO: 18296 - DNA, 2300 bp, Homo sapien
atacactggggaggcactgtgtgcagggccccacctcttccctcaggagcctgttgaccagggaggaccttagtgtgccctcctgcatttgcctgtaacccaggagcttggggagtgggcatcatagcctaaagaacctagggtctggatcctggccatgtcctgtcacacgtgggttgggtgaccttgggcaagtctccactgaattaggcctcagcttcttcaaatagaaatgaggaggtcacgctcacatcgagctccctgtgagcattccctactgctgttaggtttggagactttttggtctgttcttaagatctcatttcccctggtaaagaggctgagaacagtgggatcggctctgggcttaggtcagtttcttttttggaggtagagtggggtggggaggtgtgaggtgggatgaaagtacagttacaagaagcatagccagccttgaagggcttttgcctaattggatgtcagaacaccccttagactttttttttcttttagagacagggtcttattctgtcactcaggctggagaatgcaatggtgcaatctcagctcactgcagcctcaacctcctgggctcaagcattcctcccaccgcagcctctagagtagctgggactacaggccagctaccccagctaattttttgtatttttttgtagagacagggttccaccatgttgcccaggctgatcttgaactcctgggctcaagtaatccttctgcctcagcctcccaaagtggtgggattacaggcatgggccaccatgtccggccccctcagacttcttaagatcctcaggtaacagtgaggccacccattcagcctcctcagcatctggcgtttggtaccaaatccaggcatccttgcaggaagctggagctgctccaagttcagagctaggagacccttaaagacagagatgcaaggaactaatcaatagtgaacaacaaaccccaccacacccgccagccaagctggcagagcctttcatagccatcgaggtgggaagaccagtgaggcagattcagaaggaggaatgcttcaacctagtacctcagcttcccaccatctcattcagtcctcaggcctcacagggcaaaaggccagaggccttagagttcagcttcagatggtgtacctgtctgccccagaagcagagaagtgatccagggttcacagagttatagcaaggaagatgatttctgctggtagcagctttaagacaaacctaccatcagagagcagttattaaaaatctgtctgcatttgggaccttctcaggctgtttctaaagcaagtcatgcctgagaggggccctgccctttaaaaactcccagcctttaaaaaggtttccaaatggtaacagtctcaaatcagtgctcttctcttttttgccaattccagtctgcaggctgtttgcacagattgttggcaactctgggttgctcttctttgcagcttcctagggctgggcaagacagaacccagagagacgtgaattcttatgctttattctttatttctagaggtataggttcgtgttagggccttgaatataaattctactcctgatgttgcctgaatgaaaaatgatacctagaagttttcagccaatgagtttggacattagaggaggaagcatgttagttccttctggagagccacaaacagacgcattgggcaaggaaccacgtgctgagcaccatttgcatgctgagttttagactttgtaggacacacacacacacacacacacacagatatctacctcctactagggaacagaatagaaccttgcttctctccacttggagaaaagtcgctgtggatggtgtgtgccaacaggtcctctccaaaggcttatgtggggtcagtgaggccatggttttggagtctgggattcaccaccctgtcctggggaaacaaagtttgccataaaacaacagaaaaagatcgagccatcataaaggcaagaaagagccaacccagacatttgtgccacagctctcctagagggagtgggctggcatccttgctggacacagtgaaggaggctgtttatgttgtggtactgggaggaccgggggactgtgccgtgtggaacgtgtagctgttgagaggtggactctgttaccattgaggatgtttggaggatgagtatgtgtggcagaggcacacataaacaggcagagaccctttgcccctgcctttctcccccaacccaaggctgacctgtgttctcccaggtctgggattctaagtgacctgctctgtgtttggt

SEQ ID NO: 18297 - DNA, 2300 bp, Homo sapien
gtgttttaaagaaggaatagtgaaagagagagaaggcaaaggcaagccagggagtgtctgcagactctggaggtgtgcccacatctttcctgagaagtggtgtgcccagaggcaaacaggtggtgggagaggcaataagggcatccaagattgccgataccaacctgtacatctggccaagctctgcctttccctgagtcactgaaatgcaaaaccctaggggtggaaagagatttgggggccaccagtccagcttctttcttgtctgccatctcccagctagtcagtggcagagccagggtgggcgccagagactgtttggctctaaagcacggactctacgggagccacaacctcaaatgctccaggggccagacaggtgacataaggttagatggttgggtggcgggaactgtaaggaaccgcaggctctgctctaaggcattcaaattcaaatttaaaaaaatattgggccagccaaacaaagcatatttctggcctgggtgagtgaatgaggccctcaggttgtgagtttttgaccactgcctaaataaatggtcttccctattccccagcagagatgactgtttggcacagatatccagaaagaagagttcagcttcggactgtctgcaaagtagtctcaagcagatggtggtctttgctcaaacacttccagagatggggtgttccttacttttcaagacagccttgggtggggcctgcctatccccggactagagccactcaccacacctaccatggacccttcatggaagtgggatgcccagggtaggagtacatcttttattttgcaataaaaaaaaaagtttggattttttttttaaaggactgcctcactctgttacccaggctggagtgcagtggcacgatcatggctcactgtaacctcagactctcagcctcccctctagctgggactgcaagtgcaaactaccacgcctggctattcttttatttttttgcaaggacgaggtccttgctatattgcccaggatgttctccaactcctggcctcaagcgatcctcctgcctttgcctcccaaaagcgctgggattacaggagtgagccaccgtgcctggcctggaatttattacaaataaaatacaagctcagtgtggaaacactagataatacagaggggcaaaagttagaaaaagtttctataccttccctactccccacccccgacccccattcagaaagaagcactgttgacacttcaatgcatattctgaactccaggtcctttctttgcatacatcaagctctcatcctcttgctggctctgtggtctgcaaacccagagagcagatgctttgctcagcgctcgtaccacgccacgcacccacatgctctctttgtacctgggtttcaacccacaggtcgggcccctgtaagcccttggctccccaagcttctcgagggcaggcactgtaaccttctttactcattccagggattctacaggaccaggcacacggtaagagctcaataaaaacgtctctacccccaccacctcccgcctcagccgccaccgcttggcagcagagaggaagcggaacgcgcgcgacccacgagggagagcgcctcgctgtctccaaggtaaccgaagtcagtggcagggagtgcccacgcatgcgcacactcgcccttccttcccgtaacctcgagaacgcagctggtaagactgccagaagccgagggcgcatgtgtggttccaccaacaccctagtcgcctccgccttctgtcagtccgcccgcccagcgatctcccttctacaaacatcgtccggaaatagtgcccatttctggaaaccaggcctcgttaaccaatcgttgctagggagcgggaagacgggcttgccgggacgaccgtctcattggttggcgtaggggagtgggcggggccacgggtcgcggtgcggccaaagaaaggaggcgcgaagcgaggcaaagttacagcctccgggggaggcgtggccccgggggcggccgagaaggcgagggggcggagcccgggaccggggcggggcgaccacgggccgggagctcagcggtcggcggccggcggcgggagatcgcgggcgagcggagcgcaacactcgcttggttggggagatcggcgcttggccggtaggtgacggggcgggaccctggggcccggtgcgaggcgaccagggagcggctgggatggatcgcctctcagccccgggctgggctgcggcctggcccctcgccccggagcagtggggtcggcggccaggccagcgcagtc

SEQ ID NO: 18298 - DNA, 2300 bp, Homo sapien
cccagaggactgggtcttcctagtgcacctgctcctgccccagcacttcctatgagggtttgggagggaagagtgaggtcagagtggggaaaggaggggtgttgtgcagctggtttgttctagaacctctcctgaccctcccccttgtgcctctcagaggcatgagggtgtggtggagggaggtggacccctctggggagccactgtggtcatcacctcctctcactggggggagggaatccgagacagggcctgagagccaacttctgtggccaagagcaggcaggaactgtgtgagtttgttcactccctatagtttggggctggagccccctgggagacccccatcatgggggcccagcttcctactggggaagagaagcaggtgagatgccaggtgagttgctggctgcccattctgcagtcccagccctgacactgacactcctggctctgccatagggagtccctgccccccatgctacctgcagggcaatgctgagggcctgagttccacacctgtcctcttctctcccctctccacccagctcctccctggtggctcagagtttctggcctctctggaatttacagaggctattcctgtctctgaggcctggttgcataacccttggtgacctgtcatatgcacgcacacgtgtgtagtgtgtgtgtgtgtgtgtgtgtgtgagtcctcatccctggcctcagggtggggacagagagatgggtcaggtgtgtgataagcatgaggcctccagccttctgtgattcctgctgtcctccaccctgatagcgaggaggggattagtctacccctggggtctgggcttctgagtcgggtacaggggatgggacactggtatgagagcttttgtgggcagagcagggcatggggcccagtcttgctcctagtgtgatctctacaagtgtctcgtgccccacattcacactgtgcctggctctgcttggggtccttgtccccagcccacagtgggtacaggagaagaggggctgagagacatggcaggggagaaaaagagatccagggtgggggccagaggaggaagaatgggcctagagtggaagggtgggggtcagagcctgaccaggaaaggaggtggacttcagcaggggtgggctggtgggcttagtgctgcctggcccttaagcctggggaggaagcacttctaagggaggagggaagacaagatggacccatgggctcagaggaggggctgtaacttcttactcagggcatgtgtccactgtgcgtggctggggtctgtcatccccacacgagggggtgaagggaagagaggccaggaagaagatttaaccttcctcctggaagaagctggtgcctggccctcttctctgggtccttagagaggaggggacaggcacgggcatacttgtacacgtatgtggacacgcaagtgagagtgggcacatgtgggcatgcaggcgtgggagggcatatgcatcttggtgaccgagtctggaggagacagacccaggtggtcaggcgggcagatagtgatgtggtcagaatccttcctgtcctcctcggggctggcacagtccagatgccagctccctgtgatatcacatctgcccagaccccttcctctttgggaactcttcccctcccccccacaagcttcctctttcccattacaccctccctgggcctagagggagtggacaaccactcattgtcctgtttccgccccaggagccactccaggccagcccaggcccccagcactcagcgccccctctgcccaccctgtctgtgcaagcgcgcccctcccccacaggctcagccgtgattctctctgtgcagttcatgctgtggctgggtctggccgtgatcttcctctgtgcagcccacaccatggctatgtctgggcctcggatgcggctcactggtcattagagcactgagtggggcagccagcagtgtttctagaagcataaaaataccctcaacctgaggcccctccaccccacccgccccaactcaggcagcacttccgcagccctgacaggaaatgggctggagtctcagcctcccgccatctcggcaacttcttgtttccctgttgccctgtgccagcactggggtagtgcccctgggctctacccccaaaaccttcccagggctctgtcccggcagttcagaggggccaggatggtggacataatcgccaaagtgaccaggaggcagagtcgagccttgccggcacaggtaggggatgctggggtcaaggggtgcccggtgggcctctaccaca

SEQ ID NO: 18299 - DNA, 2300 bp, Homo sapien
cctccacaagtcgctttgcatctctggtcctgtttcctcccctgtgcgatgtgtgcaataataccacgttccctgccacagagctttattcaagaggcagctgtgggtctccctggtgctccacccccaacaaagtccagggtagggagttggccctgcccccgcaagggaaccccatccctgctcttagttgtcccaggcagagtttccccaccatgatcctccaggcccattcactccttcattaggcatcaactagctgaatacctgccaagccctggtgagccttcggatctggagaggactgaggcacagccacgatcctgggggactcaccctcttggataggaggccagcaagagaagacatggggccggggctcagagtggagcatagggttgagagtgggtgcccacccgggcagggcctcgtgggcccttgccaggaatgtgcacattatcctgcagccgctgtgaggcttttagcagagacaggaatgggattgagaaaaaaatccctgtggccagggcttcaagaatggctgaagctcttggtggtctcgtgggcatgtgtggaaacagaggtttgggagatggatgggcagggtctgggggccgagggaggtgggagggaaatcaggttgagttctagattcccagctggcactcgtgggcagacagtggtgctgcttcctgacggggggatgacttggggaggagcagagtggaaaaaagatggggcccacctggatttaggtgccaaagggaagagaagcatgagagtgctggctcagaggccaagaagtgtccagaagaaggacgcacaggaaggtcatgtgagagaaaggccgtataacacttaccctaagtgaccactagacgctcagctggtcagggggctgctgaaggcagagggcagtggtcagtagtgaagtgagggtgcgaattgagtgtgtggacaacgggcagaaggagagagacacagtgtggccagagggggtgtagggtcatggatggaaccgtccccaggctcaggtgggtgggcaggagatggggaggctaaagatggggagaaggttgttgctgagaagggatctcagaagaaagtgggtgcagaacagagggggcaggatgtggggatggcatggcacgggggcactggggagtgtgtggggatgcccttctgtcaggcagcagctcagggcttagggcaggctaccagacagggccagggacccccagaacagaggagctcctgccatggatggtgttttacagccttgtcactccccatgcactctaatcgcgcatattgagcacttggggtgggctggtcactgtgctggacactggggacaaagtgtggtaagatgcagtcccaaaggggctaacagtcctgtgggctcttgctgaaaggcttgtaacccagggttaagctcccagcagcttggaaggcaggcgtaggcacctccatttgccctgagtacaaacagaggttcagagaggtttagtgacacgacgaagctcacacggccaggaagtggctgtgttcaggacagttccaggccccctgaccccaagccccaccctggccagcaggttcagtttcagcctggtggcctttagggttggccaccctgttcccctcaacaagaacagtacaagctgaaggcaggcacatgctccttcttctgagcgtcctgcgtgcccagccctgttgtggaagagttgatgtcccaggagggacatctcctgttcttttgctgcccaggagagggcagaagcaaacccttctgagaggggatagagggagacgggggaggtaagcagggatgactcctcctctcccacaaagaggccactcagggagctctgggaagccaggccaaagccagtgcaataaaggggcctctgagactcttcccttggtcctgactctgggatttcagggtgcggtcaccatccccgcccagaggtgggaaggcccaggcaggtggagctggcctggagcccgcccctgctgctggggcattggccgctgggagggaagttccagccgggctgctgcaccttcttatacaagcagccccggaggcgccgcacatgagcaggcagccccgactggaaggagcccggggccctcattccttctcctccactgggaactgagtgagtcctcgcccctgggggactagggggtggccacagcagtttccccaatctctcccctccctttcccgaatcctaaaacccatctgggggcccctcccctctggatccaggcccagcacccacttccta

SEQ ID NO: 18300 - DNA, 2300 bp, Homo sapien
aggccacttgtttccccttctcccctcccttttttttttttttttttttggatacagtctcactccaatgcccaggctggagtgcagtggcgtgatcttggctcactgcaacctccacttcccgggttcaagcaattctcctgcctcagcctcctgagtagctgagacttccccttttcctcttctctctgaaggaggacaggtggtttggagattccaatccaacccccaagagcttatcatataatgtaagtagtcataatagctgatgtaccccggcatggtggctcacacctgtaatcccagcattttgggaggccgaggaggttggatcatctgaggtcagaagttcaagaccagcctggccaacatggtgaaaccccgtctctacaaaaatacaaaaattaactgggcatgatggcgggtgcctgtaatcccagctactcaggaagctgaggcaggagaaccacttgaacccggaggcggaggttgcagtgagccaagatcgtgccgctgcacttcggcctgggagacagagtgagactctgtcttaaaaaaaatagctgatatattgtgtgcgctgggcatgtggtaagcactgcttagtggacctcatttaatcttcccaataatccagtgaagtgggtgttactatcccattgacaggaaagaaatctgagctgcagagataaggcagaactcccaaggcctaccagccgccaagcagcagagtggggcatcatacctgcctgaccccacgcaaagaccatcaccactgccagccactgcctggctgtgctgcaggtggagagggacctaaaaggtagggagggagagaagattcctccagccacgattttctttttttcttttttggttgttgttttttgagacggagtcttgctctgtcgcccaggctgaagtgcagtggcacgatcatggctcacggcagtctccgcctcccaggttcacaccattctcctgcctcagcctccggagtagctgggactacaggctcccgccaccacgcccggctaatgttttatatttttagtagagacggggtttcaccgtgttagccggggtttcaccgtgttagccagggtttctcaatctcctgacctcatgatccgcccgcctcggcctcccaaagtgctgggattataggcgtgagccaccgtgcccggcaccagccactattttctaagcatgtcgggcaccaaagaccagtgctgagttctgctgtgtgcccaccctggagggtcccaaggtgccaccaaggctcagacacacagattctcagaggaagtgtggactcacaggtgggcaatgcctagcagaggcaaagatatagaggtaagggagttccttacttactatatcttacaaagatatagaggtaagggagttccttacttactatatcttacaaagatatagaggtaagggagttcctctgaatctgggtggccagattcagcttcccacccaaccctgggtccccaggaggtggtgtcaagagaggccatggcctgggatgcgggcccttcttcctcccagaacactggcctgaatcagccagctcttggcacacacagccaggtccacaggcacaactgttccttggggcccctgagggcagggggtgtgctggggctgtggcttgtaatgtctggagtgagtgcaggctcagatcagggcgaggctgcttgtccagagaggcagaaaattctccaacagaagacccccaaggcggagggccctggggctggactcctggaggttgttctgagcttaccctgtggacggattggagggtggccctccttccccacaaggatcaagagggggtgggggatggtgggagggcaatctggccaggcgaacctgcgggggaggctcccgccctccccagtcccaccatctcagccccgcagcctctttctccctggagacagccaggtgcggcccaggatcccgggaaaggcaggggagggggtggcgtcttcgctcctcaggcgctggcccggcccagaggggacaggaagccaggacaccggggattgtctctcgcaaccgcagcccagccccagtccgggaggaagttctgcccggcgctctccgccggtgcctccctggttatattgttgaacaggaaacccggcagcgcgggagccgcacagtcgaggagggagcgcgggacgccgagcccacgcgcgcctgccggggcaagtggaggcgaagccggcgagcggacgccccgaggtgcccgggcaggcagggtcgggagtggggcgccg

SEQ ID NO: 18301 - DNA, 2300 bp, Homo sapien
ggagtcaggcctcaggtggagagccgcatgtcactgtcagagatgagcccacccccacccttccctgggggcgattagctgctgagtcacccacccagccttggagctggatgcctgtgcagcagaacagaggcaacggtggcaggcaggtggaggctgcgcacagcttctcccggtcatggcacacacctgtgcccagacgccaatgcctcctaagccaggagctgggttatgcaccgccatggcccacattaacgctccaccacaagcccagcctagtcagagccctcattgccccatccctgagtgggcaggagcctggcctggggagggcttgggcctgtgaggattctccccgaaggtgccctcggaggcagcaggtttgaggccctggggggcccgttccccagaagctgccagtgctttcagatgcattgactcttcccgcctcccctccctcagaaaggtagtgcccacactatttttaaaatgttattttatgcaatacactgttcctagtgagcagggctctggccctgaggagtctttgcaatgtattgaaggaattgctgccgtgtgagttttgaatgattttgcagtaaagacctgatctttctcatcactggtctggcttctgaattctaacactgccacggccaggggggagaccaccagccatctgttaccatctgtcagggtcccctaccctcatgttagtccctggcacgggggaaggcttgggaggtccgtggcaaacacttgtaggcagagggcttgcatgccaggagtgggcagggagaagagagtaagaaaaccaccttgccaagcccagcagtcaggctcttcctggggtaggatctcagggtctctggggaggtgtacccacacttgtataacaactcaagctgatcccacgccggtggcttcttttcctgtgacttaaatgtcaaaacacagacccttgacactggatcatgtgaaacctcaggatacaggggacatttctcagaggagaaataaaggagagatggggctcaggaaagaagggttatttaagtggatcccccgattcagggctcatggttttagggctcaaaatgacttttacttggctgctgaccttcctcagaagttccaggagaagcccaggggacccctccaaggggaggcccacaccactgtccattttaagaacaggagcaggaaacagacttaattctcagggaaatcaggttgcagtaaaatgggatggaaacagacaacattcaggtctgagatttcctgtccttaaaggcccctttcagattacaaggtggcaccctctgccaatctaggtgccccagcttcccccaagggcttcacctccctccaggacagtagatggtaggcccggagaagagaagagaaactgggagagggaggcccagaggagggccacagcacgtgacctggtgctgccctgccggtgggttcaggccctctccagcctcagcaaagcgcccctgaggccacttgtttccccttctcccctcccttttttttttttttttttttggatacagtctcactccaatgcccaggctggagtgcagtggcgtgatcttggctcactgcaacctccacttcccgggttcaagcaattctcctgcctcagcctcctgagtagctgagacttccccttttcctcttctctctgaaggaggacaggtggtttggagattccaatccaacccccaagagcttatcatataatgtaagtagtcataatagctgatgtaccccggcatggtggctcacacctgtaatcccagcattttgggaggccgaggaggttggatcatctgaggtcagaagttcaagaccagcctggccaacatggtgaaaccccgtctctacaaaaatacaaaaattaactgggcatgatggcgggtgcctgtaatcccagctactcaggaagctgaggcaggagaaccacttgaacccggaggcggaggttgcagtgagccaagatcgtgccgctgcacttcggcctgggagacagagtgagactctgtcttaaaaaaaatagctgatatattgtgtgcgctgggcatgtggtaagcactgcttagtggacctcatttaatcttcccaataatccagtgaagtgggtgttactatcccattgacaggaaagaaatctgagctgcagagataaggcagaactcccaaggcctaccagccgccaagcagcagagtggggcatcatacctgcctgaccccacgcaaagaccatcaccactgccagccactgcctggct

SEQ ID NO: 18302 - DNA, 2300 bp, Homo sapien
gggtgagagaagcttccaggcagaggcgatggatgtctcctgagctgagtcttcagggacagtgccctctcccaccaggcgctggagatcacacaacttcccaggtatatgtgaggctgccaggacagccacatggttgccagggagctgtttctcccacccattttcctcaggggggtcccccagttcttgatgacctaggcaggctttgctcagaatctagtgttgtggatggtccccagtggctgccctgactgacacatcatctgtcactggcaggggggaagcacctgccaattctgaaggccccgtggaggagtctctggggacctagttctgtgagctacccctcaagttgcctgagtcagaacttgccacccttggcttgaggagtcgtgtagcatctgaatggatccaactgtccaaaccaacccttccctgtttacaaagcagggagtgcagtcttgattcagggactggaaatagcgatgtcagggtgaggttagtggcacttaacaaaacagtggggctggtcccactgcttgtgtgactcatttcctctgtgtacacagccacttagagtggcccagccagcttccttgcctctgcccttccatgttgaggcacagaatgccagggaggacttgaaatactggagaaaaggaaccagaatccactcccacaagcccactcaccccagatgctccccgcaaccccatcttccccagccagtgagcagcttcagattcaaaagagaacaacgaagggaaggggcagggcctggctgcctggggttgcaggggcctgcacagaagtgggcggcagagacagaggcggccaatgaggaccctgaggcctgctcgccaggactccctcatctcaaacccaaaagcaggactgagaaaccctacatgctgggacagctgaatacccacatgcaaaataataacaccccttccttacaccttacacaaaaactaactcaaaatggaccagaaacctaaatgtaagagctaaaactatacagctcttggcagaaaacacagaagtaaatctgtgatactgacttaggcaatggttttttaagatgcaacaccagaagcacaaaaacaacaacaaaaatagataaactagactttatcaaaactaacaacttatgtgctccagagggcacaccatccggaaaatgaaaagacacctcacagaatgggagaaattatttgcaaatcgtaaatctgataagggtctcgtattcagaatatataaagcaccttacaacttgaattagtccctagggccaccataacaaagtaccatacacagggtggtttaaaacaacagacattggctgggcgcggtcgctcatgcctgcaatcccagcactttgggaggccgaggcgggtggatcatgaggtcaggagatcgagaccatcctggctaacatggtgaaacaccgtctctactaaaaatacaaaacaaaattagccaggcgtggtggcaggcacctgtagtcccagctactcaggaggctgaggcaggagaatggcgtgaacccgggaagcggagcttgcagtgagccaggattgtgccactgcactccagcctgggcgacagagcaagactctgtctcaacaacaataacaacaacaacaaaacaaaaaacaaaaacagacattgctgggcaggtggctcatgcctgtgacctcagcactttgggaggcaagggtgggcggatcacttgagtccaggagtgcaagaccagcctggccaacatggtgaaaccccatctctactaaaaatataaaaaatttgctgggcatgctggtgcatgcctgtagtctcagctattcagtggggctaaagcaggaggattgcttgagcctgggcagtcaaggctgcaatgagccctgattgcgccactgtactccagtctgggcaaagagcgagaccctgcctcaaaacaaaacaaaacaaaataggccaggcacagtggctcacgcctgtaatcccagcactttggaaggctgaggcaagtgggtcacctgaggtcaggagttcaagaccagcctggccgacaaggttttgtctctactagaaatacaaaaattagccgggcatggtggcaagcatctgtaaccccagctactcgggaggccgaggcagcagaattgcttgaacctgggaggcgggggttgcagtgagctgagattgcaccattgcactccagcctgggtgacagagtgaggttctgtctcaaaaacaaaacaaaactggtatttattctctgatcgttctggagg

SEQ ID NO: 18303 - DNA, 2300 bp, Homo sapien
ctggagtgcaatggcgcgatctcggttcactggcacctctgcttcccaggttcaagcaattctcctgcctcagcctcctgagtaactgggacaacaggcgcgcaccatcacgcccagctaatttttgtatttttagtagagaggggttttgctatgttggtcaggctgctctcaaactcctgaccttgtgatctgcctacctccgcctcccaaagtgctgggattatataaagagtggaatcaggaaaagcatatgaatattcaccctgagacacttatctctttggcccctaactgtctgggcttttgagcaagtagctggcactgtgcctctgaggactactaaatgccaccttcagcccaaaagaagccttgtcagtctctaatcttcctttccatgcagattgccactgccttgtctcacgttcttctttcctgggtgacactggctttctatttgtcccccttatctcactctgtctttccttgagtccatcatctggtcaacatttactgagctgaagctccctggagcttactcactgagcctagtagagtgcggtctacattcccatggaggagataaacctgcgctagggactgtggtagctcagaggggcatgtacatcagacggaggcattctgggactgagtttggtacacctggggtctgatctccttatgcagaacatctaccctgcagtctgcatgactgtggtcaagtcacttttctaaacaaaaatctgtagcctacaggctcccagatgctagcctggagactgattcactaggttggggtcccagaacttgtatcctgctcaagttccccagggggttctggtgcacagctgggtgtggggccattaccccgtgttgccttattgatttgatatttaagaccctctctttcctggccttgcaaccaaaccacccacttttccgccacatgctgtaattggagcgctccccaatcctcttacagggttgttgatttcctacactttatgcctttttccatcagtcccttgtgcctgagggcagggaccatgtctttaccctgcatcttcattgctccaaggactttgcacttaaggagctctgacagcatgccttagatgagcagatgtgtcaggggccccgtggtagttggaatgaacatggaaattatctttcacaattccaatctcaaaatatatatatatatataatgtataaatatatataatttatatttatatatttattatatataaatataaatatatatatatatattgcctaggctggagtgcagtggtccaatctccgctcactgtgacctttgcttcccaggctcaagctatccttccacctcaacctcccgagtagctgggtagctgggactacacgtgcaagccaccacatctggctatgttgttgttgtagagacagagtttcgtcctgttgcccaggctggtcacgaattcctgagctcaagtgatccacctgccttggcctcccaaagtgctgggattacaggtgtgagccaccacatctggcctaaaacactattacccaatattttttcatgcctgtatctatttgcagtagttattcctggttcctgctaaccagtggataaaagcacatctctgtgatttggggtagtttcttgaaacacgtctgttctcccttcccagacacatcatctcagagttggagcacctgacgtttgtcaacacggatgtgggccgctgccgggcatggctgcggctggccctgaacgatggcctgatggagtgctacctgaagctgctgctgcaggagcaggcccgcttgcatgagtactaccagcccaccgccctgctccgggatgctgaggagggcgagttcctccttagcttcctgcagggcctcacgtccttgtccttcgaactctcctacaagtctgccatcttaaatgagtggacgctcaccccattggccctgtctgggctttgcccgctttctgagctggaccctctctctacctctggtgcagaactacagcggaaggaatctctggattccatttcccattcttcaggctctgaagacatcgaagtccatcactcgggccataagatacggaggaaccagaagctgactgcctcctccctcagcctggacacggccagttcatcccagctgtcctgcagcctaaactctgatagctgcttactccaagagaatggctccaagagtccagaccattgcgaggagcccatgtcctgtgactcagacctgggcacagcaaatgctgaggactcagaccggtctct

SEQ ID NO: 18304 - DNA, 2300 bp, Homo sapien
gcagggtagcttgggaagtaagagaagaccaggagataggggctcctaaaaagcagacaagagattaccgaggggttccccacagctccagcacacagccgctgcacaaaaatgcagtggaattactgagggacattatgtgcttgatgggggacagggaatgcttgtgccaagccaccaaggattatgctgtgccagttgtatactatcgttttgccaaggtgaaaggatttccctactaaatcccttactttccactttgtttaaaatgagtttaacaccgagagaatagtttgtctctatgtccttatttctaatcttcctgctcaaccattaactgcagtaaacacactcagacccatctagtctaaaattgagaaggggaggttctcactcctggagagagaattactgaaagggcggccctcatacagtccagggtcatacccccaagtgctggttttatacttgaaagcagacagtgggactctgaactttgcagagataagagggacaccttcctacccagagaagccaaaagagcacaggacgcccaggccgagggcagtgaagcttgcttccaagaactggcccgttccccagccaacccctgtgcccacttaggactggcatgtagcagtacctctcctcatccacactcaggccctaggctcccaattgaccaaagcctgcaagtataaagtgtccagagcatgggtccctgccaacactccctgccctgctcttcactacctgtggccaccacttatgacattttgttccgagttcatctgaaagagaaatgtcacttttgcgttagaaagaagatatacaggccaggtgtggtggttcatgcctgtaatcccagcactttgggaggccgagtcaggaggatcgcctgaggccaggagttggagaccaggttaggtaacacagtgagacccctgtctctacaaaataaacaaatttttttaaaaatgaaaagattggccgggcgcggtggctcacgcctgtgatcccagcactttgggaggccgaggcgggtggatcaccaggtcaggagatcgagaccatcctggctaacacggtgaaaccccatctctactaaaaacataaaaaaattagccgggcgtggtggcgggctcctgtagtcccagctactcgggaggctgaggcaggagaatggcgtcaatccaggaggcggagcttgcagtgagccgagatcgcgccattgcactccagcctgggcgacagagccagactccgtcgcaaaaaaaaaaaaaaaaagaaaaaagaaaaaattagctgggcgtggtggtgcacgcctgtagtcccagctgcttggaggctgaggtgggagaaccacttagtccgtgaggtcaaagctgtggtgagccgtgatcgtgccacagcactccagtctgggcgacagagtgagaccctgtctcaaaaaaaaagcagaaaggaagaaagaaatcctctacacgggctagaagagaataaccagacccctaagcttcaagccaggcggtgctaatgggcgagttacacacgggagagtgcccaaggggacctcaaggcgttcccttgggataaagtgtggtcaaaacagctatgtttatcctgaaagcgcaaggcggaggctccaatttgggcccgggctccgccccacgggctgcactgctgccctcggagaggcaaagatagggcaggcgttattagtcccactcacaagtgggaactcttcagctgagggaggcgaagtgacagccccaatgttgcacagatggttctgaggccaaacgaggtcaggaacccagaagccaggatctagtttgacgcagacctgcgggaggcgggcggtaacggatgcgttctccctgacaccggtgccttcgcctctctgcgccctgcaggcgcccccagttccccagcctcccagacctcgcatctgccccggggctcagctcccagggacttccgggagcagctggccccgccccaaggctccttcgggctgcgcgattggcaccgcgggccggggcagggccggagcgccgagccaacgtgatggcgtcaggggccggggcgccgcttcctgttgtcagtggccgagagaccgcatcgtcggctcggaggctgaggggctgccgcggccgggagcgcccctcgcctcgctcctcgctccgcttggtgagttagggggtcaagatgcgaggagggcggcggagtggtgggagggccgaggcgcgaacgggcggtgggcctcccgctccctccgcgattcccagcccctggtt

SEQ ID NO: 18305 - DNA, 2300 bp, Homo sapien
gagaaccttgttcgagccgccgtttaggatggttgattaggacgcgttgcagtggcggtagctcaccaatccagtgcgtgcacccgctcctttattaggctaaagaaccagtggctcccacagggacctgatacaacagtgcgttaaataaggagcttattgagctctcatgtcctaagtcagtggagaagtccagggctagtgtgggggctccggcgggggctgtggcccccatccgcatggagcctccccatggttcacaggtctcagtcttcggagccttcggccctgcgagcccgaacggtccacagggcggcgccagaccctctttcgaacgccatcctcttaaagcctcggctccaaccggttccacttcttcaggctcaggattttcactcttctcgaatgggggtggccctcccccaatcttctgagtcgcaacagcatctccctccctccaggacctcagagccagagctgggcgagaggccctaacctccggggtagggtggaagcgtccctgtgaaggtgcagtcctgcctcccatccccaggcgccgggcctctcccaccctcagcgccctgctcacctccagctgaagatgccagggcacctctgcttcctccctgccctctctgcagtaccgccgagtgtgcataaaagggtttaatataggctttgccgggcgcggggactcccacctgtaatcccagtacgttgagagaccaaggcgggaggatcacttgaggccaggagttcaaaagcagcctgggcaacaaagtgaggcctgtggaaaaaaaaaaaaaaaaaaaaaaaaaagaataaaagaggtccctttttctgggagattgatataggggagtgtgagttagaagggaggcattgaggatcagtcatttaaagcagcatccaaggatgttcaaggctagagatccacaggtgtattttcagaaactgaatttcctggcggggcacagtgactcatgcctgtaatcctagcactttgggaggccaaggtgagcagatcacttgaggtcaggagttcaagactagcctggccaacatggtgaaactgtttttagagaaaaaaaaaattggccaggcatggtggtgggtgcctgtaatcccagctattcgggaggctgaggcaggagaatcactggaacccggaaggcagaggttgcagtcaaccgagatcacgctactgcactccagcctgggtgacagagactgtctccaaaaacaaacaaacaaacacaaaaaaaccccaaaacccaaaacaagccaggcgtggtagctcgcacctgtaatctcagccctttgggaggccagggcgggtggattacctgaggtcaggagttcgagaccagcctgaccaacatggtgaaaccccgtctctactaaaaatacaaaaattagccgggcatggtggcgcatgcctgtaaccccagctactagggaggctgaggcaggagacttgcttgaacccaggaggcagaggatgcagtgagctgagatcgtgccattgcattccagactgagcaacaagagcaaaactccaccttaaaagaaaaaaaaaagaaaaaacaaacaaaactcctgaatttccctgtggatatcttttctctggtagcctttttcaatgagggctaagttttctccaatactatatggcctgcagaccgctcagctttcattccagtgaaaacattccagaaaaaactctgaatcaatcccaggtgtttctccaatcagctcaggatgattgtgtgttacctgctgcccagctagtgacacctctccaggcctctgacttagctaggtctccatgtcactccaccgtagactccccgccttcttcttttgcaaagcctcggacacccaaacacctaccaaaagtgggtagggtgccaggacacctccaagtgtaagtggggctctccagcacacctggatgtggaggtgtgatgcagagtggtggctgctcgtgacactcatttcacccctttctgtgcaggtgccagaagcccaggaagcacacatcaaggctcgcttgccagcggggtgctgccaataaaatgtagtcacgtggaatttggaatgtggaaaggaggtagaagtcatcctttcctcccccatagcagcaggtgtgcaggctctggtggtcagctggactccatactcccccaccagtcaccagcctggggaccgtggggctgcaaggacctcagcagcggtttcccaagtttcctgacttcttccatcctctggaaatcagctgtggtaaagtagcctgaaag

SEQ ID NO: 18306 - DNA, 2300 bp, Homo sapien
ctatactgacaaactcatcttggcattaattgtgactgaaatactaatgattttgattatacttttctgcctcattgtggtaaggacaataattaattcaggttttcagaatgcagtcctgtttttgtgtggattcagagctcacaaactgaaaaccaaagccactttcccacctgctgctacttgacatacttcttcagtcatttaaggctgaggtgtatgctttgttcttttattgcagtgtatatttcaggatttttaaaagatcctcgcttccagatctctgtgaattgaaaccaagttaatcccactagactattttaagaagtcgatataatagcaaaatttctccacccaaaactatgtcaacaattggatgtactcatcaagtcacccttactctgccactaatttatttccttggtgctgaaatgatgagagaggtataatctccaccctcacggatttgtcatcaccctggagaggaaggagagagccaaaagacagaagtattgtcttgtagacttattagatttacacagtatcgtcctccagtgtgtaaggcattgtctaaataggtccagttaaagcactacagagtagccatcttttacaaaaattgttggccacatttttaagttcgcaggcgagggggaacgtctcatactctagccctcctgagcctagaccctctgtgagatgtgtcaccatttcttggacaccacgtgagacattccccctcagattagagatgctcagcctgcatcaacttatctaaagcctacatctggctactctggggcaagtcctgtttacagtgcccattcctggagcttgcctctgtttgtcttttgttcgattacatgatatattacttttcccaacaggccagtgctagcatattggaagagtgatttaataaagctggcaaccttgacgctatgccaccagtccaaccttatttgcctcatttaccatttccattattgtggcagccctccattccagccacagcagcccctcaccataccccagtcacaccacccacatttctgcttttgtctgtgtgtttgtccatctaaaatgcccttatttcactctgcctgtgggagtcctatgcatctcccaccagaaactgctatcataccagagattcactgtgtatttaacaacataggcatacaatctggcaaatttgaaaaactcttaacatacaccccaaatccctgcccaaatttaagaactagggtggacacagtgcttttttccatgtcgcatcttctgtgatggggctacgatatgtgggagcagagaatggggagggtggagcgcatgccagatgaggatctatcagcaatgggagggggcctccactttagcatctccaccctgctcctctcagaggaccgcctttcattgcattcagctgtgatggtagcaagaacacaggcgcaccgaggacgaggagagcgggagccttgtgctctctctgcatctgaggcaggacagcacagggtatggagcagtctgcagagaggccagctcatcagctcatcagggaagcacttgtcttccaccttgggctttgactgagcactgggcaattggaccctggggatcaatgaaataatcctaagcagagttactctatgtcacactatggaatgttccaagtagatggccgtgttttcaaaagatatattttctccttttgttgttgccatttcataggtttaggattgggtgtgtgtgtctcctctctgaatggcactcaaatgtttgctgactcctactctgcgtgactggggtgtacagctatggactgatgcatcccatcccatcatctttcacgagcaaagcagtctcttttttgacagctgaagaagaatctgtagggaatccagaaggagcattcatgaagatgttacaagcccggaagaattacacaagcactgagctgactgttgagccggaggagccctcagacagcagtggcatcaacttgtcaggctttgggagtgagcagctagacaccaatgacgagagtgatgttatcagtgcactaagttacatttgccatatttctcagcagtaaacctagatgtggaatcaatgttactaccgttcattaaactgccaaccacaggaaacagcctggcaaagattcaaactgtaggccaaaactggcaaaaagtgaatagagtcctcatgggcccaatgagcatccagaaaaggcacttcaaagaggtgggaaggcagagcatcaggagggaacagggtgcccaggcatctgtggagaa

SEQ ID NO: 18307 - DNA, 2300 bp, Homo sapien
tgtacaccccagtcacgcagagtaggagtcagcaaacatttgagtgccattcagagaggagacacacacacccaatcctaaacctatgaaatggcaacaacaaaaggagaaaatatatcttttgaaaacacggccatctacttggaacattccatagtgtgacatagagtaactctgcttaggattatttcattgatccccagggtccaattgcccagtgctcagtcaaagcccaaggtggaagacaagtgcttccctgatgagctgatgagctggcctctctgcagactgctccataccctgtgctgtcctgcctcagatgcagagagagcacaaggctcccgctctcctcgtcctcggtgcgcctgtgttcttgctaccatcacagctgaatgcaatgaaaggcggtcctctgagaggagcagggtggagatgctaaagtggaggccccctcccattgctgatagatcctcatctggcatgcgctccaccctccccattctctgctcccacatatcgtagccccatcacagaagatgcgacatggaaaaaagcactgtgtccaccctagttcttaaatttgggcagggatttggggtgtatgttaagagtttttcaaatttgccagattgtatgcctatgttgttaaatacacagtgaatctctggtatgatagcagtttctggtgggagatgcataggactcccacaggcagagtgaaataagggcattttagatggacaaacacacagacaaaagcagaaatgtgggtggtgtgactggggtatggtgaggggctgctgtggctggaatggagggctgccacaataatggaaatggtaaatgaggcaaataaggttggactggtggcatagcgtcaaggttgccagctttattaaatcactcttccaatatgctagcactggcctgttgggaaaagtaatatatcatgtaatcgaacaaaagacaaacagaggcaagctccaggaatgggcactgtaaacaggacttgccccagagtagccagatgtaggctttagataagttgatgcaggctgagcatctctaatctgagggggaatgtctcacgtggtgtccaagaaatggtgacacatctcacagagggtctaggctcaggagggctagagtatgagacgttccccctcgcctgcgaacttaaaaatgtggccaacaatttttgtaaaagatggctactctgtagtgctttaactggacctatttagacaatgccttacacactggaggacgatactgtgtaaatctaataagtctacaagacaatacttctgtcttttggctctctccttcctctccagggtgatgacaaatccgtgagggtggagattatacctctctcatcatttcagcaccaaggaaataaattagtggcagagtaagggtgacttgatgagtacatccaattgttgacatagttttgggtggagaaattttgctattatatcgacttcttaaaatagtctagtgggattaacttggtttcaattcacagagatctggaagcgaggatcttttaaaaatcctgaaatatacactgcaataaaagaacaaagcatacacctcagccttaaatgactgaagaagtatgtcaagtagcagcaggtgggaaagtggctttggttttcagtttgtgagctctgaatccacacaaaaacaggactgcattctgaaaacctgaattaattattgtccttaccacaatgaggcagaaaagtataatcaaaatcattagtatttcagtcacaattaatgccaagatgagtttgtcagtatagccgtatcctggaacttcttttgtgagctaaaaaaaacaaaaaaacaaaaaaaaaacacaccagaatgagagctaactattcaaaaccccagtattccaggtgagtagcttacaggttcttttttatttttttgaaagagggtctcactctgttacccaggctggggtacagtggtgcaatcaccgttcactagactcgacctccctgggctcaggtgatcctcccacctcagcctcccaagtagctgggactacaggcacgtgtcatcaacccagctaatttttttattttttgtggagacaggctttcactatgttggccaagctggtctcaaactcctgacttcaagtaatccacccaccttggcctcccaaagtgctgagattacaggcatgagctaccacccccggcctacagttcatcttgtgccctaatctatatttcactctctacatgagcaaagtgggagatcactgtcatgaccaa

SEQ ID NO: 18308 - DNA, 2300 bp, Homo sapien
aagaatctgggactcccaggccatagcttatcttggccatgtaactttggtcatgacagtgatctcccactttgctcatgtagagagtgaaatatagattagggcacaagatgaactgtaggccgggggtggtagctcatgcctgtaatctcagcactttgggaggccaaggtgggtggattacttgaagtcaggagtttgagaccagcttggccaacatagtgaaagcctgtctccacaaaaaataaaaaaattagctgggttgatgacacgtgcctgtagtcccagctacttgggaggctgaggtgggaggatcacctgagcccagggaggtcgagtctagtgaacggtgattgcaccactgtaccccagcctgggtaacagagtgagaccctctttcaaaaaaataaaaaagaacctgtaagctactcacctggaatactggggttttgaatagttagctctcattctggtgtgttttttttttgtttttttgttttttttagctcacaaaagaagttccaggatacggctatactgacaaactcatcttggcattaattgtgactgaaatactaatgattttgattatacttttctgcctcattgtggtaaggacaataattaattcaggttttcagaatgcagtcctgtttttgtgtggattcagagctcacaaactgaaaaccaaagccactttcccacctgctgctacttgacatacttcttcagtcatttaaggctgaggtgtatgctttgttcttttattgcagtgtatatttcaggatttttaaaagatcctcgcttccagatctctgtgaattgaaaccaagttaatcccactagactattttaagaagtcgatataatagcaaaatttctccacccaaaactatgtcaacaattggatgtactcatcaagtcacccttactctgccactaatttatttccttggtgctgaaatgatgagagaggtataatctccaccctcacggatttgtcatcaccctggagaggaaggagagagccaaaagacagaagtattgtcttgtagacttattagatttacacagtatcgtcctccagtgtgtaaggcattgtctaaataggtccagttaaagcactacagagtagccatcttttacaaaaattgttggccacatttttaagttcgcaggcgagggggaacgtctcatactctagccctcctgagcctagaccctctgtgagatgtgtcaccatttcttggacaccacgtgagacattccccctcagattagagatgctcagcctgcatcaacttatctaaagcctacatctggctactctggggcaagtcctgtttacagtgcccattcctggagcttgcctctgtttgtcttttgttcgattacatgatatattacttttcccaacaggccagtgctagcatattggaagagtgatttaataaagctggcaaccttgacgctatgccaccagtccaaccttatttgcctcatttaccatttccattattgtggcagccctccattccagccacagcagcccctcaccataccccagtcacaccacccacatttctgcttttgtctgtgtgtttgtccatctaaaatgcccttatttcactctgcctgtgggagtcctatgcatctcccaccagaaactgctatcataccagagattcactgtgtatttaacaacataggcatacaatctggcaaatttgaaaaactcttaacatacaccccaaatccctgcccaaatttaagaactagggtggacacagtgcttttttccatgtcgcatcttctgtgatggggctacgatatgtgggagcagagaatggggagggtggagcgcatgccagatgaggatctatcagcaatgggagggggcctccactttagcatctccaccctgctcctctcagaggaccgcctttcattgcattcagctgtgatggtagcaagaacacaggcgcaccgaggacgaggagagcgggagccttgtgctctctctgcatctgaggcaggacagcacagggtatggagcagtctgcagagaggccagctcatcagctcatcagggaagcacttgtcttccaccttgggctttgactgagcactgggcaattggaccctggggatcaatgaaataatcctaagcagagttactctatgtcacactatggaatgttccaagtagatggccgtgttttcaaaagatatattttctccttttgttgttgccatttcataggtttaggattgggtgtgtgtgtctcctctctgaatgg

SEQ ID NO: 18309 - DNA, 2300 bp, Homo sapien
caactctgaacttgctctgaatctcaaacctttctgttcacagaacaaacgctcaagggctttcaagagtgtttctgtagattaggtttattagcatcaacttcatgacttctaaaatgtgactgctttcatgtccagatagcttgaatacaggtatctaccagtgatatggggtggagaattaataatgcttggttacataaagtcagtgttgcttatttttcaaaacttttttttttttttaccaattatattattcccttctccccaagaagtgggcagaaaagctttgttaacctccttttacagatgaagaaaaacaagatcagaggtgctaagtgctgtagcctagtgccaggtcttctggccccaattctgggttctccccaagcccatgcttcttccactttctcacaatctttacttcttcctctgaccctcaccaccacccaaaatgcttttaattctggaaaagaaacccagctgcacactggcacacttgaccttcctgcagtcagaagccttggctgattccccatccaaaatattagagatgaaatgaaagcaaagtaggcatctgacaaaagttgctttttcccttctgcattttaggacctcaagtaatgtttatccagaaactgctatcataccagagattcactgtgtatttaacaacataggcatacaatctggcaaatttgaaaaactcttaacatacaccccaaatccctgcccaaatttaagaactagggtggacacagtgcttttttccatgtcgcatcttctgtgatggggctacgatatgtgggagcagagaatggggagggtggagcgcatgccagatgaggatctatcagcaatgggagggggcctccactttagcatctccaccctgctcctctcagaggaccgcctttcattgcattcagctgtgatggtagcaagaacacaggcgcaccgaggacgaggagagcgggagccttgtgctctctctgcatctgaggcaggacagcacagggtatggagcagtctgcagagaggccagctcatcagctcatcagggaagcacttgtcttccaccttgggctttgactgagcactgggcaattggaccctggggatcaatgaaataatcctaagcagagttactctatgtcacactatggaatgttccaagtagatggccgtgttttcaaaagatatattttctccttttgttgttgccatttcataggtttaggattgggtgtgtgtgtctcctctctgaatggcactcaaatgtttgctgactcctactctgcgtgactggggtgtacagctatggactgatgcatcccatcccatcatctttcacgagcaaagcagtctcttttttgacagctgaagaagaatctgtagggaatccagaaggagcattcatgaagatgttacaagcccggaagaattacacaagcactgagctgactgttgagccggaggagccctcagacagcagtggcatcaacttgtcaggctttgggagtgagcagctagacaccaatgacgagagtgatgttatcagtgcactaagttacatttgccatatttctcagcagtaaacctagatgtggaatcaatgttactaccgttcattaaactgccaaccacaggaaacagcctggcaaagattcaaactgtaggccaaaaccggcaaaaagtgaatagagtcctcatgggcccaatgagcatccagaaaaggcacttcaaagaggtgggaaggcagagcatcaggagggaacagggtgcccaggcatctgtggagaacgctgccgaagaaaaaaggctcgggagtccagccccaagggagctggaacagcctcacacacagcaggggcctgagaagttagcgggaaacgccatctacaccaagccttcgttcagccaagagcataaggcagcagtctctgtgctgacacccttctccaagggcgcgccttctacctccagccctgcaaaagccctaccacagatgagagacagattgaaagacaacacacactatttccattttagaaagtgcaaaggctagagttacaaatatgaaggcttctaaaccaatttcacattccagaaaaaaataccgctttcacaaaactcgctccgcatgacccacagaacacccaaggtcaaaaagagtccaaagttcagaaagaaaagttatctgagtagactgatgctcgcaaacaggcctccgttctctgcagcgaagagcctcataaattccccttcacaaggggctttttcatccttaggagacctga

SEQ ID NO: 18310 - DNA, 2300 bp, Homo sapien
aagttgggggcttattcagacttcttaaaagtctaccttcttcctctgtactttcagcccaaagtgagacttttgagttgggaagagatacttctgaattaaactactaatcactgtcacccaattctaatcccaaccatctttattctaggcataccatactcactgccatgcttacccttcagttgggcacctttgccctccttcctattggccttctggttcctacccaactgtccagtccataggcttcaatgacacctttttcccacacctgtggtagcgttggctgcctcctttacctactcaagtaaccgctttaccgctaatttattgctctctgttttcatctataggatcttacctagccatatggcctgctgcctctgccaacttaaaaacagcattgaggctgtctgcaagacagtcaagctgcattgcaacagtgcatgtctgacaaacaccatacattgtcgtgagtccaaattgcgcggtgataaattgttacattaagtatttgtttttaaactttttatttttaatgatgataaaattttaagctaatgacataattgctttatttttatttactcattcagagttaaactccctcaatttctgaactactcccttgctgagagtcaggttctcagttactattacaaaatttaataatagaactgttccatatgcacaaaggaccaagacaaaggaatgggaaggctagagaataacattaacatccacacactgtgtactgtgctctctgcttgatgctttgcccacagtgataatttcttcatatagtgcaatgtagtttgtaaggtggttttaaattcatgaggtctcaagtactctctgccttataggacagatgtagatacggtttcggtttttctgtttttacagttttatgagagtacaagtgatgctgttttatttgaagcctgagagcttctggttccataaccagaaattgctacctgactcttctaatagaatggaggtcttttccattcttagaccatccaactctgaacttgctctgaatctcaaacctttctgttcacagaacaaacgctcaagggctttcaagagtgtttctgtagattaggtttattagcatcaacttcatgacttctaaaatgtgactgctttcatgtccagatagcttgaatacaggtatctaccagtgatatggggtggagaattaataatgcttggttacataaagtcagtgttgcttatttttcaaaacttttttttttttttaccaattatattattcccttctccccaagaagtgggcagaaaagctttgttaacctccttttacagatgaagaaaaacaagatcagaggtgctaagtgctgtagcctagtgccaggtcttctggccccaattctgggttctccccaagcccatgcttcttccactttctcacaatctttacttcttcctctgaccctcaccaccacccaaaatgcttttaattctggaaaagaaacccagctgcacactggcacacttgaccttcctgcagtcagaagccttggctgattccccatccaaaatattagagatgaaatgaaagcaaagtaggcatctgacaaaagttgctttttcccttctgcattttaggacctcaagtaatgtttatccagaaactgctatcataccagagattcactgtgtatttaacaacataggcatacaatctggcaaatttgaaaaactcttaacatacaccccaaatccctgcccaaatttaagaactagggtggacacagtgcttttttccatgtcgcatcttctgtgatggggctacgatatgtgggagcagagaatggggagggtggagcgcatgccagatgaggatctatcagcaatgggagggggcctccactttagcatctccaccctgctcctctcagaggaccgcctttcattgcattcagctgtgatggtagcaagaacacaggcgcaccgaggacgaggagagcgggagccttgtgctctctctgcatctgaggcaggacagcacagggtatggagcagtctgcagagaggccagctcatcagctcatcagggaagcacttgtcttccaccttgggctttgactgagcactgggcaattggaccctggggatcaatgaaataatcctaagcagagttactctatgtcacactatggaatgttccaagtagatggccgtgttttcaaaagatatattttctccttttgttgttgccatttcataggtttaggattgggtgtgtgtgtctcctctctgaatgg

SEQ ID NO: 18311 - DNA, 2300 bp, Homo sapien
aaattgaagagaaattaagatattctagataaataaaaactgagagactttgttgctagaagacctgccctataaggagtactaacgtgaatctgcacaaagaaataaaaagcacttgctgggcgcagtggctcaggcctgtaatcccagcactttgggaggctgaggctggaggatcacttgaggtcaagaggttgagaccagcctggcaaacatggtgaaaccctgtctctactaaaaatacaaaaattagctgggtgtggtgttacgtgcctgcagtcccagctactcaggaggctgaggcactagaatcgcttgaacctgggaggcagaggttgtggcgagtaaagattgtgccactgcactctagcctgggcaacagagtgagactctgtcccaaaataaagaaaaaaaaataagaaaaagatacttacataatgcaataattataaatctagttgatgaacataaagtatataaagatgtaatgtgtgacaataacagtataaaggagggggtgagagtggagctttagagaagcgaagtttttgtataccattgaaacaaagttggaattaatctgaactacaacgttataaaattaagatgtagctgagactacaggtgcgcaccaccacactcggctaactaaaaaaaatttttagagatagggtctcactatgttgcccaggctggtctcaaactcctggcctcaagcaatcctccttccttggcctcccaaagtacagggattataggtatgcaccactgcatctggccacaaacattttgtttttttactgttcatttttcttttttttttgagacggagtctcgctctgtcgcccaggctggagtgcaatggcgtgacctcggcttactgcaacctccacctcctgggttcaagtgattctcctacctcagcctcctgagtagctgggattacaggtgcctgccaccaccccctgctaatttttgtacttttagtagacacggggtttcaccatgttgtccaggctggtctctaactcctgacctcaggcaatccacctgcctcagcctcccaaagtgctgggattacaggtgtgagccactgcgccctgctaacatatcctctttctaaaaagctacatatattgcaaagtattggaataggaataacatagcagttaggttgggcgtttgggttgattacatatctttgctattatcagtacaattcttatcaaaatcccagctggcttctttccagaaagtgacaagctagttctaaaattataatgcaatttaaggcaccctaaatagcaaaataatcttgtaaaataacaaagtgggaagactcaaatgtcccaatttcaaaacccaaatcaaatctacagcaatcacagtgtgatactggaatgtggacagacaaataaatcaatagaatagaattgacaacccagaaataaaccctcacatttatggaaaattgatttttgacaagggtgctacaacaattctacgtggaaataatgtttttttttttttaaatggtgctggaacaactgaacatctatgtgcaaaataatgaaggtggaccccctacatctcacacgattataagaattgatgcaaaatatgtcaaatacctaaatgtaagagccaaaacgataagactcttacacaaaaacatgagagtaaatctcatgaccttaaattagacaacagttttttcttctccaaactggattttttttcttttaaaacaattttgtcttttgaatttaatgaagtattactagctgaaggcagcctgacatggtgacaagaatgtcagacagatgaaagggacacagcctgatttaaaaccaaacactgaacctttttaaagaagaataagacattttatacacacacatgacaccaaaagcacaaacaaccaaaggaaaaatagatacattagattttatcaaaattaaaaacttttgtgcatcaaaggacactggcaagaaagtcacagaactcacaggatgagagaaaatattggcaaattatctgttaaggtctaatatccagagtatccagaagatatagagaaattcctataattcaataaaaagacaaatcaattttttaaatgggcagaggatgtgaataaatatttcttcaaagaagatatataaatggctcatatacacataaaaatgttgaatgtcttaaatcattagggaaatgtccatcaaaaactgcagcgagatactactttacactcactgggatggctatgagaagagacagacaacgacagtgttgacaaa

SEQ ID NO: 18312 - DNA, 2300 bp, Homo sapien
cataaactccctgaaagcatggactaggtcttgctcatctgcattgcccaccatgtttaaaactgacacatggaaataaagcaaactcaaatatttgtaaaataaatgaatagctgggggagtgagtagaaggaaaataactattttaaaggaaatgtagttttattatttcatggtctctgtagcactttggcatccacctgagggtctttacacccactttccttaagccttctatatttgaaagaatctgtttgcaaaagagcatcactaatgagcttaataaggattaatgacatacagacctctatggacaaagggtaagaatcaagctttcatagcaatgaacatagtatcttcttgtctctaaacagacagaaatacagggatccctttctggtaacagggctggggcgatcgttattttgtaattagtgaagagttaggggcatttctgatgtgcttcttagtgtaaacatttctagctctaccagttaaccatcattttaaacatctgttttaatataacaattcctgaaatgaaatccttaataccagtctattctcttggtagcttaatattcttgataatattattgatataattcagctatttttaatatttaaatgttaatttaattccgattaaattaccaaaaaattctggattaatgatgttcaaatgaatgcaggtggtctccattttcttctcctttaggcaaccatctgaagttaactttagttcctttcatcctactaaaccaactttttgaaattttttttggtgaaggtcagacagtaaatattttaggttttatgggccacatatgatctctcgcatatttctttgtttcttttctttttctttcacagtccctttaaaaatgcaaaacccattcttaacttaatgggctatttaaaaatagaccataaattagattggatctattggttgtagactgaatagaaaaagaatgatatgtgaacccttataaaacaaggttcatatgggtgtcagtcactgctcagattttcttaccatgtgaaatgtttttgtctgtattttgtctatataacttaaaaactgaaaatgcacaggaggtagctagtgctagagatgggctgagaccctatacaaacttacagaattgcagaattttattgctcaaagaaatctgagagattatctaatttgaaccccttattcattttacagataatatgactaaaaactcataaatataattaactaacttacaaatactggagggatagcaggccttcaaatgaatccttgtgtaattcagtcaagttattttctctgagaattctggaaaatgaagaagttatttctagattaaaatgcaaactacaactatttgctacacagaaccatctcctgcatgtggaggaaagctgggtcatggtcacttcaagatggtgggatctgctctgctttcattcaaaccttttcttatattttcctttttgtgtccatctctctccaccaccaccacaaacacacacacacacactcaagcacaccccttgaagagtgggtttcttcccaccaaattctattatttcatgcctcctctctagatcacaaaatcccttttagaatccaactctgggtggcaccaagatcagcagaacctccatttcctcctctcttttcccaaaccttattatgaaagccccacatggaaccatgtcagggctgcaagtgaagccattcaacctttttccccccatcaaaaaaattggagaactataatgtgcataaagtgcacataacataaatgttgtttatatttaatttaatttaatttttgagacagggtctcactctgttcccagactggtctcaaactcctggctcaagtgatcctcctgtgtctgcttcccaaagtgctgtgactgcagacatgagccacctcacctggccaaaatattcagtttaataattatgaagcagatacccatgtaaacatcgttacaaaagatcattgctagcatgccagaagccccagtgtgcccctttccaatcatatccctctctctaaccctaataggtaaccactatcctgacctttgtaataattttcttgtttttaaaatgtagttctggcctggcgtggtggctcatgcctgtaatcccagcactctggaaagccaaggtgggtgaatcacccacggtcatgagtttgagaccagcctggccaacatggtgaaaccctgtctctactaaaaatataaaaattagctgggtgtgatggagggcacctgtaattccagct

SEQ ID NO: 18313 - DNA, 2300 bp, Homo sapien
agctcaagcaatctgcctaccttggcctcccaaagtgctgggattacaggcatgagccaccatgcctggccaatttcttactattgggtagtaagagttctttatatattttggatataagtgctttgttaggctgtgtgatgttcatacattttctccccatctgtgccttgttgttcattgtcttagcggtgtctttttcccagagcataagttttaaattttgatgaagtctgatttaccacattttttcttttacacatttggtgttcatctaacaactttacctaacccagaccttgccagactttttctgtaaaaggtcagatagtaaatatttcagccttgctgtccctgttgcagctctgccattgtagcaatgaaagcagccatagacaatatgtaaatgaataatagctgttccaataaaactttatgaacactgcagtttgaatttcacataatttacaaattatcaattatattgttttgattattacaaaaacaggtagtggattggccatggtttgctgattcctggcctgacaaacccaagttcacaaagagtttcctctttgattttgttgtggtcgttgttccacaccttcttttttcactgtttccttaaggtagagtgtacatatttataagggtacatgtaatattttgatagattcatacagtgtgtaatgatcaaatcaggttaattagggtatccatcatctcagatgtttatcctttttttttgtattgggaagataacaaatgttctagctattttaaaatatacactaagttattgttgactctagtcaccctactgtgcaaacaaaaactaaaacgtattccttctatctgactgaatttttatgcccatgaatcaacttgtcttcatccctacctgcttcccagcccccggtaaccatcattctactgcctatctccatgaaatcaacttcttagtctctcgtatatgaatgagaatatgtgatacttgtctttctgcccttggcctatttcacttaacataatgtcctccagttctatccatgttgctgcaaacagattttattttccaaaccttaagctttatagatgacttcactttttaaatggctgaataatatcctcttgtgcatatatacctcattttctttgatttttctttctttctttttaaatagagatgagttctcactatactgcccaggctggtcttgaatttttttgctcaagcaatcctcctgccttggcctcccaaagtgctgggattccaggctaaaccactgtgctcctttatgcatttttttgtttttgtttttaaagacaaaatcttgctctgttgcccaggctggagtgcagtggtgcgatcttggctcactgaagcctccacctcccaggttgaaattattctcgtgcctcagcctcccaagtagctgggattacaggcgcccaccaccacgcccagctaatttttgtatttttagtagagatgaggtttcaccatgttggccaggctggtctcgaactcctgacctcgggtgattcatctgccttggcctcccaaagtgatgggactacaggcatgagccagtgcacccagcccctttgtgcacttttaaaaacaaatcttagaatttgtgatacatgttttattttcattttcatttggttcacaatattgtaaaatttctactatgacttactctttgacccatgatttgttttaaaacgtattgtttaattttcaaacatttagggatttcccagacatctttgttgttggtttctaatttaattccattatggttagggaacatactcattatgatgaattaaaaaaaatgtagaggtttgtatatggcctgaaacattgtttgtttaggtcaatgttcagtttgtaataggaaagatgtgttctgctgccgttaggtaaagtgtttcataaataataattaggtcaagttggttgatcgtgttaaggtcttccctatccttgctgatttcctgtctgcttgttctagtgattactgagaaaggagtgttgaagtctgcaactattgttatgggtttgttctctttctccttgaaattctgtctgtttatgcttcctgtattttgaggcactgttattagatgcagaaacatttacagttttgtcctcgattatttgacccctttgtcattctgaaataacctttatttctggtaataataattatattaaaaaccattatttggccaggcatggtggctcatgcctgtaatcccagcactttgggaggccgaggcgggtggat

SEQ ID NO: 18314 - DNA, 2300 bp, Homo sapien
ccacaaataaaaaccaacaaacaggacaaatcaggacaataaagaagattcatgctaagctgtggcagaggggggaaggtatgatcgggtgggggtgggacaaggaatggccagggaagataactgggtcaggttggaccctgggctgggagggggagggcaaggcccatcaccacaacttaagcaaaacctaagctgcccccaggtgccataggtccctgtcccagcagggaggctgatgggcctgggcccatgcccctccccacctttgggggtcagatagtggccacccaggtctgctgggttggggcctgacacaggctgtgcatgcccattcgggctgcctgtggagagagaatggagtcactgtttaaccatgctacctgcctcagccccagcagaccacaggaggttggccccagactcaatgagtgcctgcagcagccgtacagacacagcatccttggccacctcatgcccatcccggccatctaggatcagcacaacccagatgaggccgctgaagggcaccggatgcccaggaatcaccacctggtaccagaagcggtgccagccagcaggtcctatgcccaaacacttggtgaggaacacagagctgcccagcttcattcgttggcacagcaactgcagggtagcccgagccccttgggaccctaacttgtcccttgccaaggccaactggctgccgtctggctgtggggaccacaaggagggacccacaagctgctggcgaagtcgctgcttcagttctggcttgagccactccacagccacctgctctccacagaggtgtggctgcccttcctccagggcctttttggccatggcagcggtccagtgcgagctgaatttgagcagagcgatctgcccgggcgccggtccggggctgggcagcagccgcgcctcctgcaggccgggacccagcggctgcagcgcgggctgcagcgcggtgcgggtcagattcggcggcaggcagtcaacgctcagctcacacttcccggtgctgcggcacagaagcagcgggcaggacggccgcagcgggtggttgtgcagcgggcgatggcggcctgcgcgccgcgccgcgagctgcagcgggcatatgcgaagccgcggttcaggccgctgaaggtcatcatcaggcggaactcgtagaggcggcccacgcgctggaacagcaggatagctggtgctcatacacttcctgaggcagccgcccgatgaacacctctgacccagccggcggcgggctgcccacccagcctgggggtggcccgccatacttcctctgcccgttcacctgcaccaggcgatgcctgtctgcctgacccacgcctccagcgccgccttgttctctggcttcaccctctcacaccacagctcacaatcccgcgtggactgcatggctctctattctctttttttttgagacgtagtttcactcttgttctccaggctggagtgcaatggcaggatcttggctcaccgcaacctccgcctcccgggttcaagcgattctcctgcctcagcctcccaagtagctgggattacaggcacccgccaccatgcccaggtaatttttgtatttttagtagaatttaggagtttcctaaattctgggggcttgtctccctgttcccccaccccgactaatttccctcggtcgctgccactgccccgtcccttaggtcgctcgggccgccccactccgagacttttttttctttcgctggttctttcagcttcagtttccctagagggcgggaggggaatatttgggggctctcctgccttcctctccgagccgcggaaggggagacgcagggaggaggtccgaccggctttgggctccagccaggggtccgcggagactatggtctccgaaggccttagacgcggggcatttcgccagctgcgcgtctctctcaaccgcgccaccaagcccggagtccagccgcgcctcgctgcgcccagccccggcgccccaggctctctgcccccgactcaatgctcccgcgctcccccaagcagccgctgcgccacctcgccccgtcccaggctcgtaggctgctcagctcacgtgaccgcgctccgttaacggaagaaacgagatggaggctgaaggcgatccgcagtggggccccagccattcggattgagccttctccctccaaccgcttccgcaggccgggcccctcctgccctgcccctctggcctccccacccggccccagccgcccccactgcgcccattgcgcccgccccttcccggccgctttccc

SEQ ID NO: 18315 - DNA, 2300 bp, Homo sapien
agaaaaaagattcttaatcgataaaggtggttttttttttttttttttttggttttttttttttttttttgagtcggagtctcactctgtcatccaggctggagtgcagtggcgtgatatcggctcactggaacctctgactccctggttcaagcaattctcctgcctcagcctcccgagtagctgggattacaggcatgcgccaccatgcccgtggtttcaccatgttggccaggatggtcttgatctcctgaccttgtgatccgcccaccttggcctcccaaaatgctgggattacaggcgtgagccaccgtgcccggccttggctttcattcttattgtcccatggttaccagagcctaaagaggtaaagaggtaagacctatgaggctctcacagttttttttttttttttttttttttgaaacagggtctcgctctgtcgcccaggctggagtgcagtggcgcgatcttggctcactgcagcctccgcctcccggttcaagcaattctcccacctcagcctttccagtagctgggattacagaggcgcgccaccacgcttggctaattttttttttgcatttctattagagatcgggtttcaccatgctgcgcaggctggtctcgaactcctgacctcaggtgatccacccaccttggcctcccaaagtgctgggattacaggtgtgagccaccgtgcccggcctctctcatagttttattattctattttccacagacccttcctcccttaattttcatgcctctttaatattgtttcttttacctcactgacattctttttcgtcctcctaccttttactgtgggtgtcttattacccttctttgggagtttatcctttagcatgtcatagatcactatctttaggcagaggaccctgcatcttctctagtcctgattgtctaccctttctcaagttccataacttcagttgcctctgggacaccttcactgggttttacaaaaccctgttaccgggaactgaacatattaaaagctaagattcctccccaaatctgcatgttgcgccaattttcctgcccaattatcttgtctgtcccctggttttgcgaccttatttaaacatttaaatccttttctttaaattggaatcttgatgagtggtgcaaaaatcaatggatacaaatgatatgccgagatatgtaagtcttccgcccactggttccctaggcactcagttcctctcccaggaggtaaccactgttgccagctcttagagtgatttttgattccttcttctaccggctctatctcaagtccttccctgtctgtgagatgtgtgccctttcctttccaggccctagtgaactgatatctggttgagtttatatataaacatttatatgtgtatattttatatacatatataacatctctccctatggccttccggcctggagttttcatcacgtcgcttcctggatgaaagaatctcgaggggtgaggggcaggggttgggggtgatggagaagagaacctaaaggggacttaggtagggggttcagagttgccaactggcgtgacgctctgtcaggattcctattcctattcctcccacctcaggcccccttctagtcctctcagccaaaagcctctcgtttccaagggctgagacagagacagagacaacgagatgcacagagacagagacgccaaggcacctgcatccctcttccccttctgtcccgccccatcgctctgacggacaccattgctcagccaatggcgctcacgatgtgcccctgaagggccaatgagcgccagaggagggcggaagattccccgcccccacttctaggcttggttgaaccgtgcaggtaggtccggggctgggggagctgcctttggcactggtgcccctgggggtgggggcacgagtgggccagggtgatggtgaggtagaggaggtgtccctgacccgacgagctcgagggagcggcctggctgggaggcggggggccgcggggcccggggagcgggcgccgccgagggccctggaagcggcggggctgggggagaggggacgcgtgtgtggggcacggggacgcccgcccagcgcccactcgtaggcctgggacgcgggctgccggccgagtggcctgagggcctggctgcccggggggcgggccggggccgcggccgggggcgcggagcggagctcggggcgccaggccgagccgaggtgggacggaccgacgcggagaggaagggaagccgcatcccgcggggcgcccctcctgaagcgagccgggca

SEQ ID NO: 18316 - DNA, 2300 bp, Homo sapien
atctcaagtccttccctgtctgtgagatgtgtgccctttcctttccaggccctagtgaactgatatctggttgagtttatatataaacatttatatgtgtatattttatatacatatataacatctctccctatggccttccggcctggagttttcatcacgtcgcttcctggatgaaagaatctcgaggggtgaggggcaggggttgggggtgatggagaagagaacctaaaggggacttaggtagggggttcagagttgccaactggcgtgacgctctgtcaggattcctattcctattcctcccacctcaggcccccttctagtcctctcagccaaaagcctctcgtttccaagggctgagacagagacagagacaacgagatgcacagagacagagacgccaaggcacctgcatccctcttccccttctgtcccgccccatcgctctgacggacaccattgctcagccaatggcgctcacgatgtgcccctgaagggccaatgagcgccagaggagggcggaagattccccgcccccacttctaggcttggttgaaccgtgcaggtaggtccggggctgggggagctgcctttggcactggtgcccctgggggtgggggcacgagtgggccagggtgatggtgaggtagaggaggtgtccctgacccgacgagctcgagggagcggcctggctgggaggcggggggccgcggggcccggggagcgggcgccgccgagggccctggaagcggcggggctgggggagaggggacgcgtgtgtggggcacggggacgcccgcccagcgcccactcgtaggcctgggacgcgggctgccggccgagtggcctgagggcctggctgcccggggggcgggccggggccgcggccgggggcgcggagcggagctcggggcgccaggccgagccgaggtgggacggaccgacgcggagaggaagggaagccgcatcccgcggggcgcccctcctgaagcgagccgggcagcggccgcgggcgcccctgccctgagcccaccccgcgctctgccctccctaacaatgggaatggggcagaaggaggcgccccactgcggggaggtgaggggtgggtttgggactggggtccgcggtggggggaggtgcgatctcgggctctcgcctctccgctccctctggctctggagttgggggcccctgtggggctctgaagtccgcctgagacttgggtcaagagtcaaactgtcgccccccgctcctcccccaaaatccggtgagcggtaaggaaagtgatgccaagtcttcgaagcctcagtgacaaacgcatagcaagaacacatccactccagaggtgtttattttttatttttatttaaaaaggggtacttttcgacatttatttttaagaagtgggtgctgttatttttgtccctacgcgggcaagcctccattttaagcgaagcagtaactggttaagctggaattgtatacaggcccaggacttgaacgaggatcctaccagaggtcatttagtccatcctcctgcctccaggcaaatttaccttcctcccaccctcaaaattaagttgctcggtctgcttttaacgatctctggggaagaagggtcctttatttgtttctagtacttcagtcaagaataggttttacttttcatgtggaattgactctgaaacttaagcataatcttgggacagtcgggatgattagagaagttttactttactaaatataattaaatgtggcaagggtcttttttagacggttaattaacaaatcacgtttagtgtttatgaagtaccctggaaaattactttattctctctgggattttggctaattgtttgataagcaattttacattatctaaaatacgtgttacatatttatttctctttttatgtaaagtatgtttctacacacatatatatggagacacacatttgcccttttctaaaggggactgtattttctatacttttttagtgcgatgaggcaaatagtacttcaaaatccctgcccaggtagcttaaactatttgcattgtcttgattattttttagtctaaatgaaaatcctctctttcagataccttctcgaaacaaaagattttcctacctgcttatacttggtaaccgagggaatttctaagacttcttgctcatttctgagtattgtctttatatcctgacactatgaatgctacttggatgcctcttaaggtaagatgtgttattttttcattaccagcctcattttattcatttttctttagaattgggaat

SEQ ID NO: 18317 - DNA, 2300 bp, Homo sapien
cttccacaacacttaaaaaccatttgacacgtattattatttattttactctgtagcccaggatggagcgtaatggaataatctcatctcactgcagccccgaacttccaggcttaagtgatcctcccacctcagcctcctgaatagctgggaccacaggtgcatgctaccacatccagctaatgtttgtacttttttgtagagatggggtttcactatgttgcccaggctggtcttgaactcctgggctcaagtgattccccccgcttcagcctcccaaagtgtagggagtacaggcatgagccaccacacctggcacatttcatgttatttattggttgactctcttcccactagcaacgtaaactccaagaacacaaggactttatctgtcttggtttaagcctaaaaccaagtctggaacttagtagatgctcagtggctcacacctgtaatcctagcaatttgggaggtcgaggtgggcagatcacttgaagtcaggagttccagaccagcctggccaacatggtgaaacccagtctctattaaaaatacaaaaattaggtgggcatggcggcgcatgcctgtaatcccagttacttgggaggctggggcaggagaatcacttgaacccgggaggtggaggtcacagtgagctgagatcacaccactgtactccagcctgggcaacagagtgagactctgtctcaataaaaaaaaagacattctagcaaggagatggtgggagatattatggttggtactggagagagggaggcagacatctcatttaaatgtctgtatttacaagtgagacatttggcagtaaatttcagttccagcattcagaaagccaataacaacatacttgtttattggcaaataccaataaaactgcatttctgagctcatcgtcctctaacaagtaagttagcacttcccaggcctcatcaatctgctctctgtcattactgtcaaccataaaaatcagacctagaaagaaatcacgagcatgttagtgatctgagcctggaaaacgcagctgtttatgtatcttcacgacttctccctgcttatgtgtgtgacttcacaaaggcaatcgatacggaaggatacatcatctctagagttaggaggcctgctatacactcaacttacattttgcagaagcatcacagccctgcaccatattaacaacaagaatatatcctgaaaaagttagtctcgttttctaatcacttaatttccacgtcagggaaaaaaacttttttttaattaattaatttatttattttgagatggagtcttgctgcagcccaggctggaatgcagtggcgtgacctcggctcactgcaacctccacctcctgggttcaagcaattctcctgtctcagcctcccgattagctgcgaatataggcacaccatcacaccctgcttatttttgtatttttagtagagacgaggtttcaccatattggtcaggctggtctcgaactcctgacctcaggtgatctgcctgccttagcctcccaaagtgctaggattataggcgtgagacactgcccctggccaaaacattgttttttaaaacatgtaaagtttagtataataaaagcattctagggctagccctctaaagcaaaacttgagacaaaagcttaagtgcaggtacgttctttgggaagtgatcccagagatcaggaatgaggggctgagggagtaaaacagggcaggagggacagacaatagaaggacgagttatcaagctgggcccccactatgggaccactgctcaccgttgttggacattctaagaagccatatcaaatgcctgtcagaactgtccacccagaggacaaaagaggaaacaagtatccttcagtacccattccctgttgctcaagaacaactcaacaggtgttaggccacccatacttctgggtcacattggtatgaacaccaagagattcctatgggcatcttatagtaatgaatttggctggtctttgtccccagtttctagaaggtagcctctaaacccttggacttttcagagtgatagcagtatctttttttttttttttttttttttttttttgagacggagtctggctctgtccgccaggctggagtgcagtggcgcgatcttggctcactgcaagctccgcctctcgggtttgcaccattctcctgcctcagcctcccgagcagctgggactacaggcgcccgctaccgtacccggctaattttttgtattttcagtagagacaaggtttcaccatgttagccaggatggt

SEQ ID NO: 18318 - DNA, 2300 bp, Homo sapien
cactgcgctaccgagaaatcgtcattctttaccaccactgctgcagctagcagctcactcttcagtgctttaagcaaatgatcctcaggaaagaaaaggtatttgcttattgcaggtgcaaagaggctcagattggaacttttccctgaaactatattgtagcccagagttcctgatgtaagacgctttatttaaagacatccgtgagctttttcactggcatatcaatacttcataacactaggaaggtatccagccttttccttatgctagttccttcccttatttgccagatggggaccctgtggggaggtgacccagtgtgaggccgaagctctttcccagagccccacaggccagtggagggtcgtgtttgtgctctgggcatcaccgtcttgggtctcggtcccctgcgactgcagctgctacatccctccctgctctgagataaatgttcttcccatgaagcagacggttcacttttgggatggcgctgtctccaggtttggctgtctcagtccagatgatgtttggttagtttccattcccagaaccacaagcctttgagttctgaaagtttgtgacagaatcaagaggctaatttgggagatgtgagattcccagcccacctggtattgccctcgagttagtggtaaattttgctatggaaaatatctcttgtcaagaccaagctccggcgcattgcctccctcttttggatggccatggcatctcatgaaccacttggaaatgtgttttatgttgttctccaaatattaataaaaatatcccggagaggaggttcactaagtagcctagagctcgtttgtccagacaattgttggccatattagtacctaagcacttctatttaaactttttcttctttttttttttctttttgagatggagtcttgctctatcaccctggctagagtacagtggcgtgatcttggctcacagcaacctctgcctcccgggttcaagcgattctcctgcctcagcctcctgagtagctgggactataggcgcccgccaccacgcccagctaaattttgtatttttagtagagacagggtttcatcatgttggccaggctggtctttaattcctgacctcaagtgattcacctgcctcggcctcccaaagtgctgggattataggcgtgagccaccacgcctggcctatttaaccttctaaaactactttttcaagaaatatttattcgaattatagaagattggccaggcacagtggctcatgcctgtaatcccagcactttgggaggccaaggtgggagagtcgcttgagcccagagtttgagatcagcctgggcaacatggcaagaacctgtcccaaatttaatataataaattttaaataaaattttaaaaataaaattaaataaaaaattatacaggagggccatgtcaggtgaattttaactgaagcaaaccttatttattcataacaatgaagtttatattactaggaaaaaatttcattccatgataaatgtgtggtatcatgtttttcttcaaaatattgaatttaaagaatgttcattgcaatactggcaactaagtccagatttgctttttaaccatggagtaatttctgagaaatatttgttttattttattttattttattttatttatgttatttatgttatttatgttatgttatgttatgttatgttatgttatgttatgttatgttatgttatttttttgaaacagagtcttgctcttgttgcccaggctggagtgcaatggtgtgatctctgcctcctgggttcaagcgattctcctgcctcaagctcctgagtagctgggattacaggcgccctccaccacgcccggcgaatttttgtatctttagtagagacagggtttcaccacgttggccaggttggtcttgaactcctgacctcatgatccgcctgcctcggcctcccaaagtgttgggattacaggtgtgagccaccgcacccggcctctgagaaatatttagattgtacgcctcaaatgggcagggactgtgtcttacacttttgtatttatgctacagcttacctaatacagtgccaggcctcgttaaacacttattgattgctcagacgataaagaacttgctttggaaggaggagaggatagtcatgtgcttctgaatgtattgaacttcttgaaatctctttcctcatcaattttagcagagtttctattgaaactcctagggtgtgtttatggaagacaaactgagatgtgctgtcccagccttaggccctggcagtacgc

SEQ ID NO: 18319 - DNA, 2300 bp, Homo sapien
gcgcccgccaccacgcccagctaaattttgtatttttagtagagacagggtttcatcatgttggccaggctggtctttaattcctgacctcaagtgattcacctgcctcggcctcccaaagtgctgggattataggcgtgagccaccacgcctggcctatttaaccttctaaaactactttttcaagaaatatttattcgaattatagaagattggccaggcacagtggctcatgcctgtaatcccagcactttgggaggccaaggtgggagagtcgcttgagcccagagtttgagatcagcctgggcaacatggcaagaacctgtcccaaatttaatataataaattttaaataaaattttaaaaataaaattaaataaaaaattatacaggagggccatgtcaggtgaattttaactgaagcaaaccttatttattcataacaatgaagtttatattactaggaaaaaatttcattccatgataaatgtgtggtatcatgtttttcttcaaaatattgaatttaaagaatgttcattgcaatactggcaactaagtccagatttgctttttaaccatggagtaatttctgagaaatatttgttttattttattttattttattttatttatgttatttatgttatttatgttatgttatgttatgttatgttatgttatgttatgttatgttatgttatttttttgaaacagagtcttgctcttgttgcccaggctggagtgcaatggtgtgatctctgcctcctgggttcaagcgattctcctgcctcaagctcctgagtagctgggattacaggcgccctccaccacgcccggcgaatttttgtatctttagtagagacagggtttcaccacgttggccaggttggtcttgaactcctgacctcatgatccgcctgcctcggcctcccaaagtgttgggattacaggtgtgagccaccgcacccggcctctgagaaatatttagattgtacgcctcaaatgggcagggactgtgtcttacacttttgtatttatgctacagcttacctaatacagtgccaggcctcgttaaacacttattgattgctcagacgataaagaacttgctttggaaggaggagaggatagtcatgtgcttctgaatgtattgaacttcttgaaatctctttcctcatcaattttagcagagtttctattgaaactcctagggtgtgtttatggaagacaaactgagatgtgctgtcccagccttaggccctggcagtacgccttgccttttcacggcacacccactacagcctttcccacactgtgacactggagctggtgagtcaaagtaagtataagtggggagcacttttcagtacagtagttttaaggaaagacttgggtctctgaaagccatgtttgcatccctgccatgtccctcactggctgctagcctcaggccactgactcttagcctctgtatctcggagcctcagtttgcttaactgttaaatggggatactgatacctgcctcatagagttatgaggattaagtgtctcctacctttgaatgtcttgctccggtgtttccctggagatatcttgtccaagtatgaacagcagtgctggccacaaactcatcagcattattattattattattatcattatcattattattattattattattgagacagagtttcactctgtcacccaggctggagtgcagtggcacaatctcagctcactgcaacctctgcctcctgggttcaagcgattctcgtgcctcagctgcccgagtagctgggattacaggcgtgcaccaccacatctggctaatttttgtatgagtagtagagacggggatgcactatgttggccaggctggccttgaactcctgacctcaagcgatctgcccgccttggcctcccaaagtgctgagattacaggcgtgaatcactgcgcctggccacttttaaaacatttctatcaccctgaaaagaaaccctgtaccctttagcagtcactcctcatttcccctgtcctccgcagcactgggcaaccactaaccactgacctacttcctgtctctagatctggtggagatgctttttaaacttttttttactaccctgtggtccctgaggagcattacactgagaagttttctcctattttgtctttcattctccacatcctcttttgttctagtgcatggcatgggaagccctctctaggaggatgctgtggccacacaagtgctggacgaaccgctggagtaggtgacttccaaggtgtcctgat

SEQ ID NO: 18320 - DNA, 2300 bp, Homo sapien
gagacaggcggattggttgaatccaggagttcaagaccagcctgggcaacatagtgagacctcatctctacaaaaaaaataaaattagctgggtgtggtggtgtgtgcctgtagtcacagctcctcgggaggctgatgtggaaggatcacttgagcccgggagatagaggctgcagtgagatgagactgagccattgcactcagcctaggcaacagagtgagaccctgtctcaaaacaaaacagaaataacaaaaaataaggtgacttgctggaggccacatggctgtgagccaaatacaggtctgggttatcagggctcacatacttctaagtacaccctactgccttggaatctgctgaagaccaagcccctgcccccaagccatggcaaagaaggagggaaggaagcaaaggtgcccagcggggacaactcggggaggggcgaggtgcccagggcccaggaaggccaagcagcatgtggcagggcagcatcaggtgactcccaagaaggaatgaggagaggatatgaggaaagagccacagcacagaggcctgctgttaggtcagcggagaccacggcccatgggacctggatctacccttgatgctaacaatgttctttggggaaaaaatctataatcacaaagtttctgcaactggactgtagtcatggttgcagaactgtatagatttactaggaaccatcaaattgttcacttacaatgggtaaattgtacagtacataggttatccctcagtaaagctgtatgaaatttatagtcatgaaactaatagtgacaaacgagctgggtaagtaggtctcagctgttctgtaggcactttgagaagaggaagagtagcatctcggttttaataaaagaaagcctggcccatggcgtccagcttctgcttgaatactttcagtgcccgggagctcagtatctcaaagcagcccactcctgtttaagagaactctaaaccttagaatgttgaaatacatcattattattctagtactgctgtgaaaaataaatgtctttgttttgccacataacatttctctgagagcttgaggacagttattgcattttcccaagtcatttttatctcagacagaattccctgatgacctgtaggttttttgtttttttgtcttgttttgtgtgtgtgtgtgtgtgtgtgtgtgtgtgtgtgtgtgtgtgtgtgtgtgtgtgttttggagatggagtctctgtcgcccaggctggagtgcggtagcatgatcttggctcactgcagcctccacattccgagttcaagcaattctcctgcctcagcctcccaaatagctgggattacaggcgtgagccgccacacctggctaatttttgtatttttagtagagatggagtttcaccacattggccaggctagtctcgaactcctggtttcaggtgatccgccctcctcggcctcccaaagtgctgaaattacaggtgtgagccattgtacttggctctccttgtgttttttacaggacaagatttccagcctctcccattctcccattctcctggtagctctccaggagctacccctttgatctgtccacatccttcttaaaatgtggggacccatggggaacctgagattctgcagatgccagcccagtgctgtgtggttaacaatttggatcctagcattaagaccccgggttcaaatccttgctccactgtaggccagctgtgtgaccatggttaaaaacatctaccttactgagctctaatgtcatcatctaagttattgtgaggattgtactgacccacactttctatctgcccaatcccttgaggtgggctcaacctgggttggcaatggttgggcaagggagagcgatcaaaacagcaaactgtcacactgctgataagccaagcagagacacagccaccattaggagaaggggctcttccatctctatctatcaggcttttctctcatggagctgtaacccctggtaaaggaggtgaggaacttgctggggggagcacacaaacacctgctgatgtgcctgacttggatacccaggaagttgctggctttctcttcctttccccaacatttttatttgtttgtttgaggcagagtcttgctctgtcacccagcctggagtgcaaaggcgtgatcttggctgagtgcaatggcatgatcttggctcactgcaacctccgcctcctgagttcaagtgattctcctgcctcagcctcctgagtatttgggactacaggcgtgcgccacctcacccggctaatttttgtatatt

SEQ ID NO: 18321 - DNA, 2300 bp, Homo sapien
tgctggtgaatttctgatcaagaattctgctccccacaaagaactgcctagagggtgggaccaagccacccctcacacttgagcatccagtccactccatcgtgatgatgatgatgatcatagtattggtgactacagctaaccctcattaagctctcactatgtgccaggctccgttccaagctctttacaaataccaactccttcaaactccccaaccaccctcagaagtagcgtttctaccccgattttatagatgagaaaattgaggcattgttaaataactctccaagtttatacagcttgtaagtggaaaagccaagattcaaactcaggccatctgactccagaacctgcacatcagactgccccgcacttaactgttgttggtaacagttagttgtccatctgcttagcatgtccatcccttctggggttggctggggcaagtcagggcccaactcggcacagccagctccggagcactaacctaatgggggttttgcaagactcgggactgtgtgcttcacctggaaagtgccaggtgtgtggataagccatgtgagcagctggcttcctgggcaatgcccctccccacttcagtgtcccaggcccctttagggcccagccctccaggcactgtgagctgggaatgaggtgaaggaggactaggcttaccctctgtgtgcctccattttctcaccagtaaactgtgtgtgttggatcttacgatcttctaaaataactccagctccaaatgaaggccagtggacccatgaacacgctggctcttgcccagtgtgctgagaagagggcaggagggaggagtagggtgggcacggcagggcacagggtgcagggcaggtgggttcagtttgatttcaaagccgactgcccgccgccccaggtgctctggtgtacccaataggggctgcattggccaggcggcctaggctctgcgggtggagtgaagatttctctacctcccagtttctcccttttcagctctggtaggagagaggaagagtgaagaggaagtcaaaagttctgttcatctggaagggctgggagttgcttcctgggatggggagctccgaagccaattcagaagacggccccggggtctggcggggaggcccaccgctgcccagagggctcggccggccgggagggggcgctgtgtcctccccacgccctgcccgcgggctcctagcagcgttcgccgcgctgcaacgcaatgcgcgcccggctttcccctgggcagcgttcagtgcccgcttgtcctgcagggcaccgccgtctccctttcatcctggggctcccaggtccaaagggttcccagatccagcctcttgcctgaaccaaagtggccaggcactcagtttgtaagatgaacaaatgaaggaaagaaggaacgaatgaataagggctcatcttgcagagcgttcgcgtctcagcgcgcaccaggcacatcagtgccaaaggtgctgggggtcgggcccagcgcccggcgcggctggaatgggggcggcgaggagctcctcctagccagccgcagggcgggaactgcccaaacgcaggtcgcagcctcactgggttccgcggcggctccgctcagtagggaccgccctgttccctagcccccaatagcctcgccctcataaattcacctgagcaccctggcccaagtcaccccagatccctgggacttcccaggccccgacctcggccgggcgggaggctgatcctttaccgcggcccccttcccccattcccggcttctccccgggctgcggcggccgccactgctgccagcgcgccccgaggactgccgcaaaccccgggcgcagggaaaggggatcctggcggcgggacacagagagcgggccgggggaaggggagggaacggaggaggcgaggaggagctgggagggagccgaggggcgaggcgcggaggagggaccgaaggggagcggaggggagagggagggggaggaaggggaggggacgagctgggcgagggggcggggagccgaggcgaggagcggcgcggaccgtgggggaggtggcgggggcgaggccggcaagaggcggccgcgggccgggctgcgtcgggaaacggcggccagacttccccgggaaggggcgagcgagagccgggccgggccgggccgggccgcggggccgggaagcgccgagccgggcatctcctcaccaggcagcgaccgaggagcccggccgcccaccccgtgccgcccgagcccgcagccgcccgccggtccctctgggatgtccgtagg

SEQ ID NO: 18322 - DNA, 2300 bp, Homo sapien
ctcccctcagacctccatgaaaacccactgggtgagcctcagccctccggtaactcatccctcatttggcaattggagagaatcagcagcctcttcaccaactctgcccaagggcctgaggctccctgagactgcggtccactgacatggaagagctttaaaaatccatttagccggatctcccactggccagctgtagctgagcagctcctcagcagggggaccagggaggggaatggaggggagtagtgcgagagaggagaggccacatctacttttcagccctggaggccaggacgggctccctatcatcaccttcttgtcctgatgctgccagcagaggcagctcccaggctggatggtcccttggggatcagccagtccagcccctccttttataaatgagaaggggtccccagaggtcagtcatgcagcacggcagcagctcagctggtcccagggccccagcctctagatcctcacagggttctgccccatggggctccagactcaaggactgggactccagcagctttcccagccctgttccagccccaagggccactgggagccacaggaaggcctacagtgagggaggctccaggtgagatactcagggcttcatttctctgccaggcagttctgcctgaagtcagagccagaattaactcaaggaagcatgtttagagctactgatgccagagccgggtacagggtggggtggggcaacctctgccagcagagaagatgagatggaatttagaactcatgctgtcccttcccagctaggttttaggaccctggagctcaagcctggtaggcatgaaggagggtaaggggaacacgttgggcagctctgcccatcccagggccctaaagccaggcatcaattcagctcacagggcccctccccatctccttagaaggtgacaggttctgggccacagtccaggccggtggctgcacaaacctccatatgtccctgggccactctcctgccttcctccttgagtgacatgggccaggctaggagcagctgtgacagacctgagtgatgacatctccccacacacgcctgtcacctgtcattttctgtccaagagacctccatcatggatgttccccccacccacagaccacgaccttccaacacaggcccgctatggggaagtgccaccatgggaccttccccaagatctgccccatgaactctgagcccccatgtgcagcacagccagtgaggacctcccacggcagcctctgtgagatggctctaccacaagaagccctgtcatgccacctgccacgcgagctgtcaccgcatacccttccaccgtgtcatgcccagcctcgtgaaaattgactcatgaggtctcaccatttttttgctgtcttgcaagacccctgaaaaggaggtttctcagaagagcacctacctgtcatctgccaccacataatgacttgcaaaggaacagcccagggagctggtcaagcctgtccacgggccagtcctgtgggcatgatcatgccagcttgagtgggcagagccgggggagccaccaacccctgctggaggccaatgggcagaaagaggcaggaagatgggggtggtaaggaagcccctctccccagcttcactacacaacccccagccagcaggtgcctgtactggccatctacagatccatctacgcatccatctgggccaggatggtcaggcaggggccggggctgccccgccatcactgcctctctcttccttttccagacaatggctaccgggagtgcctggccaatggcagctgggccgcccgcgtgaattactccgagtgccaggagatcctcaatgaggaggtgaggctgagccgaacaaggctgcccatatggaggggagtccagggtccccagcagagttttgtgcctgctacttggagtcagggagccagaggctaatgtcaaggccctgctctagtgaagctgactggggagctggagctgtcaacttggaaaaggcccatgagcaggcgccctcgagggcaggctggaccaatggggcactgggcaggctctgatggtgatgagatgggtccttgttccttccttccttctccctgtgctcatcgggcagccgcttgcactgggcatgggactgtcctgggggtgcaaagggagaccagactcggtcacaggagtcccacccttttccacaacacatgcctgagagatacatccagttccagccacagggctgtatgggaaccagggacgggatggaggtagcaatgcagtttgaaaaagcc

SEQ ID NO: 18323 - DNA, 2300 bp, Homo sapien
caagattgtgccactgcactccagcctgcctaggggacagagtgagactccatctcaaagagaaaagaaggagagtccttgagaaagatcagtgattggccaggcacagtggcttgtgcctgtaatctcagcacctcgggaggctgaggtgggcgattcacttaaggccaggagttcgagaccagcctgggcaaaatggtgagacaccatctgtactaaaatcacaaaaattagctgggcatggtggcacacacctgtaatcccagctactcgggaggctgggtcgggggagaattgcttgaaaccaggaggtggagtttgcagtgagctgagatcgtgccactgcactccagccgagcaacagagcaagaccctgtctcaaaaaaaaaaaaaaaaaaaaatcagcatgcttactccttagaggttaaaattacatgtgtgttgtggggctgcccacaattgtgcccccaaataggcatgttgaagtcctaaaccccagtacctgttaatgcgaccttatttggaagtagggtgtttgcagacataatcaagttaagatggtgtcattagggtgggccctaatccattataactatgtctttataaagaagagaagagacacagagacacacagggagaatgccatgtgacaacctatgcagagactggagtgacaggccaggccagtggggagaacatgaggacaatggaacctggactgccaagctccagcccccaaatccctcccttctggttccggaggccccagggttactctcccgcacactaactgctttgaaaacctcattcctcaaatctactccatcatgggtggcctgaagaagcctggacaggaggtcctgggtgacctgtgagggcatacaccacagagctgggtgcaaacctgcagagccaaaacctggggctcctggcttcaaatccacctctcaccagtatttgagttctctttccagcggaaagtctgcccggcctcagagttgcagccaggagagtggctcagaatccagcatgaaaacatttggaagacatcaaggtccatttaaccagcacaagagccccagccttctttgctgtgtcaatgtgggcttctccaagcctcagttttacttatccatgaagtgggtgtattaaggtaacgttaagtggctataacaaagagactcatgacaaatcaatgccttaaggaagatcatgtctctctcttgtaacagtccatagtgcacatcctgggctactgttccacatggaatccagggacctggttcccttcactttcttcctctccattccttaggacattgtcctcctcgtcatagacagacacatcacaggcccgtccttgttctgactcctgagaaagggaaagagagggtaaaccaggagccccacggtctgtcagcctaagcccctgatgtaaagagttcacatcatttttgcttaatttctcctggtcacctgtccgttcccaactgtaaatggagttggaggtgaattctggtcatgtgcctggtagaaatggggaccaactttgagggacagcctcaggctgtgcagatataatgacacctccttgcaactgtgcaataggtacagctagggtacctggcgcctagtaagccctcggtaaaagtgctcaatgttactgagctcagagctccaagggaccttagaaactctctggcccaacgtcctcatttctttacagctaaagaaacaggcctagagaggagtgacattggcctgtgttccccatgggtaaggagaaaagttggttcagaatcctatctggcctgcaaaccccatgctcacaccttttatttcaaagtacctggtctaaacccactagggtctgggcagagagcagggtccatatgacctctcccctggtctcccagggttggggggcatcattctagagggaccctgtgccccacagcagcgccctcggctggggaccacacagctttatgactaggtaggtgtggccctggtttccaggacaggtggccagactgctctgtgacaaagggccacgcctgcccctgggaggggtattgggctgccgcccgcagatgttgcagtaggaactgaagaagatggcgtgcctgggcttcctcctccccgtgggcttcctcctcctcatcagcaccgtggccgggggaaagtacggcgtggcccacgtggtgtcggagaattggagcaaggactactgtatcctgttcagctccgactacatcaccctcccccgggacctgcaccacgccccactcctgcccctg

SEQ ID NO: 18324 - DNA, 2300 bp, Homo sapien
cttaatttaggaggcagttagaagcttttacatatttttgagcaagagagtgacataattaaaatgatctgggccaggtgtggtggctcacacctgtaatcccagcactttgggaggctgaggagcttgggtcacctgaggtcaggagatcgagaccagcctggccaacatggtgaaatcccgtcctactaaaaatacaaaaattagccgggagtggtggcatatgcctgtaatcccagtagctgggaggctgagacaggaaaatcgcttgaacccgggaaacaggttgcagtgagccgagatcgtgccactgcactccagcctgggcaacagagcgagactccatctcaaaaaaacaaaacaaacacacacaaaaaaccaaaaataaataaataaaatgatcacttctgaatactgatctaactaggggttgcagggtgggctgatatagggagaaactggagagcaaggagatcactaaggtccctacatgtccagaaccaagatagaggtcttgaactaggatggtggcagttagaacaacaacaacaaaaagtcaattccaggctgagtgcagtggctcatgcttgtaatcccaacgctttgggaggctgaggtgggagttagaaagcagcctgggcaacactgcaagacctcctctctaaaaaaaaaaaaaaaaaaaagttagccaggtgtggtggtgcccacctgtagtcccagcaactcagaaggctgaggtgggaagattgcttgagccccaggagttcaagcttgccgtgagctacgattgtgccactgcactccagcctgagcaagaccttgtctccaaaaaaaggtcaattccactgacttttctaaggtgtacaccatcaaggggcagctccatctccaggccattggctcatgagacattctgtagtcagaaggctagggcagattgctttgagcaagcccccatggtggttctcactcctacttctttgggtatatgcccctctgtttaaaaataaagttaatatgcatttaaaaaaaaaaaggagaaaaaggtcagttccagaaactgtgtgaataaagcattttacttgctttttctattaatctataacatatgttgattttttaaaaagaatataagagctatgcaaattggagcttcaagacaacttcccatctccctaggaggagatggctgccctaaacccccctacatagaaatcatcccactgcttgggcttaaacttgatgttggggaaatgaaaaatccaagctaaggccgaagcctggggcctgggcgaccagcagaatgaggaccactggtcagtttcaggctgaggtgcgtcttccaggggacaatctctagctggcccttaaacattcagacttcaagctctatttacagcataaaggtgtttcaaaagacgtgatacaaataactgcaaatgctctgcgatgtgttaagcactgtttgaaattcgtctaatttaagatttttttttctgacgtaacggttagattcacgtttctttttttttaagtacagttctactgtattgtaactgagttagcttgctttaagccgatttgttaaggaaaggattcaccttggtcagtaacaaaaaaggtgggaaaaaagcaaggagaaaggaagcagcctgggggaaagagaccttagccaggggggcggtttcgggactacgaagggtcggggcggacggactcgagggccggccacgtggaaggccgctcaggacttctgtaggagaggacaccgccccaggctgactgaaagtaaagggcagcggacccagcggcggagccactggccttgccccgaccccgcatggcccgaaggaggacacccacccccacaacgacacaaagactccaactacaggaggtggagaaagcgcgtgcgccacggaacgcgcgtgcgcgctgcggtcagcgccgcggcctgaggcgtagcgggagggggaccgcgaaagggcagcgccgagaggaacgagccgggagacgccggacggccgagcggcagggcgctcgcgcgcgcccactagtggccggaggagaaggctcccgcggaggccgcgctgcccgccccctcccctggggaggctcgcgttcccgctgctcgcgcctgcgccgcccgccggcctcaggaacgcgccctcttcgccggcgcgcgccctcgcagtcaccgccacccaccagctccggcaccaacagcagcgccgctgccaccgcccaccttctgccgccgccaccacagccaccttctcctcctccgctgtcctctcccg

SEQ ID NO: 18325 - DNA, 2300 bp, Homo sapien
ttgctttaagccgatttgttaaggaaaggattcaccttggtcagtaacaaaaaaggtgggaaaaaagcaaggagaaaggaagcagcctgggggaaagagaccttagccaggggggcggtttcgggactacgaagggtcggggcggacggactcgagggccggccacgtggaaggccgctcaggacttctgtaggagaggacaccgccccaggctgactgaaagtaaagggcagcggacccagcggcggagccactggccttgccccgaccccgcatggcccgaaggaggacacccacccccacaacgacacaaagactccaactacaggaggtggagaaagcgcgtgcgccacggaacgcgcgtgcgcgctgcggtcagcgccgcggcctgaggcgtagcgggagggggaccgcgaaagggcagcgccgagaggaacgagccgggagacgccggacggccgagcggcagggcgctcgcgcgcgcccactagtggccggaggagaaggctcccgcggaggccgcgctgcccgccccctcccctggggaggctcgcgttcccgctgctcgcgcctgcgccgcccgccggcctcaggaacgcgccctcttcgccggcgcgcgccctcgcagtcaccgccacccaccagctccggcaccaacagcagcgccgctgccaccgcccaccttctgccgccgccaccacagccaccttctcctcctccgctgtcctctcccgtcctcgcctctgtcgactatcaggtaagcgccgcggctccgaaatctgcctcgccgtccgcctctgtgcacccctgcgccgccgcccctcgccctccctctccgcagactggggcttcgtgcgccgggcatcggtcggggccaccgcagggcccctccctgcctcccctgctcgggggctggggccagggcggcctggaaagggacctgagcaagggatgcacgcacgcgtgagtgcgcgcgtgtgtgtgtgctggagggtcttcaccaccagattcgcgcagaccccaggtggaggctgtgccggcagggtggggcgcggcggcggtgacttgggggagggggctgcccttcactctcgactgcagccttttgccgcaatgggcgtgtgtgtgtgtgtgtgtgtgtgtgtgtgtgtgtgtgtgtgtgtggaggggtccgataacgacccccgaaaccgaatctgaaatccgctgtccctgccgctgttcgccatcagctctaagaaagacgtggatcgggttctagaaaagatgactccctgcacgcccctccctgcacctcccgagcagtgattccgacagggccttcactgcccctgattttaggcgggggccggccccctccccttttcctccttcagaaacccgtaggggacatttgggggctgggagaaatcgaggagatggggaggggtccacgcgctgtcactttagttgcccttccccctgcgcacgcctggcacagagacgcgagcagcgccgtgcctgagaacagtgcgcggatcccactgtgcacgctcgcaaaggcagggttcacctggcctggcgatgtggacggactcggcggccgctggtccccgttcgcgggcacgcacagccgcagccacgcacggatgggcgcggggctgcaggtgcatctcggggcggatttctttctcagcgctcggagcgcagggcgcccggcgtgtgcgctccctgccggaggcgcggggctggcgcgcagggctcgcccctcactgcggcagtgggtgtggaccctggtgggcgaggaagggggaggataggctgtgcctcctcccactcccgcccccagcccccctttttttccccctcggaacgcgaggtgccatcttttttcggcgtgtcacgtctttacggtgccatgccaaaccgggtggccgggcttcataggacagggcggggcctggcattaaagggagggggacaatcagcgctgaaatcttggcgttttgctgctgcgggcgtgagcactgggggcgttcgcccagcaccttcttcgggggctctttgctttgtctgtagaggttacgtgatctgcgctcccagccctggtttctggcttttattctgagggtgttcagtcaacctcccccctacgcccatgcgcctctctttcctttttcgctcctcatttccgagcccattgttggatctcgaggcttgctgggttcgatgaactcgagtcaaccccccgacccccggcacgcatggaacgggcgtgaccgcgcgcagcctcgtctcggagtctgccggcgccgggaagc

SEQ ID NO: 18326 - DNA, 2300 bp, Homo sapien
catcacaggagggcgaggcatggattcgttggccaggagttccccctgccgccccagactcggttttgggggcgcggtgaacttggacacgggtgaaatttatttaagataaataatattaatcagtacggacataatattaataaaaatacacccagggccgcctatctgcgtgtctgcggcctccaggggccaatcagaaacagcctcaggcgcgggggttcggggcttcctcccgtgtcctccaggaggccgactgggcgcggctccccctaccccagggtccccaatctccgcagggaaggggtgaggccagccccaagatcccctctccggacacctgtggtttccatggcaatcccccctctgcgcccagtccagtgggctcagaaagatgggtgtggccgaagcaccagtaaccttatgccccttcctcacattctccggccaggcgaagcaacagggcgtaaagccggagaggccccgccagggctccccacccatccccggatgggtagccagcgtccctcgctgggcaacctggtgtggcgtggccctcaggacacttggggtgtagggaggggcgagatccctctgccgccgcccgcagcgcgcacggagactcgaatcccatcccttcagaagcttcccggcgccggcagactccgagacgaggctgcgcgcggtcacgcccgttccatgcgtgccgggggtcggggggttgactcgagttcatcgaacccagcaagcctcgagatccaacaatgggctcggaaatgaggagcgaaaaaggaaagagaggcgcatgggcgtaggggggaggttgactgaacaccctcagaataaaagccagaaaccagggctgggagcgcagatcacgtaacctctacagacaaagcaaagagcccccgaagaaggtgctgggcgaacgcccccagtgctcacgcccgcagcagcaaaacgccaagatttcagcgctgattgtccccctccctttaatgccaggccccgccctgtcctatgaagcccggccacccggtttggcatggcaccgtaaagacgtgacacgccgaaaaaagatggcacctcgcgttccgagggggaaaaaaaggggggctgggggcgggagtgggaggaggcacagcctatcctcccccttcctcgcccaccagggtccacacccactgccgcagtgaggggcgagccctgcgcgccagccccgcgcctccggcagggagcgcacacgccgggcgccctgcgctccgagcgctgagaaagaaatccgccccgagatgcacctgcagccccgcgcccatccgtgcgtggctgcggctgtgcgtgcccgcgaacggggaccagcggccgccgagtccgtccacatcgccaggccaggtgaaccctgcctttgcgagcgtgcacagtgggatccgcgcactgttctcaggcacggcgctgctcgcgtctctgtgccaggcgtgcgcagggggaagggcaactaaagtgacagcgcgtggacccctccccatctcctcgatttctcccagcccccaaatgtcccctacgggtttctgaaggaggaaaaggggagggggccggcccccgcctaaaatcaggggcagtgaaggccctgtcggaatcactgctcgggaggtgcagggaggggcgtgcagggagtcatcttttctagaacccgatccacgtctttcttagagctgatggcgaacagcggcagggacagcggatttcagattcggtttcgggggtcgttatcggacccctccacacacacacacacacacacacacacacacacacacacacacacgcccattgcggcaaaaggctgcagtcgagagtgaagggcagccccctcccccaagtcaccgccgccgcgccccaccctgccggcacagcctccacctggggtctgcgcgaatctggtggtgaagaccctccagcacacacacacgcgcgcactcacgcgtgcgtgcatcccttgctcaggtccctttccaggccgccctggccccagcccccgagcaggggaggcagggaggggccctgcggtggccccgaccgatgcccggcgcacgaagccccagtctgcggagagggagggcgaggggcggcggcgcaggggtgcacagaggcggacggcgaggcagatttcggagccgcggcgcttacctgatagtcgacagaggcgaggacgggagaggacagcggaggaggagaaggtggctgtggtggcggcggcagaaggtgggcggtggcagcggcgctgctgttggtgccggagc

SEQ ID NO: 18327 - DNA, 2300 bp, Homo sapien
aatgttctcttttgcttcaaggccatttttcacgaagcagtggcatttttgcctcttcatcagagtcaccgtgtgccctggaggactgagaacagcagagccgttttaggatgggacagggcagccaggaggattgggctcactccctactgagtgcctcactcccgtacagcccccatagaggaagaggggttcaaatttattcctcagccagatggcatgtgccgcctgtcctggaatttcacatcacttatgatggaccaaaattccaaaagctgaatccatgattgtcaaagtctggtatggcaggatgtcaacagtaatcgtttctgggcagagggatgattttctcttcccatcttgctttgtataaatacattttctataataaggttgtattacttttctcatcaagaaatagcaaagtactgttttactcaaaatatgaatagagccaggcatggtggcagcttatgcctgtaatcccaacactttgagaggcggatatgggaggatcactttagcccaggagtttgagaccagcctgggcaacatagtgagacccccgtccccactcccccaaagaaaacccacaaagcatttatcctggattattcacaggggccaaaaaaaaaaaaaaattcaggcctcctatagccatgagctacgaatatgaaaatatgcaaatgtgtaagaaaagccagcacatccgatttttacttttactttcacacctctgtccaccatgttccaagagaagaaacttggtcattgaaaggaatagatcaaatccaaagaacaaaaccactgtgctcattaaacttcttagtgttcacaaagctttagctgcaggttgaatggggcaacccgaattggctggctcacctgggctgcagggagcagagatcgcgacactgcactccagcctgggcaacaaagcgagactctatctcaaaaaaaaaaaagttcataaattcaaagttatgaattatttttaaaataataataatttacaataaagatgaggacaaagtgtgagtaaatggtggtttctatccagctctgttgagctgaagtggcatctccctgctggggcttttggggaagaagggtgtgtgttgctcttcagatcccaagcctcatgcccctactgggccctgtggggtgcttctcagcccaccaggagagccaccgttggaacacacacgtgggggacctggtgggtgccggtgtggtgaatgggggccacagcctgactccaggaagccagcaaactcggagctggaggagtcaggacacccccgatgagtcaagagttggttttgctgccagttgacatctgattgaaccatctcttcacttctccgtgcctcactttccttaccagacaggctctgctgatgctgtccctctcctgttcagtcgtgccctcaccgttaaagagaaagagcaaactgctgggcagcagcattgatttttttaatgaagtggaaagagagctgggaataacaagtcgggcccacctcacctgcctcacctggtgggtttatttgttttgtttttttttttttgttttgagacagagtttcaccctgtcacccaggctggagtgcagtggtgtaatctcagctcactgcaacctccacctgccaggttcaattgattctcctgcctcagcctccccagtagctgggattacaggcacctgccacatgcctggctaattattgtatttttagtagagatggggttttaccatgttggccaggctggtctcgatctcctgacctcaggtgatccacccacctcggcctcccaaagtgctgagatcacaggcgtgagccaccatgcctggccgtcacctggtggtgttgaatatgaactgctgcggtgttggtaaattaagcaagcagatagatgtaaataacgcttgggcaggaatatggagcacgggatgaggatgggcggccaactgttagagagggtagcagggaggctgagatctgcctgccatgaactgggaggagaggctcctctctctcttcacccccactctgccccccaacactcctcagaacttatcctctcctcttctttccccaggtgaactttgaaccaggatggctgagccccgccaggagttcgaagtgatggaagatcacgctgggacgtacgggttgggggacaggaaagatcaggggggctacaccatgcaccaagaccaagagggtgacacggacgctggcctgaaaggttagtggacagccatgcacagcaggcccagatcactgcaagccaag

SEQ ID NO: 18328 - DNA, 2300 bp, Homo sapien
gagctctccagcttcctaaaggtggagaagcacagacttcgggggcctggcctggatccctttccccattcctgtccctgtgcccctcgtctgggtgcgttagggctgacatacaaagcaccacagtgaaagaacagcagtatgcctcctcactagccaggtgtgggcgggtgggtttcttccaaggcctctctgtggccgtgggtagccacctctgtcctgcaccgctgcagtcttccctctgtgtgtgctcctggtagctctgcgcatgctcatcttcttataagaacaccatggcagctgggcgtagtggctcacgcctataatcccagcactttgggaggctgaggcaggcagatcacgaggtcaggagttcgagaccaacctgaccaacagggtgaaacctcgtctctactaaaaatacaaaaatacctgggcgtggtggtggtgcgcgcctataatcccagctactcaggaggctgaggcaggagaatcgcttgaacccaggaggcagaggttgcagtgagccgagatagtgccactgcactccagtttgagcaacagagcgagactctgtctcaaaacaaaataaaacaaaccaaaaaaacccaccatggcttagggcccagcctgatgacctcatttttcacttagtcacctctctaaaggccctgtctccaaatagagtcacattctaaggtacgggggtgttggggaggggggttagggcttcaacatgtgaatttgcggggaccacaattcagcccaggaccccgctcccgccacccagcactggggagctggggaagggtgaagaggaggctgggggtgagaaggaccacagctcactctgaggctgcagatgtgctgggccttctgggcactgggcctcggggagctagggggctttctggaaccctgggcctgcgtgtcagcttgcctcccccacgcaggcgctctccacaccattgaagttcttatcacttgggtctgagcctggggcatttggacggagggtggccaccagtgcacatgggcaccttgcctcaaaccctgccacctccccccacccaggatcccccctgcccccgaacaagcttgtgagtgcagtgtcacatcccatcgggatggaaatggacggtcgggttaaaagggacgcatgtgtagaccctgcctctgtgcatcaggcctcttttgagagtccctgcgtgccaggcggtgcacagaggtggagaagactcggctgtgccccagagcacctcctctcatcgaggaaaggacagacagtggctcccctgtggctgtggggacaagggcagagctccctggaacacaggagggagggaaggaagagaacatctcagaatctccctcctgatggcaaacgatccgggttaaattaaggtccggccttttcctgctcaggcatgtggagcttgtagtggaagaggctctctggaccctcatccaccacagtggcctggttagagaccttggggaaataactcacaggtgacccagggcctctgtcctgtaccgcagctgagggaaactgtcctgcgcttccactggggacaatgcgctccctcgtctccagactttccagtcctcattcggttctcgaaagtcgcctccagaagccccatcttgggaccaccgtgactttcattctccagggtgcctggccttggtgctgcccaagaccccagaggggccctcactggcctttcctgccttttctcccattgcccacccatgcacccccatcctgctccagcacccagactgccatccaggatctcctcaagtcacataacaagcagcacccacaaggtgctcccttccccctagcctgaatctgctgctccccgtctggggttccccgcccatgcacctctgggggcccctgggttctgccataccctgccctgtgtcccatggtggggaatgtccttctctccttatctcttcccttcccttaaatccaagttcagttgccatctcctccaggaagtcttcctggattcccctctctcttcttaaagcccctgtaaactctgaccacactgagcatgtgtctgctgctccctagtctgggccatgagtgagggtggaggccaagtctcatgcatttttgcagcccccacaagactgtgcaggtggccggccctcattgaatgcggggttaatttaactcagcctctgtgtgagtggatgattcaggttgccagagacagaaccctcagcttagcatgggaagtagcttccctgttgaccctgagttcatctgaggttggctt

SEQ ID NO: 18329 - DNA, 2300 bp, Homo sapien
ggaggccgaggcaggtggatcacgaggtcgagatcgagaccatcctggctaacacagtgaaaccccgtctctactgaaaatacagaaaactagccgggcgaggtggcgggtgcctgtagtcccacctactcaggaggctgaggcaggagaatggcatgaacccgggaagcggagcttgcagtgagccgagatggtaccactgcactccagcctgggcgacagcaagactccgtctcaaaaaaaaaaaaatatacacacacacacacacacacacacacacacacacaaaataaatttctaatagttctagaagacatgctatcagtgactggaatttgtaattatttttgaaagatggataaagacaagataactgtgaagaaataaatagaaagatagcccaaagcacatgccaggagtaagttgctgtgaggtgggaactgattacaggaggtttttgacccagaattaaagggcagaaggagtagtgataggacctgggcatttgtctgggtgataaatttggactcattttggaatagctaggttagattttcctttcctgtcctctcaccccaccagagccttcttccttgaagtagtggtgtttcattctattctgaagcagtggatagggactctggcgggaacttctgagcatgccccaagtggttaccgattcccaggaggaactgggaggtgaggaaaaatgtgctggcttttagatttgaatatccctggaaagctttgcagaagcttgaaaacagactcacaccgctatccatggtggtgaaatgtcagaatattgaaaacatgaaaaggaaaatctaaaagttgtacatcagcaccagaggttccagtcagagtaataggcaagaagtaaaaaaggaatacagattggaaagaaaaggtaaaacagtctccatttgtagatgatgtacttatgtctatagaaaatcctactgaataaacaagaaaaagtctataacgaagtagtttcacaggctacaaggtcattatatagcagtttattgtacttctatatactagtaatgaagaactgaagttgaaattttaaaaggtactatctttaatcatttccatctgagacttttgtcagcctggccttcactgcccgtatttctatcagtattttggtcaaaaccatttaacaaatctctaagaagttccagactttccctcatcttcctgtcttcttctgaaccctgcaaactcttccaacttctgcccatcagaaaacactaattcttaggaataaacttaacaaattgtatttaagaccggtatgtcaacaataactaaacgctgtcaagagaaaatcaagacaaacgtaaatagatggagagagagataccacgtcagtcgattgaaagattcagtattggtggtggaacacatggaagttgtccccaaattgatctgtagagtcagtgtaataccacaagtttgttgttgttttttgcagaagcttaaaaggcaaaaaccagaccacctacaagtaagaaagaatccgattccctcttaaatatagcactggatattagaatacacggaagaattgaatagctttaaatgtttgagaggaaaatggtttaaatctagaaattccttttctaaaggaattgctcaaggatatattcttgggaaaaatctaagaaaatggaaagataagaaacagcataaaaaattcagtccaaaagatgttgatttgtgatattgaacattaaccagtcagctaaaaatccccgataatctcatgatgggaattggcggagccacagaggaaggaaagagagaatggtatgtagttcttatttggagagagtatgtagtactcagtacagtgcctgataacatagataatgaatattgttgaataattgcatcctgattaactttatattgatagaaaagaagtaggcttaaatatgtttttaaatctctagaatagaaacaggatgttttcaaaccagtaaattcaacaaacaaggatacaagaacaaaaactccatcaaccaaaccaaaaaggtgtcttgttttgtttccctttgggacttgaaagtaaaaagctaaagtgacctgcttgcaaatagaagaatgaccttcagtaatgttcacgtaaacagatcttccatatgacagcacttgccctgccaagtgtcaggccactgggcaaattaaaggaggatggagtgtaggtcttgaacactagagaggccaggtgtttggactaacctgtagcattttatgtttcttgcagatgttcccacaagcctgca

SEQ ID NO: 18330 - DNA, 2300 bp, Homo sapien
ctgcaaatcacactttttctattctttctcatctgttatttcattttatattctaaacatatttgatttgaatactctaaagacaatagttagtatctgatagcatcagataattagattcattgagattttattaactttgttttctgtcagggaaaaatgtgtgtgtgtgtttatttatttatttattcattgagacagggtctcactctgtcacccaggctggagtgcagtggcatgatcatggctcactgcagcctctgcctcctggctcaggtgatcctcctcccacctcagcctcctgagtagctgggactacatgcacgcaccaccatgcccggctaattttgtatttttttgttgtagagatggggttttgtcatgttgcccaggctggtcttgaacccctgggctcaagagatcctcctacctttgcctctcaaaatactggggttacagtcatgagccaccatccccggcctgtgtgtatatttttaaacaaagcatagtttttagaaaacaagcttctagcatactctgttagagttaagcagatattaactacatttaaatttcctcttagtcatcttgatactgatgttagtatatccttcttgatcattagttgaaagcttatgttactgtgtaattgttttgctaagcttctgttccatagaattattgaggtcattttcctgtcaataggtacttacttttagtctgtacatttggattcctcatccctcttccccccaaagcaaaagctaatataatattctccttctctctgtcaacctctctctctctctttttaattagagatgaggtctcgctgtgttgcccaggctggtctcaaaactcctggtctcaagcgatcctcctgccttggcctcccaaagtgctgcaattatagttgcgagccatcatacctgaccactgattctcttattttctttttcttcagtcattcaagttgtgtttttcaaattgatcatcagaagttttaggtgctttgtgcaaatgaagtggtggtgcttttcaggcaggggtgcgcttgggtacatgttaatttcttttttcctttttcttaatcagattgagtctgtttctcagccattggaaaaccatggtgcccctattattggtcatatttcagagtcactgtctaccaaatcatgtggagcactcagacctgtcaatggagttattaacacgtaagttttagctcttctacttcctacacttagtagacttgtaaaggtgttttggagctcttagttctctttagccaggactgaccctggtttaaagaagcggaagccttatcacttagtaacatttttaatcttcactgtataatgaagcagtgcattttaattaattgtatattttccttttacctactaaaatggagtgggcatggagtaaaataaaagacactacagttactgtgaattattattgttttaatcttgcaggaattcctcagaagtgcttatattaacctcctctgcttaggacagattagatctccaagggctatgtttgtaaatctgtatttatgaagattcaagggagaaaacaaaagattcagggagattctgtacaagtgaatgatgtgtacaacacccttaaaattcgggtttcatagaactgattctaaggaagcccattaacatttgcaaaattcatcattttctaaccaactgtagttctctagactttatttactcgtgtgtttgatgtagaggagaactcaatcactagaacttgagtttatttattgacttttatctttcagacatgatgtagttaatgtgcaccaagaaccttacacataagcacacacaggtagattaacagacatcaagaggagacctgcttctgctctagaatgcttctttgtgtctgaacattagcaaatagaggttgaactagtataagaggctttgtttctttgtgttttcttgttgtttatttattttgtttctttgtgtgttctgagaatactcttccttccccttgtatagtcttcagcctgtcttggcagaccacattccaggtgacagctctgatgctgaggaacaattacataagaagcaacgactgaatctcgtctcttcatcatctgatggcacctgtgtggcagcccggacacgtcctgtactgagctgtaagaagcggaggcttgttcgacccaacagcatcgttcctctttccaagaaggtcggtacagatgagagttggtcattgtcaagcagtgagccagatgctcagatagagttagtctcttgccaact

SEQ ID NO: 18331 - DNA, 2300 bp, Homo sapien
cctgtagtcccagctacacgggaggctgaggcaggagaatcacttgaacccaggaggcagaggttacagtgagctgagatcataccactgcactccagcgtggcgacagagcaagactctgttaaacacacacacacacatccacacccaccaaataaaatattgggaaaatgtttaagttcatgattgttgatacaagttttcaaaaacactaatctttgcctaaaaaattcagattttattattggcagcaaatatcgtcagtggtcttccttgaagtgacaggttcactttgttcatttgcaaggaaatgtctgctagtgaagcaggtttcaaataatgtttgtcagtagttctgccaagtaaaaatcgtgttccatgaacaaagctctagttcattttgcaactcagttgtactgtgctttttcctgagaattcataaagcagcagagtgctttatgcatactttccctttcatcacaaagaatatttttaaaaaatgcactaaaggctcaagataattcataatttttgctgttcatcaaggacatcttaagtggaactcccttaaaaaaagaaaaactgagtggagagtataatgactattagtatagtttggtgcctcttccttgatttgtgctaataatgtaccagcagttttgttcacctttgtttttgtactctgattgcaaatgtcaacacagtgtaaaaggcagataatattctagtattgctatgaaaatacctttgatttcacgaacctccaaaatagcctgtgagatccccagaagtccagagaccacactttaaagaacaactggcttagttctttacgtatgtttcctttggctcccagaccacatagatcaagggggatcaaacagaggcaaatgactgagatttttagcttggttactaaataaaagcagtgtcattacttaaggtaatgaaacaggatgcggaatagtgtgctggaaggagaaagtgaattctgagcttcagggggcttgaggaacatagaggttataggaatcttgattagtgcagctcagaagtttttcttatggttaagaaacctcaccatactagtggttgttgagagagaagagggcagaagggaccttgtgcagcaccagcatttaagggtccaggaggaagagaagaggatgatagtacaaggacatcaggaaagaattagaagaaggtcggtattgtccagtgcttcagagaagtcagatagaatggggactgaggtttgaccattggatttgataataagattactggtcacctttgccagagcagtagggggtgaaatccagattatggaagagtgaagagtgcagagacagttatttatactattcttagagaagttttggggtaaagggaaagagagatatttgggcaattaagtatgagagagaggctgtactgagggcagaagatacttgagtaaattcctaggctgagaggaagaagccagtagagaagatattgatgaccactttgatctgaaagaaaagaaaactgatgaaacaagttggtattacagatgtggtacagttagctttgtagtataatctatacttctagagaagtgagaagctgatgaaaactggattccctggccagaaaaatgcacagacctgtgatatttggcatactttttttagtgaacacgggaattccttactaatttttttctgtttaattattgcttagtttgatgtgtcttgctttaaatccatttatttcaacaagcttaaagagatttttttttaatggagatgatttaattttaacaatctgtgattttctctgaatcgaacttgtgttttggcacctttcaatctgtggtaacaaatgacaagaagggtgcaattcttccttcccttgtgcagggattttgcctccccctttctcccagatgaaagatatttgggtctctagaataactgtggtacagttagctccagagtgttttctttctggaggcagtttagacaacagcctcaagtagtgcttttgttaaaaatatacatgtttttaaaagtgcttgtatttctaatattcttttctcctttctcttctagtctgttctctggggaggcagtaaggggccgtggagctggcctcggcctcggcatcgggagaggctggacttcctgtctctctgtgctgaatggctgcgatggcgcccgctctcactgacgcagcagctgaagcacaccatatccggttcaaactggctcccccatcctctaccttgtcccctggcagtgccgaaaataacggca

SEQ ID NO: 18332 - DNA, 2300 bp, Homo sapien
ccaaaaagcagagaaaacagaaattacagaccatcctgacaaatggaaaacatattctaacgtactagtttccatacttgaaaggactttcaaaatgaagttcagtagcaatctataactatatcatgattatgcaaggcaaagattatgtaattttatcgtttattttaaaatgttctccgactctaaaactaaaacaagtaaaacgttttgatctctccaaagcgaaaaggaaaggttcctctgagctgcaatttaaaaatataaacacacaccccaaaacaaacaaaaaaacacaatgattgctagccacgtgacaaaggagatggcaacaccaggattgtgaatggaggggagggaggcgaggctggaggaagagagatttctcggaactttggggaccgcggcagtcggtctgccgaccctaggagcactaaactccagcccctacgagttgtgcttctaacaccctcaagtacagttttattaataagtcacagaaaatgctccagtgacctccaggataaaggggggtgggggggaccgaggaaaaggaaagagagcaatttaaagtggcgccatcatgtcaccccttctcccctaaagcaatcagtaagcaatagttaagtagcacgtttctctataaatccacattgggattccaacattggaaaacgaggatttttaagtaagacacgggagtagcgctgtttatcgtatggaaaacaaactatttgctaagaatcaaaagaccgtcagccggaaaacaggcccccaaaaaggcagttaagattccaactcacttaaaagcaaataaatccctcttcctctttagtttaaaaaaaaaaaaagtccgcctgagggagactacatctgaaaacgtaagtgacctgaatttacaggcaacaaaaataataaatgaaacaatcagagttgtgatacaaaccgtgcaacgcgccaagatgtgtgtttcgagcagagaaaggccttttgcagtcaagagaagttcaaggcgagagccagagtttgtttggggggttcttttacgggaataaatcatgttcttcaggccgcctttttaaatagaacgccaaaggaaaagctggcgaacgaggcggcagctcctggggaagggcccccgcacacccccgcccttggggcgactcccagcccggacccgcagcagggaagcccggagaggccatttaaagttccgggggatttttctaccctgccctgcctttctagttacaactaacaaagagagagagaaatgggagccacagggagagcgaggagaaggagaaagggcagcaggaggaggaggagaggagcagcagcagcacctaccacgtgatggaggagcgtagcccgggcggattcagccccacaaaatgggcgcagtttgcaaacagccccccggcctgggcgccgagggccagcggcgggcgggggcgcgcgacggcggctccggcccgggcccgccgctctcctccccccgacgcccggagccgccctgactttccgggcgggggggcgaggcagagggggaggggaaggcggcggcggggagcggctgctttttcttctctttcgggccctttcccggccttgctccgcaccgacggggcccgagcacggctggagaccgcagcccggccgggagggcgggcgggcgggggcagagagtgaaaccgcccccccgccccgcacaaacaagcaccgccgtctgcagcccgaacccgcacccaggccgccacccccggccgcctctttccagccggggagcgcgcttcagccgccccccgcgccgccgcggcgagacgagtcggcttcgctacggtgctcggttctcccgccggctcggcgagcggtggcggcggtggcggcggcactgggaaaatggcggccgagctccttttccctccccccctttaatctgaagcggagggagaatggagcgagcgagcaagcgggcgagcgccggggacacggggaggagggacagcagcgcctccgccggctgcggctgcggcggcgaagggccgctccaccccggcgcgccgccagggggcgcccgccgcgccgcccccgcgggccgccaggaggcgcggccgccgccgcctcagtcatggctcctcgccgtggccgatgtttttgtacctccatctgcggaggccgcggcgcccggccccagctgccccggacgtgcggcgacggcacgcagcactgcggcagggggaagccagccctcgctgcggccgaggtgagtctaacctgaggcactgacgccgtcacat

SEQ ID NO: 18333 - DNA, 2300 bp, Homo sapien
ttcgcagaaacctaggtgcagatgttgcaggggcaggtgagttagtgtaactttgtgggaagactaaaaccgttctgtaacgactgtgagggtgttttttgataagcagaagtgacgtataatgccggatattggttctggtaagccacaaaaaagtgtgaagcattttgcgtcttcctttttggtagtagagcatacatacccttcttatctgccgaatttgatgatttaatgatttgaacgattttttcttcagtcatttaagccagttttgatgaatcctagattagtcttttaaatctcaagatactccactcatcttttggcaactttaaagggtggtagaattacactttgtgtgacactttgtattacattatgtttatgaattctttaagtctaggaaaggttccattattttaaaggtcctattttggggacaatataaagttctgtactgataaactggtcatgagaaatgataaggtgccaccactttaaaccaactctggtaacgaggtgggaagttggctttttgttgtgagacttgtgtttctttatggagttctttgttaaacttttagcatggcagtgaacttccttttggtggcggcaggaagcataaatactcattgtgtaatgccatttgcctgttttggcggatctgccaagccatgacacccaaaacaagacgcgtgtttcttcacgaaaactacagttcccagcgggcccggcgccggcggggccatcacttcccctctggctcccggctgtcccttcccgggctggcccggcgcgggccctggctggggcctgcgcagtgactacgtgcaccctccccaccccgcccaactctggtggctgcggagcgcggtgctggggctagtgcccagccgtgctgcagtatacggaggctggctgctagggacaaagggcgggcggcggaagccgcttcactggtcagggagctttctgcagggttagccttggaatagtgtggtgccgacggccttaccctctttactacacagtgcaaacagttcctcgctcacgtcctctcgctccgcggcgccggcccgccctgcccctcaactggcgagccgcaccgccggccccagcacggagggcatgtgacggcgtcagtgcctcaggttagactcacctcggccgcagcgagggctggcttccccctgccgcagtgctgcgtgccgtcgccgcacgtccggggcagctggggccgggcgccgcggcctccgcagatggaggtacaaaaacatcggccacggcgaggagccatgactgaggcggcggcggccgcgcctcctggcggcccgcgggggcggcgcggcgggcgccccctggcggcgcgccggggtggagcggcccttcgccgccgcagccgcagccggcggaggcgctgctgtccctcctccccgtgtccccggcgctcgcccgcttgctcgctcgctccattctccctccgcttcagattaaagggggggagggaaaaggagctcggccgccattttcccagtgccgccgccaccgccgccaccgctcgccgagccggcgggagaaccgagcaccgtagcgaagccgactcgtctcgccgcggcggcgcggggggcggctgaagcgcgctccccggctggaaagaggcggccgggggtggcggcctgggtgcgggttcgggctgcagacggcggtgcttgtttgtgcggggcgggggggcggtttcactctctgcccccgcccgcccgccctcccggccgggctgcggtctccagccgtgctcgggccccgtcggtgcggagcaaggccgggaaagggcccgaaagagaagaaaaagcagccgctccccgccgccgccttcccctccccctctgcctcgcccccccgcccggaaagtcagggcggctccgggcgtcggggggaggagagcggcgggcccgggccggagccgccgtcgcgcgcccccgcccgccgctggccctcggcgcccaggccggggggctgtttgcaaactgcgcccattttgtggggctgaatccgcccgggctacgctcctccatcacgtggtaggtgctgctgctgctcctctcctcctcctcctgctgccctttctccttctcctcgctctccctgtggctcccatttctctctctctttgttagttgtaactagaaaggcagggcagggtagaaaaatcccccggaactttaaatggcctctccgggcttccctgctgcgggtccgggctgggagtcgccccaagggcgggggtgtgcgggggcccttcc

SEQ ID NO: 18334 - DNA, 2300 bp, Homo sapien
gacggggtttcgccctgttagccaggctggtctcgaactcctgacctcaagtgatcgtttcacctcagcctcccaaagtgctgggattataggcatgagccattgcgcccagcctctgaagctatagttttatagattctaaagcagagacttcatatagatgtctatgaaaagccaaaaacaaacaaaaaacccacaggaaaacctgattccccacgccaaaatttcaaggatttgcctaaaggtaaggtccatctgtacctgaaataagtttgctgtgcctctttttctgcagggtaacccagccctatgcaccaatcattacatgactacctcaggaagcttttaaatatatcacaaatattttaccaaataaacctgaatggccctggtttaatgaatctgcttctctgtctatagactatctagtctcataaagtcaaaagagaagcaatgtgacaaattattcaacagcccttctctatttatagagagagactgaacttcttctttggttagaaagaaaaccttgagtttcatttcctagttcatatatttttataacatcgtgggacggattttgggagaaccaagatggtatagcgggtgcacactttgatcctccctctcccttcaagaacatacaagtgagagtaaaatataaaaaagagaaattgaaaagacatagtcatgcttaaataagttacaacaatctcaatggaacagacacaaaactgtgagcaggactaaaactgcaggccttctagactccagatgcagaaggaggaagtggtggctgaacactaacagtaagagtttctcgggggtaagggaggctaacatgctgtgtgtgaggcagtgataggctccctgctggaagttaagggttgactgggctacactgggcttcaggagagaagaaaacaacactcctctcactcaaaataagcttgcaaaattcaaatgtttgaaaatgaaaatgtgtaatatgaaaaaaagacaaccagggcccatacggtggctcatgcctataatcccagcactttgggaagtcgaggaaggaggatcacttgcttgagcccgggagtttgagaccagcctgggcaacatggcaaaaccttgtctctacaaaaaaacaatgacaacaacaataacaacaaaaaacaccccaaaattagccagagatggtggcatggcacgcgcctgtagtcccagatacttgggaacctgaggcggaaggacttactgatctgggtagggggaggctgcgatggggtgtgattgcaccgctgcactccagcctaggaaaaagaataaggccctgcttctcaaaaagcaaaaaaaaaaaaaaaaaagccaataaaatcaatggtctaatctgaattcactccaaatgaaattatagagcaatttgacaggccaggcccagtggctcacacctgcaatcccagcactttgagaggctgaggagggaggatcacttgaggtcaggagttcaagaccagcttggctaacatggtgaaaccccgtctctactaaaaatacaaaaattggctgggtgtggtggtgggcacctgtaatcccagctacttgggaaactgaggcatgaaaaccacttgaacccaggaggcggaggttgcagtgagccgagatcatgccactgcattccagcctgggtgacagagcaagacactctctcgaggaaaaaaaaaaaaaagaaaaggaaaacaactcaagggttggataacattgccagtataaccataattcaaaacaagcagcagaatttggaggataatttgtttcattctcaggaaaatgtgaaactctgaaactgctttttgagtgcagggtatttccggggcttttcctaaagtcttaacccttggctctgaccccttatttgaagtttggagagcagaaccgaggattgtattactacagttgtggacacaggagaggggttagtctccccccgctccaggagtaagggatgctgggctgctcgaacacaggccttgttagaactcccttcaaacaggatcccagagatgtggggagaaggtaactggccttaagaatgattgcgctacagctttcgaaaactataatgcctttcaaatatggcttattgcttggatctcaatatctcccacgtatcttgggtggaatattttgccgaagatctttctgtcaatcatttacaatcatgtgctgcaaaatgaagtttgggtcaacagtagaccacatatatgatggtggttctgtaagcgtataatggagctatccctatataggta

SEQ ID NO: 18335 - DNA, 2300 bp, Homo sapien
gcaacctccacctcccaggttcaagtgattctcctacctcagcctcctgagtagctgggattatagacacgcgtcaccacactcagctaatttttgtatttttagtagagatggggtttcatcatgttggccaggctggtcttgaactcctgagctcaagtgatccacccaccttggcgtcccaaagtgctgggattacaggcatgagccactgtgcccaggccccatttttatcttttacacagtattttaactatatattttccatgtttacatacacaaatacctgccattctgtgacagttgcctttagtattcagtacagtaacatacagtacaggtttgtagcctaggagtcctaagccataccgtgtaccctaggtatggtggctacaccacctaggtttgtgtaagtatacgctatgatattagcacaatggtgaaatcacctagtgacacatttctcaagctcctcacgtggcaagcaatgcatgactgcatatgaaagctcttaaatagagattgtttctaaattaatctcaaaacagtcattatttactatttatggaattttttttaaaaaaaggagcaaaagtatcatttcagtgggaacttaacttggggctacagtgttttatttaacttttaccccaaagttgcaaagtgttttgaaatttttccctgtaaaataattattttaattcaatttaaataaaacccaccaaggagacttcaagctttaagaagtctagcttcctgtgaaatgtgagaggaagtcagcactcatttcagaaatctgattataacgatagctccatccctaaatgaggtgaatcttggactctcttccattttattttattttatttttttgagatggagtttctctcttgttgcccaggctgaagtgcaatgttgcgatctcggctcactgcaacctctgcctcccaggttcaagtgattctcctgctttggcctcctgagtagctgggattgcaggtatgcaccaccacacctggctaattttgtatttttagtagagacggagtttcaccatgttggtcaggctggtctcgaacttctgacctcagtgatccccccacctcggcctcccaaagttctgggattatgggtgtgagccaccacacccggccccccttcaattttaaagccatcactatgcaccctatgtctatgccaagcactaaaataagatgaagcaccttcttggagtttacatgctggtaattatgccagacagtaataaaataggtaagaacggctgtgggggaagtcagctgggttctagttacagtcgcatttcaggaaatgatttaacatgctgactttaacaacctaagcctcttctccatgtgtgcacacagggtagatctctgaacacaggtgaccctagaagtgctgtaacttctaggggaatggctgtgttgagtcaaggcaggatgacagttcagcctcctcccaggctagtgcaaagggctcttcactcggattaaaaccttctctcccagaccgaattgccaactcccaacacccctcctacagaaaatttggagtcctcgcttattccctggcagcccctacctaatagggtggtgaattaattatcaaacatgcgacagtttagcgaaaatggcaacactttggaataagtgactgtaatgtgcatcctggcgcccattttgcaggtcagttgctctccctggaaggaagagtgttctcggatttcaccttaaaggaggaaggctgccagaactgaactagcacttctgaatatcctgaggcgaggtccggtgacttccttgggaagctctgccgcgcccccaccccaccctaccccaccctaccccaccacagcaggcgctggagtcctgggaccaccagggtctgaggcccaaatccttcctcactaaggggaggagaggggtgttccggcagggcaggatgggaaggcgtgcttgggcgggattgtgacataagagtgccctggtgacatggagcagatctgtgacataaataaaggtgtcataaagacagggcggggctcacgcttagaaggggcacgagcgtctcggagctgccagaatgtcttctgctcagtgcccggcactagtgtgtgtcatgtcccggctgcgtttctggggcccatggcccctccttatgtggcaactattgtggctactagtcaaggaggctcagcctctggagtgggtcaaggacccgctccagctcacctctaatcccctggggccgcctgagtcctggtcttcccactcctccca

SEQ ID NO: 18336 - DNA, 2300 bp, Homo sapien
gccaagtgcctgtgccagagcccaacacccacaatggcaccttcaccatcttgtaagaatcacttttcctcaattgtcctctgtgtcctgcctgacatggcagccttttcctggaggccttcctgggccttctttatctccccaagccatatggacaactgactttctgctttcacctttgcttgtcaactctcccttctcctcattctcttttaatgttaggccccttctccagtcttttccttttactctggtcttttactcgtttttgtatccatttttatttagccccatcacatcattgcttaaccgctgctctcctcccattttcgcttcaccctctttacagcagcctgtccctctcccgatctcaatgatgatgctctaagtcgttaagagttgattccggagccaggctgcctgggtttgaacccagatctatttattagcttggtgacccagagcaagttattctgcctgtgactcaatttcctcacctttaaactggggatcatgctagttagcatttcataggattgttgtgaaatttaggtgagtgaatatatgaaacacttcatcagtgcttaccatatgtaggagagttggctgttcacatgattattcagtcctttagttttgtccagaactcatttttgtccctagctttctatatgtagaactagttttatgtcaaacccagggccaagtatgctactgtctccagaacacgaaaatgataggagggaagaggctgggtgtggtggctcacgcctgtaatcccagcactttgggaggccgaggcgggcggatcatgaggtcaggagatcaagaccatcctggctaacatggtgaaaccccatctctactaaaaatacagaaaaaaattagtcaggcatggtggtgggtgcctggagtcccagctactcgggaggctgaggcaggagaatggcgtgaacctgggaggcagagcttgcagtgagccgagattgcaccactgcactccagcctgggcgacagagcaagactccatctcaaaaaaaaaaaaaaaaaaaaaatgataggagggaagaaagagaataggcataaaaagggaggtatatataattaagtactaaaagataatgcagaccattggtgctagaatttgccagaatctgtgatccttgaggtgtggagatgctacatgggtaagctaaaactttacttgggtcttaaagagtagctataatttgttaaatagaagaaaaatgggagtacagtctaggcaaacgcatggctacaggtatggttggaatttagtagaccaatgtggctacaaagaattaggtgagggagcaatgaagatacgattctgtaaaaccttgattatcagctataggagtttgaaagttacacagtgaggtatggaaagccattgaaagtttccaagcaagagagattacatgatcaaaacaggaagattattttattttgttttttgcattatgtgcaagtgtagacatgcagaggattgttttagaatccatatgtaaagtgtccaaaaggaaaagcttaattcagggagacaaaatagaaaggtctagcaaaatctaggagtgaagtgtgaaggggccaaatcagatcagttgtaataggagtggaaagaaaaagcctaggatgtttcaacagagggcactgggccaaagctttggtgttacctggcatagggtttctttcttctcatttgttgataatgataagcttttgcccatatttctgtggaattatttaccattttggtactgatttgtagaagtctgtttagacacataagtgcttttagataaaatacttacattcaaagtaattaactggcatcatctgtccaagagatgggatggataagaagttaagcttccaggagatgcctcatcatttgtgccagtgaccccgcataatttcttgatgaattgtgcaaactgggaagctgatagctctggaaatgagaaagcaggtgttattttctgtttctgaatatccccaacaaggttgcaatgattcttttacttatcgtgttcattgttttcctacctattcaaggatataaactgtgtttcttcacagaaatttccaaggaaactatatttcttacattgatggaaatgtatggaaagcatacagttggactgagaaactgtgagtatattctctccaaatatgacaaaaagctaactgcattgtaagatccttcttggtccagaattttgaggtcggtacctctgaggaaagatatttctcctccatgccccaaatcaaccact

SEQ ID NO: 18337 - DNA, 2300 bp, Homo sapien
taaactccctgaaagcatggactaggtcttgctcatctgcattgcccaccatgtttaaaactgacacatggaaataaagcaaactcaaatatttgtaaaataaatgaatagctgggggagtgagtagaaggaaaataactattttaaaggaaatgtagttttattatttcatggtctctgtagcactttggcatccacctgagggtctttacacccactttccttaagccttctatatttgaaagaatctgtttgcaaaagagcatcactaatgagcttaataaggattaatgacatacagacctctatggacaaagggtaagaatcaagctttcatagcaatgaacatagtatcttcttgtctctaaacagacagaaatacagggatccctttctggtaacagggctggggcgatcgttattttgtaattagtgaagagttaggggcatttctgatgtgcttcttagtgtaaacatttctagctctatcagttaaccatcattttaaacatctgttttaatataacaattcctgaaatgaaatccttaataccagtctattctcttggtagcttaatattcttgataatattattgatataattcagctatttttaatatttaaatgttaatttaattccgattaaattaccaaaaaattctggattaatgatgttcaaatgaatgcaggtggtctccattttcttctcctttaggcaaccatctgaagttaactttagttcctttcatcctactaaaccaactttttgaaattttttttggtgaaggtcagacagtaaatattttaggttttatgggccacatatgatctctcgcatatttctttgtttcttttctttttctttcacagtccctttaaaaatgcaaaacccattcttaacttaatgggctatttaaaaatagaccataaattagattagatctattggttgtagactgaatagaaaaagaatgatatgtgaacccttataaaacaaggttcatatgggtgtcagtcactgctcagattttcttaccatgtgaaatgtttttgtctgtattttgtctatataacttaaaaactgaaaatgcacaggaggtagctagtgttagagatgggctgagaccctatacaaacttacagaattgcagaattttattgctcaaagaaatctgagagattatctaatttgaaccccttattcattttacagataatatgactaaaaactcataaatataattaactaacttacaaatactggagggatagcaggccttcaaatgaatccttgtgtaattcagtcaagttattttctctgagaattctggaaaatgaagaagttatttctagattaaaatgcaaactacaactatttgctacacagaaccatctcctgcatgtggaggaaagctgggtcatggtcacttcaagatggtgggatctgctctgctttcattcaaaccttttcttatattttcctttttgtgtccatctctctccaccaccaccacaaacacacacacacacacactcaagcacaccccttgaagagtgggtttcttcccaccaaattctattatttcatgcctcctctctagatcacaaaatcccttttagaatccaactctgggtggcaccaagatcagcagaacctccatttcctcctctcttttcccaaaccttattatgaaagccccacatggaaccatgtcagggctgcaagtgaagccattcaacctttttccccccatcaaaaaaattggagaactataatgtgcataaagtgcacataacataaatgttgtttatatttaatttaatttaatttttgagacagggtctcactctgttcccagactggtctcaaactcctggctcaagtgatcctcctgtgtctgcttcccaaagtgctgtgactgcagacatgagccacctcacctggccaaaatattcagtttaataattatgaagcagatacccatgtaaacatccttacaaaagatcattgctagcatgccagaagccccagtgtgcccctttccaatcatatccctctctctaaccctaataggtaaccactatcctgacctttgtaataattttcttgtttttaaaatgtagttctggcctggcgtggtggctcatgcctgtaatcccagcactctggaaagccaaggtgggtgaatcacccacggtcatgagtttgagaccagcctggccaacatggtgaaaccctgtctctactaaaaatataaaaattagctgggtgtgatggagggcacctgtaattccagct

SEQ ID NO: 18338 - DNA, 2300 bp, Homo sapien
acctatagcatgggcaagaaaaggcatcaaagaagtgaccctcaaattagccttgttgctgggcggggtggctcagacctgtaatcccagaactttgggagccgaggtgggtggatcacccgaggtcaggaattcaacaccagcctggccaacatagtgaaaccctgtccctactataaatacaaaaaaattagctgggcgtggtggtgcagttttttgctccctggaggactttgtgttaagcttccttccttgcagctaaatgttgcagacatctaagcagttagaaactctgcatatgagcaggaatcaaatccaaagttgtagggccagaatggtggctcatgcctgtaatcccagcaccttgggaggccaaggtgggaggatcactggaggtcaggagtttgagaccagcctggccaacatggcaaaacctcatctctactaaaaatacaaaaattagcaggtcatggtggcgggcacctgtgatcctagctatcgggaggctgaggcacgagaatggcttgaacccgggaggtggaagttgcagtgagccgagattgtgccactaccctccaacctcccctccaggctggtctcgaactcctgtgacctcaggtgatccgcccacctcagcctcccaaagtgctggggttacaggtgtgagccaccatgcctggccaagatggtgtttatgttaagctattgtgcaaaaaaaaacttttgtaaagaaaatatatcactgtatcttaattccatatactttcctgactactcttctaccataattgcaaaaattctatgatttctctgtataacatacccatcaaatcagagtgggtatattcagtggcctgaaggggactcaaggtgaagattctcctctacatctgactttagaaaagactttccacctgccttgtggttcagaaatctagtttcacacagttcatttcaagttagagggaggcattcaggatgtgtctggactagagcagcagtttctgcacatgctcccctctgtcctcattaatttgctgatgcataacttaggaaaagtacactaaaggtctgtttttcttttgccctcacaccagagaacaggctcattaggtccctccaccaagaggtttaggtagcatcaatacaaatgttttaaactcaccatctttactaagcactttataccactgggagtccctcataaaaatctggtggccgggagcggtggctcatgcctgtaattccagcactttgctgaggtgggtggatcacctgaggtcaggagttcaagaccagcctgaccaacatggtgaaacctgtctctactaaaaatacaaaaattaggtgggcatggtgacaggcaactgtaatcctaggtactcaggaggctgaggcaggagaatcacttgaaaccaggaggcggaggttgcagagagccgagatggcaccattgcactccagcctgagggacagagtgagactctgtctcaaataataataataatataataataataatcatcatcatcatctagccagcttcactacaattatgtaggcaacaccaggaaaacactggaatcacagttgataaaaattaatgaattcactcaaaaacattcagagtgtcatgtccatttgtgccaggtactgtactaagtgctggggctacaaaatccatctcaaagacacaccaagatgaggactttgtccccaggggactttcattcctcaaggaggaagcggatgctgatgggaaaacatatgagagccatgtggggatctgtacggcagggtgacaaggagaggacaaagcaggaatgggggctgggttaagaaagacttgagagacactaacttgcttatcttgagtttctgtgttcatcttaaacaacagaaaaaggcatttgcttcatggtgatgaaaaaatcagagctagctgatattggaaactagcactcatttcatataaacagaatagagctgtacccttcaaactaagtcacagttactttcaaagattggcacaagggtctcaacacaccaagtgtatgttaggggctgggctccgttggagtcaaatcttcctggtaaacaaagctacactgcagtcatatttggcatatgtgacatataggcccactgcatttccttccaaaggcaagatgccaagggaaggtgccagtaattttatgaccaaaatgacaccattttgtggtgtttgtaagttgaaacaatatatttccctgcattacacaagtttataaaaaacaaacaaaaaaagaggccccagctgt

SEQ ID NO: 18339 - DNA, 2300 bp, Homo sapien
cgagtaaagattgtgccactgcactctagcctgggcaacagagtgagactctgtcccaaaataaagaaaaaaaaaaaagaaaaagatacttacataatgcaataattataaatctagttgatgaacataaggtatataaagatgtaatgtgtgacaataacagtataaaggagggggtgagagtggagctttagagaagcaaagtttttgtataccattgaaacaaagttggaattaatctgaactacaacgttataaaattaagatgtagctgagactacaggtgcgcaccaccacactcggctaactaaaaaaaatttttagagatagggtctcactatgttgcccaggctggtctcaaactcctggcctcaagcaatcctccttccttggcctcccaaagtacagggattataggtatgcaccactgcatctggccacaaacattttgttttcttactgttcatttttcaagacaggttttcactctgtttcccaggctggagtgcagtggaacaatcatggctcactgcagcaccgatctcccgggctcaagtgatcctcctgccttagccacctgagtagctgtgactacaggcatgtgccaccacgttcagctaacttttaaattttttttgtagagataagctctcagtatgttgccctggctggccttgaactcctggggtcaagcaatcctcccaccgcagcctcccaaagtgctaggatgacaggtatgagccactgcactgcaaaaatacagaagaccaaattattaaaactagaaatgagaggggacattactattgttcttagagacataaataggattataatatgaataaaaaggattatacatataaacaatatatgctaataattggataagctggatgaaagacacattaccagaaagatatgaactactgaatctgacttgagaaaaaaacagaaaatctgaatagacagacctatgtcaagtaaagagattgaggtagtaatcaaaaaactttccactaagaaaagctgaagaccagcaggcagcctcactggtgaatctaccaaatacttaaagaagaattaacaccaatccttcataaagtctttcaaaatacagatgaggagagaacatttcctaacttattctatgagggtgatattaacctggtatccaaactaaagacatcacacacaaaaaattacagaccagtatttcttacgaatgtagatggaaaaatgcttgacaaaatctggcaaaccaaattcaacggagtattctgtaaacatgaagcagataataatagcatgattctccaaactgatctatggtttcactacaattgttgtttttttgagtgaaaaagttttcatttattggctgggcatggtagctcatgcctgtaatcccagcattttgggaggctgaagcaggtggatcatctgaggttaggagttcgagagcagcctgataaacggataaacgtgctgaaaccccgtctccattggagtctcactctgttgcccaggcttgagtgcaatggcgtcacctgaacatctatgtgcaaaataatgaaggtggaccccctacatctcacacgattataagaattgatgcaaaatatgtcaaatacctaaatgtaagagccaaaacgataagactcttacacaaaaacatgggagtaaatttcatgaccttaaattagacaacagttttttcttctccaaactggattttttttcttttaaaacaattttgtcttttgaatttaatgaagtattactagctgaaggcagcctgacatggtgacaagaatgtcagacagatgaaagggacacagcctgatttaaaaccaaacactgaacctttttaaagaagaataagacattttatacacacacatgacaccaaaagcacaaacaaccaaaggaaaaatagatacattagattttatcaaaattaaaaacttttgtgcatcaaaggacactggcaagaaagtcacagaactcacaggatgagagaaaatattggcaaattatctgttaaggtctaatatccagagtatccagaagatataaagaaattcctataattcaataaaaagacaaatcaattttttaaatgggcagaggatgtgaataaatatttcttcaaagaagttatataaatggctcatatacacataaaaatgttgaatgtcttaaatcattagggaaatgtccatcaaaaactgcagcgagatactactttacactcactgggatggctatgagaagagacagacaacgacagtgttgacaaa

SEQ ID NO: 18340 - DNA, 2300 bp, Homo sapien
aattattgtgttgcagaggttgtggggggccttttctgagtcctccaaaaggatggctttattggggccatattaagactatgaaaacagaagagggtttcatggatacaagaagtctgtgagttgggggtacaatgtatagagttttagattaaaactgcatccaataagttggcctgagacatctttcaaacctataaaggaacaatcacaagtgactagtagtattccttggggtccagtggaagcctctgatcttcatatggaatggacccggaaccgtaacccagcattttgttgtatagcaaccttacctctgccacaaaggtgtttcttttgtttattttgaggccgggtctcgctctgttacacaggctgagtgcagtggtgcaatcttggctcactgcagcctctgtctcctgtgctcaagtgatcctcccacctcagcctcctgagtacctagaactacaggtgtgtgccaccacacctggctaatttttgtatattttgtagaaatggggtttcaccatgttgtccaggctggtctcgaactcctgggcacaagcaaccctctctctttggcctcccaaagtgctgggattacaggcatgagcccaaaatttttggtattctttttctgcccccaactttttattttaaacattttctttttttcctttaagccttagaatggctgggaaacattttcaaatggtataatgaacacctgtataactttcatctggaatcagtagttgctaatactttgccacatttgctttccgtgtgtgtatgtctatacattttctggacaaaaccatttgagagtcagttgcagacataatgacccttcaccattgaagacttcagtgtgcagcccctaagaaccaaggcattctccgacataaccagaggactatcatcactcaatggaacttcatattatcattgtctactatgcggtccgtatacacattttcacaattgtcctaatcataacatggcttaaaaaattcagaatccaatcaaacatcagacattacacttagtacatgattctttagtctccttcaatctagaactgttcccaggattgttttaaagtatactgacaagtctttgagactgtaaatgacctgaggtatacttgagaataatttttcaatacacatgaaagatcattacacatgagccaagactcaaatgagctggcctacttactttgtacataaatgtgtaaactcctgaagacttccaataatgaactcccataagacagttagttcaatgtctttatggccttggtgacaaatcattacagaggatgagagcatttttcctatccaataatggtcaagaaaaaagcagacagatcctcactatcttagagaactaagtgagaaagctggtcgatgaaggggacttcatccagagaggaagggatccagctgatggggaagatgctgcaggaggctgaggaaagtgaggctagagcagtaaaagagatctgacaacctggtgaagataagaaagtgacctgacaaaaatgaacggagcagagtgctaaatgaagggccctttccatgctaatcttgcaaaattccctcaaccagccctagcataactgagtctctatttagcttgccatattgtgggggctggtggcacaattgaagttgcagtaaattgtgtaacaaactcacaatagggccctgcaggcatacatatacatatatacacgtacatatatataaatatatatatattttagacagggtcttgctctgtcacccaagctggagtgcagtggtgccatcttggctcactgcaacctccacttcctgggttcaagtgatcctcctgactcaggttccctagtagctgggactacaggcgtgtgccaccacacctggctgatttatatatatatatatctatatatatatcctgcaaagaaggccaggcacggtgtctcatgcctgtaatctcagcactctgggaggtgaggcaggaggatcacttgagaccaggagtccgagaccagcctggggaacatactgagacctcatttctacaaaaaaataaaaaataaaaaagatacatcacatatgcaaattgactcaaaatggatcatagacctaaatgtgtatcatttctgggagaagacataggagaaaatcttttagacgctggattagacaacaggttcttaaagatttcttaggtaagaaacaaaaaatcacaagccatttaagaaaaaaatgctaacttaaagctggtcaaaattaaaaacttctgct

SEQ ID NO: 18341 - DNA, 2300 bp, Homo sapien
ggtgatcttccaggtctctccattgtaattattttgctggctacagtggctcccacttgtaatcccagcactttggaaggccgaggtgggaggattgcttgagcccaggagttctacaccagcctgagcaacatggggaaactctgtcactactgaaaatacaaaagtacaaaaaaaaaaaaaattagctgggcatggtggtgcaagcctatactcccagctactcaggaggctgaatttggaggatcccttgagcccaggggggttgaggctgcattgaggtataattttgccactgtatttcagcctgggtgacaaaataaaaataaaaataaaaaataataattttccccttggtaattaataaataatctgtgggttgttactttgagttcagtgaagatcctgttctcaaatgttttttcacccaaatgtgcatcaatgataatccttgtctgaatgaatttgtattacactgacggttgcaaagtgacacttttaaaaattctgtcattccttctacatttactagctggcattatttcattgaagaagaactcctcctctttctttttcaatatcactcttcgtggattcttctttatattaaatatgtggtaacttattgttgttattcttttgaatgctcaaattgtccagatttgaccaatgcagtctttgttattttttaactccgcaatccaggttaaactatttttaatgcccagagtaatttataatatttcccactcccaacaggaattgagaaagggactccagaagttgggggcttattcagacttcttaaaagtctaccttcttcctctgtactttcagcccaaagtgagacttttgaattgggaagagatacttctgaaactactaatcactgtcacccaattctaatcccaaccatctttattctaggcataccatactcactgccatgcttacccttcagttgggcacttttgtcctccttcctattggccttctggttcctacccaactgtccagtccataggcttcaatgacacctttttcccacacctgtggtagcgttggctgcctcctttacctactcaagtaaccgctttaccgctaatttattgctctctgttttcatctataggatcttacctagccatatggcctgctgcctctgccaatttaaaaacagcattgaggctgtctgcaagacagtcaagctgcattgcaacagtgcatgtctgacaaacaccacacattgtcgtgagtccaaattgcgcggtgataaattgttacattaagtatttgtttttaaactttttatttttaatgatgataaaattttaagctaatgacataattgctttatttttatttactcattcagagttaaactccctcaatttccgaactactcccttgctgaaagtcaggttctcagttactattacaaaatttaataatagaactgttccatatgcagaaaggaccaagacaaaggaatgggaaggctagggaataacattaacatccacacactgtatactgtgctctctgcttgatgctttgcccacagtgataatttcttcatatagtgcaatgtagtttgtaagctggttttaaatccatgagatctcaagtactctctgccttataggacagatgtagatacggttttggtctttctgtttttacagttttataagagtacaagtgatgctgttttatttgaagcctgagagcttctggttccataaccagaaattgctacctggctcttctaatggaatggagggcttttccattcttagaccatccaactctgaacttgctccgaatctcaaacctttctgttcacagaacaaacgctcaagggctttcaagagtgtttctgtagattaggcttattagcatcaacttcatgacttctaaaatgtgactgctttcatgtccagatagcttgaatacaggtatctaccagtgatatggggtggagaattaataatgcttggttacataaagtcagtgttgcttatttttcaaaactttttttttttttttttttttaccaattatgttattcccttctccccaagaagtgggcagaaaagctttgttaacctccttttacagatgaggaaaaacaagatcagaggtgctaagtgctgtagcctagtgccaggtcttctggccccaattctgggttctccccaagcccatgtttcttcccctttctcacaatctttacttcttcctctgaccctcaccaccacccaaagtacttttaattccagaaaagaaacccagctgca

SEQ ID NO: 18342 - DNA, 2300 bp, Homo sapien
gtcacgatcacagctcactgtagcctcaacctcctgggctccagtgatccgcccacctcagcctcttgagtagctgagactacaggtgcatactaccacacctggctattttttttttaatttttaataaagacaaggtctcactatgctgcccaggttggcctcccaatgtgttgggattacaagtgtgagccaccatgcctggccccatgtaatttaagtcatcactaataaaatgtatacatattgtacattgttgacagttgttatattgtactttctgtttgtatttttattggtttttttttcttcaaatattcagcctgatctagttgaatctgaagatgtggacctgctgatgaagagggctgactgtatctaacttagggtcttgcatgcagctggcacttaatacattttattgactgttttagataacattcaacagataattcctaataaaaactcttaaaagtaggagaaaaaggaaacctgagtccttcctctgaagtggcaggaaaaccagcctgggcaacatagcaagaccttgtctctacgaacacattttttaaattagctgcctgcctgtagtcccagccactcaggaagctgaggcaggaggatcccttaagcccaggagtttgatgttacagtgagctaggtcacaccattgctctccagcctgggtgacaacaaggccctgagaagggaaaaaaaaggaaaggaaaggaaaggaaaaaggaaaagggaaaggaaggaaagagtagaagtattggaaaggaagagacaaaactatcattatttgcatattaaatgataaatgttagccaaagaagcctaagagaatcaactaagattttactggaagtaatgagaattcaatacagtggctatctacaaaatcaagaaatcagcacacaaacctcaaatacttttcccatgtaccaccaataactaattagaaaatggaagaaagatcccatttacaatggcaatacaaatgtatgaagaatttaggaacaaaaatacaaagatcttttatctaacaaaagatgtataagatctatatatggaaacactaaagctcttctgaaagacattaacaagaaatgaatacatgacatgagatagcacgttcctagaatgtcgtacagatgtaaattctcaaattaatctacaaatttaacgtaatcctattcaaatcccaagatagtttttggtggtggctgtttttaagacagggcctagctgtgttgcccaggctagagtgcagtggtacgaccacagctcactgcatcctcgacctcccaggctcaagcgatcctcccacttcagcctctgaagtctctcatatggtgtccaagaaatggtgacaaatctcacaaagggaccaggctcagcagggctggaatattcagggaaggtgtcaagaagaaagatgaacttgagttggcttttgagagatgcataggactcccacaggcagagtgaaataagggcattttagatggacaaacacacagacaaaagcagaaatgtgggtggtgtgactggggtttggtgaggggctgctgtggctggaatggagggctgccacaataatggaaatggtaaatgaggcaagtaaggttggactggtagcatagcgtcaaggttgccagctttattaaatcactcttccaatatgctagcactggcctgttgggaaaagtaatacatcatgtaatcgaacaaaagacagaggcaagctccaggaatgggcactgtaaacaggacttgtcccagagtagccagatgtaggctttaggtaagttgatgcaagctgagcatctctaatctgagggggaatgtctcacatggtgtccaagaaatggtgacacatctcacagagggtataggctcaggagggctagagtatgagacgttcctcctcaccagtgaacttaaaaatgtggccaaaaatttttgtaaaagatggctactctgtagtgctttaactggacctatttagacaatgccttacacactggaggatgatactgtgtaaatctaataagtctacaagacaatacgtatgtcttttggctctctccttcctctccagggtgatgacaactccgtgagggtggagattatacctctctcatcatttcagcaacaaggaaataaattagtggcagagtaagggtgacttgatgagtacatccaattgttgacatagttttgggtgggagaaattttgctattatatcgacttcttaaaatagtctagtgggattcacttggtttcaattcacaga

SEQ ID NO: 18343 - DNA, 2300 bp, Homo sapien
ccaggacctcagagccagagctgggcgagaggccctgacctccggggtagggtggaagcgtccctgtgaaggtgcagtcctgcctcccatccccaggcgcggggcctctcccaccctcagcgccctgctcacctccagctgaagatgccagggcacctctgcttcctccctgccctctctgcagtaccgccgagtgtgcataaaagggtttaatataggctttgccgggcgcggggactcccacctgtaatcccagtacgttgagagaccaaggcgggaggatcacttgaggccaggagttcaaaaccagcctgggcaacaaagtgaggcccgtctctggaaaaaaaaaaaaaaagaataaaagaggtccctttttctaggctagagatccacaggtgtattttcagaaactgaatttcctggcggggcacagtgactcatgcctgtaatcccagcactttgggaggccaaggtgagcggatcacttgaggtcaggagttcaagactagcctggccaacatggtgaaactgtttttagaaaaaaaaaaaaaaattggccgggcatggtggtgggtgcctgtaatcccagctattcgggaggctgaggcaggagaatcacttgaacctggaaggcagaggttgcagtcaaccgagatcacgctgctgcactccagcctgggtgacagagactgtctccaaaaacaaacaaacaaacaaaacacaaaaaaaaccccaaaacccaaaacaagccaggcgcggtagctcgcacctgtaatctcagccctttgggaggccagggcgggtggattacctgaggtcaggagttcgagaccagcctgaccaacatggtgaaaccccatctctactaaaaatacaaaaattagccgggcatggtggtgcatgcctgtaaccccagctactagggaggctgaggcaggagacttgcttgaacccaggaggcggaggatgcagtgagctgagatcgtgccattgcattccagactgagcaacaagagcaaaactccaccttaaaagaaaaaaaaaaagaaaaaaaaacaaacaaaactcctgaatttccctgtggataccttttctctggcagcctttttcaatgagggctaagttttctccaatactatatggcctgcagaccgctcagctttcattccagtgaaaacattccagaaaaaactctgaatcaatcccaggtgtttctccaatcagctcaggatgattgtgtgttacctgctgcccagccagtgacacctctccaggcctctgacttagctaggtctccaccatgtgactccaccatagactccccaccttcttcttttgcaaagcctcagacacccaaacacctaccaaaagtgggtagggcaccaggacactccaagtgtaagtggggctctccagcacacctggatgtggaggtgtgatgcagagtggtggctgctcgtgacactcatttcacccctttctgtgcaggtgccagaagcccaggaagcacacatcaaggctcacttgccagcggggtgctgccaataaaatgtagtcacgtggaatttggaatgtggaaaggaggtagaagtcatcctttcctcccccatagcagcaggtgtgcaggctctggtggtcagctggactccatactcccccaccagtcaccagcctggggaccgtggggctgcaaggacctcagcagcggtttcccaagtttcctgacttcttccatcctctggaaatcagctgtggtaaagtagcctgaaagccagtggtgcaaccccatccccacaaccttcaccacctctagcacctccagtgataagcactaattgcctatatacaacccttttttgtttgaaatatctagagtaatttctgttttcctatctggggtagtgtaacataagaagaaatatatatttggtctctgaccccagttcctaacacaaagctcctaaaacccttggaaattcctgaatgatggcggtgctaagagcattgtcctttgttaatttatcatttttcttttctcctaggtgttttttcctttttaaactttccttttaggttagggggtacatatgcacgttcgttatatagctaaacttgtgtcatgggggtttgttgtacagattatttcatcacccaggtaccaagcctagtacccaatagttttttctgctcctctccctcctcccaccctccaccctcaggtagggcccagtgtctgttgtttatgagttctcatcattttgctcccacttaaaagaacatacagtatttggttttctgtt

SEQ ID NO: 18344 - DNA, 2300 bp, Homo sapien
atccacccgcctcggcctcccaaagtgctgggattacaggcgtgagccaccgcgcccagctgtctcatagttttagacactgtctgttgccttcctggtaaacctggcaaggacttagctcttttacaccctagccctgtccattcttgaggtttgggtttgccacaatttgtagaaaatgaacagtgtttacagaattgtgactatataaatattattcaccacagagcttaataatgtgctgtgaggtcaggcatggtggctcacgcctgtaatcccagcacttcgggaggccaaggtgggcggatcacctgaggtcgggagttcaagaccaacctggccaacatggagaaaccccatctctactaaaaatacaaaaattagccgggtgtggtggtgcccccctgtagtctcagctacttgggaggctgaggcagagaatcacttgaacctgggaggtggaggttgcagtgagccgagatcatgccactgcactccagcctgggcaacagagtgagactctatctcaaaatataataaaataaaaataaaatacactctgatgatggctgcttcccccaagggtgcctcaagctctctccttttctttcagtgccatctgccattatcgtgccctcgttctcttccagtgctctggcggagcaggtggcgcccaggcccacagtgccctctccaagttctgtcctccatgtgctcaagttatcccctaaacttgtcacatgggtcatcctggaactttgcttaactgcttcctgggttggggcctttatttcctggctcccttctcttcttgcttaatttcccctccctttgctgcagcacatacccagttaatccctttctaacattaaaaaaagaaaaagagaatagttcttggacctcctcatgatagaaattatatctttaggccgggtgtggtggctcacttgtgtaatcccagcagtttgggaggccgaggcaggtggatcacttgagctcaggagttcaaaaccagcctgagcaacatggtaaaaccctatctctacaaaaagtacaaaaattagccaggtgtggttgcatgtacctgcaatcccagctactcaggaagctgagggaggagaatctcttgaacccaggaggtggaggttgcaatgagctctgatcatgccactgcactccagcctgggtgacagagtgagaccctgtctcaaaaaaaacaaaataaagttgtatctttaatatccattaactgaaaaataaaaataaaaataaggaccaaaaattactatgtggacacacatgcttttaaatgaatttgtgtgttattaaccacagtaacatctatgaacttgtgaaaaactgttactggtttaggcttaagggtttgcccagtctagcttcaatgttcaatgggtgggcatggtggctcacactttgggaggtggccaaggcaggcagatcgcttagtccaggagttggagaccagcctgagccacatagtgaaaccctatctctacaaaaaatttaaaaattagctgtgtgcggtcacgcgcacctgtagtcccagatattggagggcagtggggggtggcgctgaggtgggaggatcactcgaggccagaaggtcaaggctgcagtgagccgaggctgagtcactgcctgggtggcacagcaaaactctgtcaaaaaaacaaaccaaaacaaaacaaaacagacaaacaagaaccaaagttggatgcagtggctcatatctgtaatcccaacaactcggaaggctcaggcaggaggattgcttgaggccaggagttcaaggccagcctgggcaacatactgagaccctcgcctctgaaaaaattaaatattaataaaaacaaaccctagtagcttcagtctttgattctccatccctcatttcatccctttgtcttctggtaatagaatttccttcttgtttttcttttgggatgagccaccttcgctccctgggattctgctgggattgagttaccgccttccgggctcaagcgatcctcccacctcagcctcccaagtcgctaagaccataggtgcatgccaccatgcctggctaatgttttgtattttctgtagagccggcgttttgccctgttgcccaggagtttttcctttaatgttctcctgctacttactaattcactttgtcaccctgtgagctcataagagcagagagatagcaacaggagctaaaaaaactctaagctgtgaaaaaatattaaatatgaaatcatgatagctattagcttaatttgttttaggcaaat

SEQ ID NO: 18345 - DNA, 2300 bp, Homo sapien
tctctctgtctctctcttcctcttttctttcttttctttcttggatgttattctgtcatccaggctggggtgcggtggtgtgatctcagctcactgcaatgtttgcttcaagcagttctcctgtctcagcctcccaagtagctgggactataggcacacggcaccaatgcctggctaatctttgtgtttttttgtagagacagggtttcaccatgttgcccaggctggtctcaaactcctgagctcaaagcaatctgcccacctcagcctcccaaagtgctggggttacaggtgtgagctactgtgctcggcttattctttcttttttttttaatttttaattttattttttggggcgattattctttcttttttaagtttgaaaatattccaatcaaacataaatgtgtagagaaatgacgtgaccacactatgtgtttttaagctattgctttgtttagaagatggtgaccggatggagagagggagagtggctgaggtgaaattagttatatggtttcaggaattgaggctagaaatgatggtctgttgggttagggtgactattagttgttgaaggggttgaattgataaggtgtggtagtagggttctaggggtgcgagcatcggatgtttccagggcacctctcaggctatcagcttgtggaacgaagtcaatgatgggataactagcagaggaggaggttgggggtagggaccttaaattccatttttgactgatcaccttgttttggggccttgaagacatttgccaaagctgttagattatgagcctgaagctcaggagagagggctaggttgggggatataaatctcagagttagtacagagataggaatgaagtcgtgggagtgagtgagattgcctagggaggggtgcagaaagaggagagtggatggggccagtgagagccagggcgactcccatcattgcaggatcagttaaacgtggctgagttcactaaggagactgagacagtacagccatagagatagaaggaaaagggaagctggggaagggtgtcaaggagggagtgagcagtagcgtcagatagaagatcaaattatggaagaactgagaaggcctgtgttagatttattgacctggtgatcactgctgaccttactgaaaaccagctacccaatggtggagcagagctaaggtgctgttgcgtgagaggaccgaagaaagcttagtggacaggttgcttgacctcaggagttttagaccaatctgagcaacatagtgagaccctgtgtctacaaaaaattttttaaatttagctaggtatggtggctcatgcttatagttctagctgcttgggaggctgaagcaggaggatcccttgagcacaggagtttgaggctgcagtgagctatgattgtacctctgtgctccagcctggccaacacagcaaggccctgtctcttaaaaaaaaaaaaagcaaatagagggtgaagatgtgaaggaagagagtgcgatgaagatgtggggatcaaggaaaggtttgttttgttgtttttaaagatgtaaaaggcttaagcatgccaaggtgaacagattggagatattcagatatgggagagaataggaatagtaaaaagttccagacagtctgggtagggtggatctggctcatagagggagggagttggtggaagagagttaccttcttctgttgttccaagagggaggaagaaaagcatgggtaaagatgtagactggcttttacactgtatggtggaagtggaagtcattcccatcggcggcttctctgctctgaagtacactgtgatagtctcctgctgagagaaagggcaggtgcgtggctagagattggagagtagagaaggtttgagacacctgtcctgatgaatgggcgagggggccagcacattctctttgaaggctatagatctttgactagcaggctgctttgtaaattaaaagtactgtccgcatgttgaaattattttgaattgttcaaccagcacaaatcataattaaatgttttccccatgtttcatttaggtttctgtgtggagacagtagaatataaaaataacaccttcgctgtctgggatgttggcagccacttcaaaatcagacctctgtggcagcattttttccagaacacaaaaggtaaagattattcggtttgtagcctcgatactgtttctgtgaaatgtctctaaagacggatgcttgaagtgataccttctggtgctctgctctatttacactgtcagccatttcctctcttagggtctctttatact

SEQ ID NO: 18346 - DNA, 2300 bp, Homo sapien
aaaacaacccgttcttgggcaaaacgatcttatgagtctagcgtcagaaattcttactcatggtaagaaccatggagaaacaggtaggaggtggtctagcacgtggagtgatgttcagtgagttagcagctgcagggaagtgggtcaaagtacacttgtgcaccctggataacagctaactatatataatgctgcctaaagcctggcttgtaactctccttaatcctgtgagggcagtttccattctgtatttgcttaaaaagattaaggtggccaggcgcggtggctcatgcctgtaatcccagcactttgcgaggctgaggtgggtggatcacttgaagccaggagttcaagaccagcctggccaacatggtgaaaccctgtctctactaaaaatacaaaaattaggcaggcgcagtggcacatgcctgtaatgccagctacttgtgaggctgaggcaggaggatcacttgaacctgggaagcaaaggttgcagcgagccgagatcgcaccactgcactccagcctgggcgacagtgagaccctgtctcaaaaaaaaaaaaaaaaggaaaaagaaagaaaaagattaaggtgtgggagtgggacagacccaggctacttaatatttttctgtaaaacagcagggataatagtttcttttctttctttttttttgagacagggtcttgctttatcgtctaggctggagtgcagtggcacgatgttggctcactgcaacctctgcctctcaggttcaggcaattctcctgtctcagcctcccaagtagctgggattacaggcgtgtgccaccacgcccggctaattttatatttttagtagagatggggtttctccatgttggtcaggctggtctcgaactcccaacctcaggtgatctgctcgcctcggcctcccagtgtgctggaattacaggtgtgagccaccacgtctggccagggataatagtttgtaattcactgggcgttacggtcctgcaggtaacattgtttttcttatttatttatttatttatttagtcaattctagcagtatcttctaactttttttgttcgtgttttttgagacagggtctcgctttgtcacccaggctggagtgcagtggcgtgatcacggctctctgcagcctctacctcctgggctcaagtgatcctcctgcctcagcctcccgagtagctgggactacagccgctaccatgcccggctaattttaaatttgtttttttttgcagagatggggttttgccatgttgctcaggctggtctcgaactcctagctcaaagccttggccttccaggcgtgagctaccgcgccgggcctgctgaagttcttgatatagtttctggcacatagtatatgtttaatagatgtttgttgttctgatgatttcagttatgtaccatttacaggcgtttgtaacctttttagctaacaagttgggcatttagggaactgactatagaaagcatttctcggaaacgaggactggttctgcgacgtcttaacgaggtgcgggtggccagtattttccccaacttgaaaatctgtgtagaggtgggagggcagtctagcctcaggcggaataggaaaacttccttatgcctaatttcagtgtcagtgtgtggtatttcctacgcggaacaccgccccaaactaatgtctacgtttaactcaaccgcggtaaatttccttccatggcactattaacttggcccggcccacatgtcccctcccggttggtgtggacgctccgaggttagctcaaacctcggcgattttcccagctgattggccgtgcaaatagacaatccttttgcttttctgattggtcgcacatggcatcgggggtgggggacgtgggcgtgtctcgccagaattcgtttaactgtgatttgaagatgaacatggtattgccagagcttcatggcgtcgcctacggcgctccctccctcccaggcccttactcttctttgcattggccagatatgtcgtcactcacaaaacttcgagctcattggtgcaaaagctccaggaggcggtgggtgattggttggttgctgttcctgcccccacgcctgtcgtggtttagctgaactgagctgaaatcctaaaggccgcggagtcggcggtgttgtaggtagcggtaccttgagtggcaacaggtgagtctccggctgcagggatggggcggcagcactcaagacctggctggatctccacttcgtctgcgggccagaaactggagggcggcggtggctttcggaaagggattgggctccg

SEQ ID NO: 18347 - DNA, 2300 bp, Homo sapien
ttggacaaaatctctttgattctaggttcaaagtcaaggtgtcaaaaaaaaaaaaaggatacaactgttaagcttatttaattatacctctcactgtacaaataaggaaactaggccaggcgtggtggctcacttctgtaatcccagcactttgggaggacaaggccagtggatcacctgaggtcaagagttcgagaccagcctggacaacatggcaaaacgctgtctctactaaaaatacaaaaattagctgggtgtggtggcaggcgcctgtaataccagcgacttgggaggctgagacaggagaatagctagaacccgggaggcggaggttgcagtgagccgagatcatgccactgtgctccagcctgggtgacagagtaagactgcgtctcaaaaacaaacaaacaaaaacaaataaggaaactgggctcagagagatgaaggtacacaggtgatgggtagatagggacaaagaaaagaacctaaccctttggactccccaagccattctaatatttgtttttgtaagttagtagcttctgcacgttagtatgtcagaactcaactagtttcctatctttcctgataacctctccgacccacccatgatttagctaacatctgatttggtcaaccaagcaccctggtcctcaggttcagtgtgagacttaatgaaataggcgtgaatttttttttttttttttttttagacggagtctcgctctgttgcccagcctcgcaatctcaactcacttcaacctctgcctctggggttcaagcgattctcccacctcagcctcctgagtagctgagatcacaggcgcccgccaccacgcccggctaatttttgtatttttagtagagacggggtttcactatattggccaggccggtctggaactcctgaccttaggtgatccacccaaagtgcttggattacaggcatgagccaccgcgcctggctggcatgaattttttcttctgtccctagttcatcttcaggtcactgtctgattttattagttctcaaatttaaatcactatgcatgctcagctcttctagttatttcccttctttcctcatgttgggaaaaaaaccccgatttattctaattgtgagaaatgaaagcgaacaaatcctatcattccctattgtcttgtgcaaatatgaagagagatatgatagtggggtaaataaaagcatcagggaatccattcggcagaatctttctcctctcagcgtgcttgcagttagatattctgagattccagtggagaaatggtatggtggaaacattgaggttcaacaaggctcaatttagggcatattttattcagattctaccatatatattgtctaaaatgaaacaacactggggaatgaaaaggttggtcgaagatgcaagttgcctttattaaataaagacaaatatttaataaaaataatgtataaaaataatcacaattcactttcaaatctgaaaatactgagttttccaggctacacataaataaaactgccaacgatgacaattccagcaactaggaaaacaagtacgcctacaaagaaaagtgagaaaattcatggagaatttgaactcagaaccaactcctcggagctgatcttttttgggggaagccagggaacgcgccgggcgctctcatcagcaagaccatgtttaaagagagtgtggaagcacagaccaaaatggacattcgagggcgaacagcagctggcaaagggataagtgatccgaagcattaaagcccttgagacaaattccggcgcgaaccgccagtgggggatgagactcgcaggcgcagccctccaggccccggcggactgacacgcacgttggaaacggagtcacccaccacagccccgcagctccagccaaaatggcgccgccgctctgcccaccccgcgcaccccaggcggccgccgagcccgcgcgcgcgccctgtggagcgaggacgccggggacgcggccagggacgcgcgcgtcctcacggcggttgcacgcctgcgcgagggcgggcggcgggggcgcgcgcgcggcgggggcgggctttgccgagcgcagagctgcagccgccgagccggacgtgtccgcgaagatggcgggccgggtgagtgccggtctgggagcccaggcttgaggcaggggcgccgggctcgcgggcactctggggtccaggcggccccagaggagtgggagtgaatccgagcaatggggcgcgaggccagagcgggacttgagggtagcaggggagcggtggcaggggattagccctcc

SEQ ID NO: 18348 - DNA, 2300 bp, Homo sapien
ctgtctctactgaaaatacaaaattagccgggcgtggtggtgcatgcctgtaatcccagctactcaggaggctgaggcaggagaattgcttgaacctgggaggtggaggttgcagtgagccgagatcgtgccattgcatgccagcctgggcaacaagagcaaaactccatctcaaaaaaaaaaaaaaagctgtcagagaaaaaagatattaccttcaacaagtatttggctgtcagctgttttcctgtctataataatgaaagccataagacagggagtaatattttccatatgcttagagaaaataattgtcaaccaagaattgtatatcttgtgaagaatgggggcaaaattagacactttaaaacagacaaacactcaatgttgtaaccatcaaaccttccctactagtggaaattcagatcaatttcctgaaggctaaaaaaaaaaaaaaaaagtgaccactgatgtaaagtctgagatttaagaaggattgaagagtaaagaataatggtaaatctgtggatatattgaaataaatattggctttataaaatgatgtatgcggaggttttaaaaatagaactaaataggccaggtgtggtggctcacgcctgtaatcccagcactttgggaggctgaggtgggcggatcacctgaggttatgagttggagatcagcctgaccaacatggagaaacctcgtctctactaaaaaaaaaaaaaaaaaaaaaaaaaaattagccgggtgtggtggcgcatgcctgtaatcccagctactcaggaggctgaggtaggagaattgcttgaacctgggaggcagaggttgcagtgagccgaaatcacgccattgcactccagcctgggcaacaagagcaaaactccgtctcaaaaaaaaaaaaaagaactaaatatatgataacaacatccaaatcaaaagagtggttaaagtattttatgatctttatactgttgaagagaaaggtaaagctattcaattaactttagattttgataggtatgtgtattagtattttcagagtaactactaaaataatataaatattaggaataatttatagcagaaaaaacaatttttaaaaggcaaggaagaagtgaaaaacatagaaaaggtcagataaagaggaaacaataaaatatagaaatcaaatcaaatatatggtagactaaatgcttcattcagacaaagaatgtcagattggattatttaaaagcaagcaggccgggtgcagtggctcacgcctgtaatccgagcactttgagaggctgagacgggtggatcacttgagatcaggagttcgagaccaccctggccaacacggccagctggccatggccagctaatacaaaaattagctgggtgtggtggtgcacacctgtaatcccaggtacttgggaaggtgaggcaggagaatcacttgaacccaggaggcggagattgccgtaagccaagatcatgccaccgtactccagcctgggcaacagggtgagactctgtttcaaaaataaataaataaataaataaaagcaagcaaacaaacttactgaaacaacacaaaatccagctataattttcaagagagatagctaatacatatgaatgtagaaagatagaaagcaaaaggatggaaaaagtctatcaggcaaactctaaccaaaagggaggtaaactaactatattagcatcagacaatatgatctttcagacaaaagagacagctagagataggtccctcaacaatgagaaaaggtttatttatccataaaggtaaaaacaattccaaacttgtgtgaacctaataattgcctcaatatacaaagaacaaaatgacacaattataagatgaaatagacaaatctaccatggtgaggagtttcaaaactccctaattgaaaaattaaaaagacaaaatggttacagctgaaaattaaaattaaaaattcattttctcggttgcaatagccatttttcaagggcttactagtgacatgtgacaatggctgctgtattggacagcacagaaagtacttttgcactgcattaatttagaagacttaatataattaacaatattaataattgagtattgaacaccacatccaaggtgcagatctctgaataatatctgatcataatgtgggcaagttagaaattaatgacaagaaaaggcagaaacatgggagacaggtgaagatttcttaaacagaatataaaaagcactagatacaaaggaaaaaagtgattaattggatttcatcaaaagacactgacttagtttg

SEQ ID NO: 18349 - DNA, 2300 bp, Homo sapien
ataacctgcttttgtggtgagaactgtagaagctcacttacccaatgtgacttggactggtaattaagtgaaaagttggttaaaggctttttcttggaggtgtggtccatggattggagttctgtattatcttttgtgcatacactttacccataatttccaggtggatttctttgaaatggctggagaacttagactttgtagagcatctgagagtgccaaaacctcttggatttttgtagagttcactcccaaccttttctaattttaatgcttatacctagttagcagtattttttttttctagaagaaacacttcatttaaaaaattttcccaaagctttcaacttataatatctattctagaatgtcaaagtcattgtaataacagttcaacaaccaggccttcagaagtttttatactatttaattatatttcataattaactgtaacaagtgtaactagcacagacagataccagaatgaacttggttgacccatgatgtgtagcaactcctgtctacaagctctgagcgttaggcaaaccataggctgatgggtatatgttggagggataaaagttggtcagctttctgatgactcagctcagtggaggttgcttaagagagctgctactgtatccttaaggggccattggtaaattttaggacaagtatcttcagggaacctaaagggaaaataaatgtgtgtgtgtgtgtgtgtgtgtgtgtgtgtgtgtgtgtgtgtgtgtgtgctcgtgtgtgaagccttattgaagagtagcaatagactctttcttactaggcgtaatcaagttgccctcctggggaaactcaaatgcaaaaatcctcttgaacttttctgggtagcctactctactctttcctaatagtaccactacagtatacagcactgtaaaattttttgctttaaaagtttgtttataaactggcatttataagtatactttttgagctgatttaagaatcaagtttttttttctagggaaatgcttctttgtaattatctgtcactagcaaaatttgttttaacatatatttttctaaaaatatgatatgtaaactgtgttgtagttgtacaattaaaggtttttggtcgaacagttattacatgatgtaaaatcatgtgtaacactttaatattaattacattgtaacctaaaattcattttaaaactttttatgtggcttgaacaggaattttcttatccaaagctttgtatgtatgctttattgcctcctttgttattagcatggagaccatgggttttctgttattgttgtttcatttaaacagttcatgaatatattaagcacctgaaagaaactgttagatgctgttaataggaagaggagttaaaaacctcgtccttgcccttatctacatgtgtacatgtagaacttactgtagttccctagatgtagcaggtgctcaggaaacatttttgtagtagtaaaaaagaaatgtcaaactctaacttgctctggagcaaattccgctagtaaacattgtttttcaagcttcttttttttgccttgcgtcctactttcttaggccaaaataattcatccacatcccaccttagctgtttttttgtgtcaaacaaaaatcttatttggaaatagcatgttacgccaactgtgttggggcatcccatactgtattgcattaaatgaggagaaagatgcagaggccatgtggggaggattgtgatcctgataagagtgggatgagggataacaacagagagactgccgttcaatatttctttctttctttttttttgagacggagtctggctctgttgccctaggctggagtgcagtggcgtgatcttggctcactgcaagctccgcctgccaggttcacgccattctcctgcctcagcctcccaagaagctgggactacaggcgcccgccaccacgcccggctaattttttgtatttttagtagagacggggtttcactgtgttagccaggatggtctcaatctcctgacctcgtgatccgcccgcctcggcctcccagcgtgctgggattacaggagtgagccaccgcgcccggcctgccattcagtatttctaattaattcagatggggaagaaaatctctagtgactattattttttaaacctgtacctgtgtgtccctccagtgaaggccatttaaaccccatttttggtgaagtagtttatgattcatttatgtgaaacttttagttactagaaacactacaggtattttgtactcctgtgatttttaaaaaaatgcttcttt

SEQ ID NO: 18350 - DNA, 2300 bp, Homo sapien
ctacagacctttatttgcttgtaagaggtggccctgattgctctcagctttccaacctgggcagcccttctagtgaaagtcttacttccttggtcatcaactgtcaagtctgagtaatgacatttaataaccaagctaaatgtgtgggttgtctacccctccctagtatgcaaaggtatcccttgcacacactcacttcttagaccaaaagccttatagttctagtttgccttgaaggaaattgtattgtctatagagtatgtgggccattttctgcccgtaaaatgttcaaatgttttctctctctaaagctttgttcattgtatctggtggaattttggttctcagggagtagacacctagccatgcttctaatgtgaagtgtctactagcccagtggtctctattttggatttgaacttacttcgaccccccacctggtgccttaccttttaatcatgttatgattgaacatttttatttccacattttttatttcttacgttattattccttagttcctatctgtaagatcataaagtcctttgaaccaaacacagttgatatttcatacatatgttaaaaactgagctgtgagaccagacatgatgactcacgcttgaaatctcagcatttcgggaggccaagacagaaggatcacttcaagccaggagttcgagaccagcctggaaaacaaagcgggaccatgtctctaaaaaagagaattagacgggcacagtgatatagtgcctgctactctggaggctgaagcaggaggatgacttgagcccaggaattccaggctacagtgagctatgatagtgccactgtactccagcctgggtgacagagtgagaccctgtctaaaagaaaaaagaaaaacaaaaatcgaagtgtatgatgaagagatgaggaaactttcaggaaaatgcttatttcctgcttttagaaactaaaagaatgtctcattgtgggttgctaccattatatgcaggaagttttggaatgaaaaagattctgaattcatccttgctaactttatttcagaaagtggtaaaatagctatggagtacagacccagtgaagagattgtagatgtcagatgggaagaagaactacacggtttaatataagtatgtggagataaaaactcaaaggtaacagggccgggcacagtggctcacacctgtaatgccagtgctttgggaggctgaggcgggtggatcacctgaggtcaggagttcaagatcagactgaccaacatggagaaatggtggcacatgcctgtaatcccagctactcgggaggctgaggcaggagaatcgcttggacccgggaagcggaggttccggtaagccaagatcacaccattgcactccagcctgggcaacaagagtgaaactctatctcaaaaaacaaacaggccaggcgctgtggctcacacctgtaatcccagcactttgggaggccgaggtgggtggatcatgaggtcaggagttcaagaccagcctggccaatatggtgaaaccctgtctctactaaaaatacaaaaattggctgggtgtggtggtgggcacctgtaatcccagctacttgggaaactgaggcatgaaaaccactagaacccaggaggcggaggttgcagtgagccgagatcatgccactgcattccagcctgggtgacagagcaagacactctctcgaggaaaaaaaaaaaaagaaaagaaaaacaactcaagggtttgataacattgccagtataaccataattcaaaacaagcagcagaatttggaggataatttgtttaattctcaggaaaatgtgaaactctgaaactgctttttgagtgcagggtatttccggggcttttcctaaagtcttaacccttggctctgaccccttatttgaagtttggagagcagaaccgaggattgtattactacagttgtggacacaggagaggggttagtctccccccgctccaggagtaagggatgctgggctgctcgaacacaggccttgttagaactcccttcaaacaggatcccagagatgtggggagaaggtaactggccttaagaatgattgcgctacagcttttgaaaactataatgcctttcaaatatggcttattgcttggatctcaatatctcccacgtatcttgggtggaatattttgctgaagatctttctgtcaatcatttacaatcatgtgctgcaaaatgaagtttgcgtcaacagtagaccacatatatgatggtggttccgtaagcgtataatggagctatccctatatagg

SEQ ID NO: 18351 - DNA, 2300 bp, Homo sapien
gcaacctccacctcccaggttcaagtgattctcctacctcagcctcctgagtagctgggattatagacacgcgtcaccacactcagctaatttttgtatttttagtagagatggggtttcatcatgttggccaggctggtcttgaactcctgagctcaagtgatccacccaccttggcgtcccaaagtgctgggattacaggcatgagccactgtgcccaggccccatttttatcttttacacagtattttaactatatattttccatgtttacatacacaaatacctgccattctgtgacagttgcctttagtattcagtacagtaacatacagtacaggtttgtagcctaggagtcctaagccataccgtgtaccctaggtatggtggctacaccacctaggtttgtgtaagtatacgctatgatattagcacaatggtgaaatcacctagtgacccatttctcaagctcctcacgtggcaagcaatgcatgactgcatatgaaagctcttaaatagggattgtttctaaattaatctcaaaacagtcattatttactatttatggaattttttttaaaaaaaggagcaaaagtatcatttcagtgggaacttaacttggggctacagtgttttatttaacttttaccccaaagttgcaaagtgttttgaaatttttccctgtaaaataattattttaattcaatttaaataaaacccaccaaggagacttcaagctttaagaagtctagcttcctgtgaaatgtgagaggaagtcagcactcatttcagaaatctgattataacaatagctccatccctaaatgaggtgaatcttggaatctcttccattttattttattttatttttttgagatggagtttctctcttgttgcccaggctgaagtgcaatgttgtgatctcggctcactgcaacctctgcctcccaggttcaagcgattctcctgctttggcctcctgagtagctgggattgcaggtatgcaccatcacacctggctaattttgtatttttagtagagacggagtttcaccatgttggttaggctggtctcgaacttctgacctcagtgatccccccacctcggcctcccaaagttctgggattatgggtgtgagccaccacacccggccccccttcaattttaaagccatcactatgcaccctatgtctatgccaggcactaaaataagatgaagcaccttcttggagtttacatgctggtaattatgccagacagtaataaaataggtaagaacggctgtgggggaagtcagctgggttctagttacagtcgcatttcaggaaatgatttaacatgctgactttaacaacctaagcctcttctccatgtgtgcacacagggtagatctctgaacacaggtgaccctagaagtgctgtaacttctaggggaatggctgtgttgagtcaaggcaggatgacagttcagcctcctcccaggctagtgcaaagggctcttcactcggattaaaaccttctctcccagaccgaattgccaactcccaacacccctcctacagaaaatgtggagtcctcgcttattccctggcagcccctacctaatagggtggtgaattaattatcaaacatgcgacagtttagcgaaaatggcaacactttggaataagtgactgtaatgtgcatcctggcgcccattttgcaggtcagttgctctccctggaaggaagagtgttctcggatttcaccttaaaggaggaaggctgccagaactgaactagcacttctgaatatcctgaggcgaggtccggtgacttccttgggaagctctgccgcgcccccaccccaccctaccccaccctaccccaccacagcaggcgctggagtcctgggaccaccagggtctgaggcccaaatccttcctcactaaggggaggagaggggtgttccggcagggcaggatgggaaggcgtgcttgggcgggattgtgacataagagtgccctggtgacatggagcagatctgtgacataaataaaggtgtcataaagacagggcggggctcacgcttagaaggggcacgagcgtctcggagctgccagaatgtcttctgctcagtgcccggcactagtgtgtgtcatgtcccggctgcgtttctggggcccatggcccctccttatgtggcaactattgtggctactagttaaggaggctcagcctctggagtgggtcaaggacccgctccagctcacctctaatcccctggggccgcctgactcctggtcttcccactcctccca

SEQ ID NO: 18352 - DNA, 2300 bp, Homo sapien
cttattccctggcagcccctacctaatagggtggtgaattaattatcaaacatgcgacagtttagcgaaaatggcaacactttggaataagtgactgtaatgtgcatcctggcgcccattttgcaggtcagttgctctccctggaaggaagagtgttctcggatttcaccttaaaggaggaaggctgccagaactgaactagcacttctgaatatcctgaggcgaggtccggtgacttccttgggaagctctgccgcgcccccaccccaccctaccccaccctaccccaccacagcaggcgctggagtcctgggaccaccagggtctgaggcccaaatccttcctcactaaggggaggagaggggtgttccggcagggcaggatgggaaggcgtgcttgggcgggattgtgacataagagtgccctggtgacatggagcagatctgtgacataaataaaggtgtcataaagacagggcggggctcacgcttagaaggggcacgagcgtctcggagctgccagaatgtcttctgctcagtgcccggcactagtgtgtgtcatgtcccggctgcgtttctggggcccatggcccctccttatgtggcaactattgtggctactagttaaggaggctcagcctctggagtgggtcaaggacccgctccagctcacctctaatcccctggggccgcctgactcctggtcttcccactcctcccatttcccacgggaatctccccatgcgcctactctcccagcagacccgtgggactttgatcacctggggccctctgcttcctcagagatgccagccccaccccaggaatcgactgaaaatttggttccattcctggacacctgggattcagctggagagcagcccctggagccagagcagttcttggcttcacagcaggatttaaaggacaagctgagtccacaggaaagactccctgtttcgcccaagaagctgaagaaagatccagctcagcgttggagccttgctgagattattggaattacacgccaattatccacacctcagagtcagaaacagactttgcagaatgaatattccagtacagatacaccgtatcccggtagcctgcctccagaactccgggtgaagtcagatgagcctccagggccctctgagcaagttggaccttctcaattccatctagagcccgaaactcaaaatccagagacccttgaagacatccagtcctcttcactccagcaagaagccccagcacagcttccacagctccttgaggaagaaccttcttcaatgcagcaggaggccccagctctgcctccagagtcctctatggagagtctaactctaccgaatcatgaggtgtcagttcaacctccaggtgaggatcaagcttattatcacttgcccaacattacagttaaacctgcagatgtggaggttaccataacttcagagcctaccaatgagacagaatcttcccaagcccagcaggagaccccaattcagtttccagaggaggtggaaccttctgcaacccaacaggaggccccaattgagcctccagttcctcctatggagcatgaactttccatcagtgagcagcagcagccagttcagccttctgagtctcctagggaggtcgaatcttctccgacccagcaggagaccccaggtcagcctccagaacatcatgaagtcacagtttcacctccaggtcaccatcaaactcatcatttagcttcacccagtgtctctgtgaagcctccagacgtgcagctcaccatagcagcagagcctagtgcagaggtgggaacttctctagtccaccaggaggctacaactcggctctcagggtcaggtaatgatgtagaacctcccgccatccagcacgggggcccacctctgcttccagagtcatcagaagaagctggacctttagcagttcaacaggagacttcatttcaatctccggaacctattaataatgagaacccctctccaacccagcaggaggctgcagctgagcatccacagaccgctgaggagggtgagtcttccctaacccatcaggaggccccagctcagactccagagttccctaatgtagttgtagctcaacctccagagcattcacacctgactcaagccacagttcaacctttggatctggggtttaccatcactccagaatccaagacagaggttgaactttctccaaccatgaaggagaccccaactcagcctcctaagaaagttgtaccccaacttcgagtatatcaaggggtaacaaatccaacac

SEQ ID NO: 18353 - DNA, 2300 bp, Homo sapien
gcagaggctccgccaagtgcctgtgccagagcccaacacccacaatggcaccttcaccatcttgtaagaatcacttttcctcaattgtcctctgtgtcctgcctgacatggcagccttttcctggaggccttcctgggccttctttatctccccaagccatatggacaactgactttctgctttcacctttgcttgtcaactctcccttctcctcattctcttttaatgttaggccccttctccagtcttttccttttactctggtcttttactcgtttttgtatccatttttatttagccccatcacatcattgcttaaccgctgctctcctcccattttcgcttcaccctctttacagcagcctgtccctctcccgatctcagtgatgatgctctaagtggttaagagttgattccggagccaggctgcctgggtttgaacccagatctatttattagcttggtgacccagagcaagttattctgcctgtgactcaatttcctcacctttaaactggggatcatgctagttagcatttcataggattgttgtgaaatttaggtgagtgaatatatgaaacacttcatcagtgcttagcatatgtaggagagttggctgttcacatgattattcagtcctttagttttgtccagaactcatttttgtccctagctttctatatgtagaactagttttatgtcaaacccagggccaagtatgctactgtctccagaacacgaaaatgataggagggaagaggctgggtgtggtggctcacgcctgtaatcccagcactttgggaggccgaggcgggcggatcatgaggtcaggagatcaagaccatcctggctaacatggtgaaaccccatctctactaaaaatacagaaaaaaattagccaggcatggtggtgggtgcctggagtcccagctactcgggaggctgaggcaggagaatggcatgaacctgggaggcagagcttgcagtgagccgagattgcaccactgcactccagcctgggcgacagagcaagactccatctcaaaaaaaaaaatgataggagggaagaaagagaataggcataaaaagggaggtatatataattaagtactaaaagataatgcagaccattggtgctagaatttgccagaatctgtgatccttgaggtgtggagatgctacatgggtaagctaaaactttacttgggtcttaaagagtagccataatttgttaaataggagaaaaatgggagtacagtctaggcaaacgcatggctacaggtatggttggaatttagtagaccaatgtggctacaaagaattaggtgagggagcaatgaagatacgattctgtaaaaccttgattatcagctacaggagtttgaaagttacacaatgaggtatggaaagccattgaaagtttccaagcaagagagattacatgatcaaaacaggaagattattttattttgttttttgcattatgtgcaagtgtagacatgcagaggattgttttagaatccatatgtaaagtgtccaaaaggaaaagcttaattcagggagacaaaatagaaaggtctagcaaaatctaggagtgaggtgtgaaggggccaaatcagatcagttgtaataggagtggaaagaaaaagcctaggatgtttcaacagagggcactgggccaaagctttggtgttacctggcatagggtttctttcttctcatttgttgataatgataagcttttgcccatatttctgtggaattatttaccattttggtactgatttgtagaagtctgtttagacacataagtgcttttagataaaatacttacattcaaagtaattaactggcatcatctgtccaagagatgggatggataagaagttaagcttccaggagatgcctcatcatttgtgccggtgaccccgcataatttcttgatgaattgtgcaaactgggaagctgatagctctggaaatgagaaagcaggtgttattttctgtttctgaatatccccaacaagattgcaatgattcttttacttatcgtgttcattgttttcctacctattcaaggatataaactgtgtttcttcacagaaatttccaaggaaactatatttcttacattgatggaaatgtatggaaagcatacagttggaccgagaaactgtgagtatattctctccaaatatgacaaaaagctaactgcattgtaagatccttcttggtccagaattttgaggtcggtacctctgaggaaagatatttctcctccacgccccaaatcaaccact

SEQ ID NO: 18354 - DNA, 2300 bp, Homo sapien
taaacaggtccctgaaagcatggactaggtcttgctcatctgcattgcccaccatgtttaaaactgacacatggaaataaagcaaactcaaatatttgtaaaataaatgaataggggggagtgagtagaaggaaaataactattttaaaggaaacgtagttttattatttcatggtctctgtagcactttggcatccacctgagggtctttacacccactttccttaagccttctatatttgagagaatctgtttgcaaaagagcatcactaatgagcttaataaggattaatgacatacacacctctatggacaaagggtaagaatcaagcattcatagcaatgaacatagtatcttcttgtctctaaacagacagaaatacagggatccctttcttggtaacagggctggggcgatcgttattttgtaattagtgaagagttaggggcatttctgatgtgcttcttagtgtaaacatttctagctctaccagttaaccatcattttaaacatctgttttaatataacaattcctgaaatgaaatccttaataccagtctattctcttggtagcttaatattcttgatgataatattgatataattcagctatttttaatatttaaatgttaatttaattccgattaaattaccaaaaaattctggattaatgatgttcaaatgaatgcaggtggtctccattttcttctcctttaggcaaccatctgaagttaactttagttcctttcatcctactaaaccaactttttgaaattttttttggtgaaggtcagacagtaaatattttaggttttatgggccacatatgatctctcgcatatttctttgtttcttttctttttctttcacagtccctttaaaaatgcaaaacccattcttaacttaatgggctatttaaaaatagaccataaattagattggatctattggttgtagactgaatagaaaaagaatgatatgtgaacccttataaaacaaggttcatatgggtgtcagtcactgctcagattttcttaccatgtgaaatgtttttgtctgtattttgtctatacaacttaaaaactgaaaatgcacaggaggtagctagtgctagagatgggctgagaccctatacaaacttacagaattgcagaattttattgctcaaagaaatctgagagattatctaatttgaaccccttattcattttacagataatatgactaaaaactcataaatataattaactaacttacaaatactggagggatagcaggccttcaaatgaatccttgtgtaattcagtcaagttattttctctgagaattctggaaaatgaagaagttatttctagattaaaatgcaaactacaactatttgctacacagaaccatctcctgcatgtggaggaaagctgggtcatggtcacttcaagatggtgggatctgctctgctttcattcaaaccttttcttatattttcctttttgtgtccatctctctccaccaccaccacaaacacacacacacacactcaagcacaccccttgaagagtgggtttcttcccaccaaattctgttatttcatgcctcctctctagatcacaaaatcccttttagaatccaactctgggtggcaccaagatcagcagaacctccatttcctcctctcttttcccaaaccttattatgaaagccccacatggaaccatgtcagggctgcaagtgaagccattcaacctttttccccccatcaaaaaaactggagaactataatgtgcataaagtgcacataacataaatgttgtttatatttaatttaatttaatttttgagacagggtctcactctgttcccagactggtctcaaactcctggctcaagtgatcctcctgtgtctgcttcccaaagtgctgtgactgcagacatgagccacctcacctggccaaaatattcagtttaataattatgaagcagatacccatgtaaacatcgttacaaaagatcattgctagcatgccagaagccccagtgtgcccctttccaatcatatccctctctctaaccctaataggtaaccactatcctgacctttgtaataattttcttgtttttaaaatgtagttctggcctggcgtggtggctcatgcctgtaatcccagcactctggaaagccaaggtgggtgaatcacccacggtcatgagtttgagaccagcctggccaacatggtgaaaccctgtctctactaaaaatataaaaattagctgggtgtgatggagggcacctgtaattccagct

SEQ ID NO: 18355 - DNA, 2300 bp, Homo sapien
aaaaggcatcaaagaagtgaccctcaaattagccttgttgctgggcggggtggctcagacctgtaatcccagaactttgggagccgaggtgggtggatcacccgaggtcaggaattcaacaccagcctggccaacatagtgaaaccctgtccctactataaatacaaaaaaaaaatctgggcgtggtggtgcagttttttgctccctggaggactttgtgttaagcttccttccttgcagctaaatgttgcagacatttaagcagttagaaactctgcatatgagcaggaatcaaatccaaagttgtagggccagaatggtggctcatgcctgtaatcccagcaccttgggaggccaaggtgggaggatcactggaggtcaggagtttgagaccagcctggccaacatggcaaaacctcatctctactaaaaatacaaaaattagcaggtcatggtggcgggcacctgtgatcctagctatcgggaggctgaggcacgagaatggcttgaacccaggagggggaagttgcagtgagccgagattgtgccactaccctccaacctcccctccaggctggtctcgaactcctgtgacctcaggtgatccgcccacctcagcctcccaaagtgctggggttacaggtgtgagccaccatgcctggccaagatggtgtttatgttaagctattgtgcaaaaaaaaacttttgtaaagaaaatatatcgctgtatcttaattccatatactttcctgactactcttctaccataattgcaaaaattctatgatttctctgtataacatacccatcaaatcagagtgggtatattcagtggcctgaaggggactcaaggtgaagattctcctctacatctgactttagaaaagacgttccacctgccttgtggttcagaaatctagtttcacacagttcatttcaagttagagggaggcattcaggatgtgtctggactagagcagcagtttctgcacatgctcccctctgtcctcattaatttgctgatgcataacttaggaaaagtacactaaaggtctgtttttcttttgccctcacaccagagaacaggctcattaggtccctccaccaagaggtttaggtagcatcaatacaaatgttttaaactcaccatctttactaagcactttatacaactgggagtccctcataaaaatctggtggccgggagcggtggctcatgcctgtaattccagcactttgctgaggtgggtggatcacctgaggtcaggagttcaagaccagcctgaccaacatggtgaaacctgtctctactaaaaatacaaaaattagctgggcatggtggcaggcaactgtaatcctaggtactcaggaggctgaggcaggagaatcacttgaaaccaggaggcggaggttgcagtgagccgagatggcaccattgcactccagcctgagggacagagtgagactctgtctcaaataataataataatataataataataatcatcatcatcatcatcatcatcatcatcatctagccagcttcactacaattatgtaggcaacaccaggaaaacactggaatcacagttgataaaaattaatgaattcactcaaaaacattcagagtgtcatgtccatttgtgccaggtactgtactaagtgctggggctacaaaatccatctcaaagacacaccaagatgaggactttgtccccaggggactttcattcctcaaggaggaagcggatgctgatgggaaaacatatgagagccatgtggggatctgtacggcagggtgacaaggagaggacaaagcaggaatgggggctgggttaagaaagacttgagagacactaacttgcttatcttgagtttctgtgttcatcttaaacaacagaaaaaggcatttgcttcatggtgatgaaaaaatcagagctagctgatattggaaactagcactcatttcatataaacagaatagagctgtacccttcaaactaagtcacagttactttcaaagattggcacaagggtctcaacacaccaagtgtatgttaggggctgggcccttttggagtcaaatcttcctggtaaacaaagctacactgcagtcatatttggcatatgtgacatataggcccactgcatttccttccaaaggcaagatgccaagggaaggtgccagtaattttatgaccaatatgacaccattttgtggtgtttgtaagttgaaacaatatatttccctgcattacacaagtttataaaaaacaaacaaaaaaagaggccccagctgt

SEQ ID NO: 18356 - DNA, 2300 bp, Homo sapien
tactcctctgggaggacctctatgagaattacaatttctcattagcagggcacggcagtgcttgcctgtaattccagctgtttcagaggctgaggcaggagaattgcttgaacccaggaggcggaggttgcagtgagccaagatcaagccactctactccagcctgggcgacagagcaaaaaaaagtggattacagtttctctttttatgtctttcccctaatcatttcccatgattaaatagtttattagtctatggtcaatgagacttttttttttttttttaagagacacattctcactcactgtgttgcccaggctggagagcagtggctattcacagccatgatcccactagtgatcagcatgggagttttgacctgctctattcctgaactgggctggtacacccctttttaggcaacctggtggtctccttttcccgggaggtcaccatactgatgctgaacttagtgcggacacccaatcagcatagcatgctacagcccagaattcctggactcaaaggatccttcttcctttgcctcccgagtatctgggactacaggcatgtgcccagtgagccttcagagatttaaaatcatgtcgtaagtgacatcagtgaaaatggtggaataaagacatgcaggctgggcgcagtggctcacacctgtaatcccagcactttgggaggctgaggcaggcggatcacgaggtcaggggatcgagaccatcctggctaacaaagtgaaaccccgtctgtactaaatatacaaaaattagctgggcgtggtggcaggcgcctgtagtcccagctactcgggaggctgaggcaggagaattgtgtgaacccgggaggtggagcttgcagtgagatgagattatgccactacactccagcctggacaacagagtgagactctgtctcaaaaaaaaaaaaaaaaaaaaaaaaagagacatccaaaaattcatcccttcataaaagcaacaaataccaaaaaaaatagcaaaaaaaaaaaaaaaaaaaaaaaaaaaaattgaccacaataaactttttcagaactctagaaatgtaaccaaagtcttgcagcaacccaaggagcatttattcaaaaaaaatttctgtaagaacagtgagatttgtgttaacttgccttagaccattcctcaccctctagctcagtagtcgccttggaaaacagcccacatccccaaccagagggagcagaatggagctggagctccttcaaagccttattctcagttaactgtcatgatgtcatctgtctggtggttccctggaagacctcatttgaaaggtttgtctttatttgaccagaatgaaagctgtctagtgctaaagcctctccacagagggtgtttttggaaaacaattacagacaagtgttttaacatggcaactgtattcggcaatgaataacagtttgggggaaaaaagcctaatcaaaaagcttaataggaaaagctgaggaataagatgtccacaggaatttgaaacactctgatatatgcttgggaaactagaagtccataagacatattcctggcaatttggaatgtcacgcgcatgcatagggcagactgtcagcatggtcaggaaagacctactaagttcataaactctcacccctggctgacaccttgaggttctgcacaagcaagaagtgaaagctaaggcatggctgtaaattgtctagctgagtgctgaaggtatgccccaacatgtacacagagccccttggcaaaaactaggagacttatcagttccaagaatttaagtaaatcttcatttaatcattacctgatcggtaagctaaccgaggagggactttagtgggaacacatgacatataatgcgagactttacagaagaagttcagaaaagtcactaaataaatagcaactactaacacaagcaggagtaacaccaaaccctggcagcatggatctgattttcagaattgctacattatattatttaaaatattcaatttttaacaaacatttatgaaagatgcaaggaaacaaagtatggcccaaacacgtggttgggggagaaataagcagaaattgtccctgagaaggaccagatgttagacttactagacaaagatttttttattttttataggtggggtcttgcgaagttacccagggtggtcttgaactcctggcctcagcctcaacctcagtctcagcctcccaaagtgctgggattataggcacgagcgaccatgcctggcctagagaaggatttaattcagctatttaaaatatgtt

SEQ ID NO: 18357 - DNA, 2300 bp, Homo sapien
ttattgtgttgcagaggttgtggggggccttttctgagtcctccaaaaggatggctttattggggccatattaagactatgaaaacagaagagggtttcatggatacaagaagtctgtgagttgggggtacaatgtatagagttttagattaaaactgcatccaataagttggcctgagacatctttcaaacctataaaggaacaatcacaagtgactagtagtattcctttgggtccagtggaagcctctgatcttcatatggaatggacccggaaccgtaacccagcattttgttgtatagcaaccttacctctgccacaaaggtgtttcttttgtttattttgaggccgggtctcgctctgttacacaggctgagtgcagtggtgcaatcttggctcactgcagcctctgtctcctgtgctcaagtgatcctcccacctcagcctcctgagtacctagaactacaggtgtgtgccaccacacctggctaatttttgtatattttgtagaaatggggtttcaccatgttgtccaggctggtctcgaactcctgggcacaagcaaccctctctctttggcctcccaaagtgctgggattacaggcatgagcccaaaatttttggtattctttttctgcccccaagtttttattttaaacattttctttttttcctttaagccttaggatggctgggaaacattttcaaatggtataatgaacacctgtataactttcatctggaatcagtagttgctaatactttgccacattagctttccgtgtgtgtatgtctatacattttctggacaaaaccatttgagagtcagttgcagacataatgacccttcaccattgaagacttcagtgtgcagcccctaagaaccaaggcattctctgacataaccagaggactatcatcactcaatggaacttcatattatcattgtctactatgcggtccgtatacacattttcacaattgtcccaatcataacatggcttaaaaaattcacaatccaatcaaacatcagacattacacttagtacatgattctttagtctccttcaatctagaactgttcccaggattgttttaaagtatactgacaaatctttgagactgtaaatgacctgaggtatacttgagaataatttttcaatacacatgaaagatcattacacatgagccaagactcaaatgagctggcctacttactttgtacataaatgtgtaaactcctgaagacttccaataatgaactcccataagacatttagttcaatgtctttatggccttggtgacaaatcattacagaggatgagagcatttttcctatccaataatggtcaagaaaaaagcagacagatcctcactatcttagagaactaagtgagaaagctggtcgatgaaggggacttcatccagagaggaagggatccagctgatggggaagatgctgcaggaggctgaggaaagtgaggctagagcagtaaaagagatctgacaacctggtcaagataagaaagtgacctgacaaaaatgaacggagcagagtgctaaatgaagggccctttccatgctaatcttgcaaaatgccctcaaccagccctagcataactgagtctctatttagcttgccatattgtgggggctggtggcacaattgaagttgcagtaaattgtgtaacaaactcacaatagggccccgcaggcatacatatacatatatacacgtacatatatataaatatatatatattttagacagggtcttgctctgtcacccaagctggagtgcagtggtgccatcttggctcactgcaacctccacctcctgggttcaagtgatcctcctgactcaggttccctagtagctgggactacaggcgtgtgccaccacacctggctgatttatatatatatctatatctatatatatatcctgcaaagaaggccaggcacggtgtctcatgcctgtaatctcagcactctgggaggtgaggcaggaggatcacttgagaccaggagtccgagaccagcctggggaacatactgagacctcatttctacaaaaaaataaaaaataaaaaagatacatcacatatgcaaattaactcaaaatggatcatagacctaaatgtgtatcatttctgggagaagacataggagaaaatcttttagacgctggattagacaacaggttcttaaagatttcttaggtaagaaacaaaaaatcacaagccatttaagaaaaaaatgctaacttaaagctggtcaaaattaaaaacttctgct

SEQ ID NO: 18358 - DNA, 2300 bp, Homo sapien
ccaggtctctccattgtaattattttgctggctacagtggctcccacttgtaatcccagcactttggaaggccgaggtgggaggattgcttgagcccaggagttctacaccagcctgagcaacatggggaaactctgtcactactgaaaatacaaaagtacaaaaaaaaaaaaaaaattagctgggcatggtggtgcaagcctatactcccagctactcaggaggctgaatttggaggatcccttgagcccaggggggttgaggctgcattgaggtataattttgccactgtatttcagcctgggtgacaaaataaaaataaaaataaaaaataataattttccccttggtaattaataaataatctgtgggttgttactttgagttcagtgaagatcctgttctcaaatgttttttcacccaaatgtgcatcaatgataatccttgtctgaatgaatttgtattacactgacggttgcaaagtgacacttttaaaaattctgtcattccttctacatttactagctggcattatttcattgaagaagaactcctcctctttctttttcaatatcactcttcgtggattcttctttatattaaatatgtggtaacttattgttgttattcttttgaatgctcaaattgtccagatttgaccaatgcagtctttgttattttttaactccgcaatccaggttaaactaagctatttttaatgcccagagtaatttataatatttcccactcccaacaggaattgagaaagggactccagaagttgggggcttattcagacttcttaaaagtctaccttcttcctctgtactttcagcccaaagtgagacttttgaattgggaagagatacttctgaaactactaatcactgtcacccaattctaatcccaaccatctttattctaggcataccatactcactgccatgcttacccttcagttgggcacttttgtcctccttcctattggccttctggttcctacccaactgtccagtccataggcttcaatgacacctttttcccacacctgtggtagcgttggctgcctcctttacctactcaagtaaccgctttaccgctaatttattgctctctgttttcatctataggatcttacctagccatatggcctgctgcctctgccaatttaaaaacagcattgaggctgtctgcaagacagtcaagctgcattgcaacagtgcatgtctgacaaacaccacacattgtcgtgagtccaaattgcgcggtgataaattgttacattaagtatttgtttttaaactttttatttttaatgatgataaaattttaagctaatgacataattgctttatttttatttactcattcagagttaaactccctcaatttccgaactactcccttgctgaaagtcaggttctcagttactattacaaaatttaataatagaactgttccatatgcagaaaggaccaagacaaaggaatgggaaggctagggaataacattaacatccacacactgtatactgtgctctctgcttgatgctttgcccacagtgataatttcttcatatagtgcaatgtagtttgtaagctggttttaaatccatgagatctcaagtactctctgccttataggacagatgtagatacggttttggtctttctgtttttacagttttataagagtacaagtgatgctgttttatttgaagcctgagagcttctggttccataaccagaaattgctacctggctcttctaatggaatggagggcttttccattcttagaccatccaactctgaacttgctccgaatctcaaacctttctgttcacagaacaaacgctcaagggctttcaagagtgtttctgtagattaggcttattagcatcaacttcatgacttctaaaatgtgactgctttcatgtccagatagcttgaatacaggtatctaccagtgatatggggtggagaattaataatgcttggttacataaagtcagtgttgcttatttttcaaaactttttttttttttttttttttttaccaattatgttattcccttctccccaagaagtgggcagaaaagctttgttaacctccttttacagatgaggaaaaacaagatcagaggtgctaagtgctgtagcctagtgccaggtcttctggccccaattctgggttctccccaagcccatgtttcttcccctttctcacaatctttacttcttcctctgaccctcaccaccacccaaagtacttttaattccagaaaagaaacccagctgca

SEQ ID NO: 18359 - DNA, 2300 bp, Homo sapien
ctgttttcatctataggatcttacctagccatatggcctgctgcctctgccaatttaaaaacagcattgaggctgtctgcaagacagtcaagctgcattgcaacagtgcatgtctgacaaacaccacacattgtcgtgagtccaaattgcgcggtgataaattgttacattaagtatttgtttttaaactttttatttttaatgatgataaaattttaagctaatgacataattgctttatttttatttactcattcagagttaaactccctcaatttccgaactactcccttgctgaaagtcaggttctcagttactattacaaaatttaataatagaactgttccatatgcagaaaggaccaagacaaaggaatgggaaggctagggaataacattaacatccacacactgtatactgtgctctctgcttgatgctttgcccacagtgataatttcttcatatagtgcaatgtagtttgtaagctggttttaaatccatgagatctcaagtactctctgccttataggacagatgtagatacggttttggtctttctgtttttacagttttataagagtacaagtgatgctgttttatttgaagcctgagagcttctggttccataaccagaaattgctacctggctcttctaatggaatggagggcttttccattcttagaccatccaactctgaacttgctccgaatctcaaacctttctgttcacagaacaaacgctcaagggctttcaagagtgtttctgtagattaggcttattagcatcaacttcatgacttctaaaatgtgactgctttcatgtccagatagcttgaatacaggtatctaccagtgatatggggtggagaattaataatgcttggttacataaagtcagtgttgcttatttttcaaaactttttttttttttttttttttttaccaattatgttattcccttctccccaagaagtgggcagaaaagctttgttaacctccttttacagatgaggaaaaacaagatcagaggtgctaagtgctgtagcctagtgccaggtcttctggccccaattctgggttctccccaagcccatgtttcttcccctttctcacaatctttacttcttcctctgaccctcaccaccacccaaagtacttttaattccagaaaagaaacccagctgcacactggcacacctgaccttcatgcagtcagaagctttggatgattccccatccaaaatattagagatgaaatgaaagcaaagtaggcatctgacaaaagttgctttttcccttctgcattttaggacctcaagtaatgtttatccagaaactgctatcataccagggattcattgtgtatttaacaacataggcatacaatctggcaaatttgaaaaactcttaacatacaccccaaatccctgcccaaatttaagaactagggtggacacagtgcgtttttccatgtcgcatcttctgtgatggggctacgatacgtgggagcagagaatggggagggtggagcgcatgccagatgaggatctatcagcaatgggacggggcctccactttagcatctccaccctgctcctctcagaggaccgcctttcattgcattcagctgtgatggtagcacgaacacaggtgcaccgaggacgaggagagcaggagccttgtgctctctctgcatctgaggcaggacagcacagggtacggagcagtctgcagagaggccagctcatcagggaagcacttgtcttccaccttgggctttgactgagcactgggcaattggcctctggggatcaacgaaataatcctaaacagagttactctatgtcacactatggaatgttccaagtaggtggccgtgttttcaaaagatgtattttctccttttgttgttgccatttcataggtttaggattgggtgtgtgtttctcctctctgaatggcactcgaatgtttgctgactcctactctgtgtgactggggtgtacagctatggactgatgcatcccatcccatcatctttcatgatcaaagcagtctcttcttttttgacagctgaagaagcatcggtagggaatccagaaggagcgttcatgaaggtgttacaagcccggaagaactacacaagcactgagctgattgttgagccagaggagccctcagacagcagtggcatcaacttgtcaggctttgggagtgagcagctagacaccaatgacgagagtgattttatcagtacactaagttacatcttgccttatttctcagcggtaaacctagat

SEQ ID NO: 18360 - DNA, 2300 bp, Homo sapien
cacgatcacagctcactgtagcctcaacctcctgggctccagtgatccgcccacctcagcctcttgagtagctgagactacaggtgcatactaccacacctggctatttttttttttaatttttaataaagacaaggtctcactatgctgcccaggttggcctcccaatgtgttgggattacaagtgtgagccaccatgcctggccccatgtaatttaagtcatcactaataaaatgtatacatattgtacattgttgacagttgttatattgtactttctgtttgtatttttattggttttttttttcttcaaatattcagcctgatctagttgaatctgaagatgtggacctgctgatgaagagggctgactgtatctaacttagggtcttgcatgcagctggcacttaatacattttattgactgttttagataacattcaacagataattcctaataaaaactcttaaaagtaggagaaaaaggaaacctgagtccttcctctgaagtggcaggaaaaccagcctgggcaacatagcaagaccttgtctctacgaacacattttttaaattagctgcctgcctgtagtcccagccactcaggaagctgaggcaggaggatcccttaagcccaggagtttgatgttacagtgagctaggtcacaccattgctctccagcctgggtgacaacaaggccctgagaagggaaaaaaaaggaaaggaaaggaaaggaaaaaggaaaagggaaaggaaggaaagagtagaagtattggaaaggaagagacaaaactatcattatttgcatattaaatgataaatgttagccaaagaagcctaagagaatcaactaagattttactggaagtaatgagaattcaatacagtggctatctacaaaatcaagaaatcagcacacaaacctcaaatacttttcccatgtaccaccaataactaattagaaaatggaagaaagatcccatttacaatggcaatacaaatgtatgaagaatttaggaacaaaaatacaaagatcttttatctaacaaaagatgtataagatctatatatggaaacactaaagctcttctgaaagacattaacaagaaatgaatacatgacatgagatagcacgttcctagaatgtcgtacagatgtaaattctcaaattaatctacaaatttaacgtaatcctattcaaatcccaagatagtttttggtggtggctgtttttaagacagggcctagctgtgttgcccaggctagagtgcagtggtacgaccacagctcactgcatcctcgacctcccaggctcaagcgatcctcccacttcagcctctgaagtctctcatatggtgtccaagaaatggtgacaaatctcacaaagggactaggctcagcagggctggaatattcagggaaggtgtcaagaagaaagatgaacttgagttggcttttgagagatgcataggactcccacaggcagagtgaaataagggcattttagatggacaaacacacagacaaaagcagaaatgtgggtggtgtgactggggtttggtgaggggctgctgtggctggaatggagggctgccacaataatggaaatggtaaatgaggcaagtaaggttggactggtggcatagcgtcaaggttgccagctttattaaatcactcttccaatatgctagcactggcctgttgggaaaagtaatacatcatgtaatcgaacaaaagacagaggcaagctccaggaatgggcactgtaaacaggacttgtcccagagtagccagatgtaggctttaggtaagttgatgcaagctgagcatctctaatctgagggggaatgtctcacatggtgtccaagaaatggtgacacatctcacagagggtctaggctcaggagggctagagtatgagacgttccccctcaccagtgaacttaaaaatgtggccaaaaatttttgtaaaagatggctactctgtagtgctttaactggacctatttagacaatgccttacacactggaggacgatactgtgtaaatctaataagtctacaagacaatacgtatgtcttttggctctctccttcctctccagggtgatgacaactccgtgagggtggagattatacctctctcatcatttcagcaacaaggaaataaattagtggcagagtaagggtgacttgatgagtacatccaattgttgacatagttttgggtgggagaaattttcgacttcttaaaatagtctagtgggattcacatggtttcaattcacagagatctgaaag

SEQ ID NO: 18361 - DNA, 2300 bp, Homo sapien
gcctcccatccccaggcgccgggcctctcccaccctcagcgccctgctcacctccagctgaagatgccagggcacctctgcttcctccctgccctctctgcagtaccgccgagtgtgcataaaagggtttaatataggctttgccgggcgcggggactcccacctgtaatcccagtacgttgagagaccaaggcgggaggatcacttgaggccaggagttcaaaaccagcctgggcaacaaagtgaggcccgtctctgaaaaaaaaaaaaaaaaaaaaaaaagaataaaagaggtccctttttctgggagattgatataggggagtgtgagttagaagggaggcatcgaggatcagtcatttaaagcagcatccaagggtgttcaaggctagagatccacaggtgtattttcagaaactgaatttcctggcggggcacagtgactcatgcctgtaatcccagcactttgggaggccaaggtgagcggatcacttgaggtcaggagttcaagactagcctggccaacatggtgaaactgtttttagaaaaaaaaaaaaaaaaaaaattggccgggcatggtggtgggtgcctgtaatcccagctattcgggaggctgaggcaggagaatcacttgaacctggaaggcagaggttgcagtcaaccgagatcacgctgctgcactccagcctgggtgacagagactgtctccaaaaacaaacaaacaaacaaaacacaaaaaaaaccccaaaacccaaaacaagccaggcgcggtagctcgcacctgtaatctcagccctttgggaggccagggcgggtggattacctgaggtcaggagttcgagaccagcctgaccaacatggtgaaaccccatctctactaaaaatacaaaaattagccgggcatggtggtgcatgcctgtaaccccagctactagggaggctgaggcaggagacttgcttgaacccaggaggcggaggatgcagtgagctgagatcgtgccattgcattccagactgagcaacaagagcaaaactccaccttaaaagaaaaaaaaacaaacaaaactcctgaatttccctgtggatatcttttctctggcagcctttttcaatgagggctaagttttctccaatactatatggcctgcagaccgctcagctttcattccagtgaaaacattccagaaaaaactctgaatcaatcccaggtgtttctccaatcagctcaggatgattgtgtgttacctgctgcccagccagtgacacctctccaggcctctgacttagctaggtctccaccatgtgactccaccatagactccccaccttcttcttttgcaaagcctcagacacccaaacacctaccaaaagtgggtagggcaccaggacactccaagtgtaagtggggctctccagcacacctggatgtggaggtgtgatgcagagtggtggctgctcgtgacactcatttcacccctttctgtgcaggtgccagaagcccaggaagcacacatcaaggctcacttgccagcggggtgctgccaataaaatgtagtcacgtggaatttggaatgtggaaaggaggtagaagtcatcctttcctcccccatagcagcaggtgtgcaggctctggtggtcagctggactccatactcccccaccagtcaccagcctggggaccgtggggctgcaaggacctcagcagcggtttcccaagtttcctgacttcttccatcctctggaaatcagctgtggtaaagtagcctgaaagccagtggtgcaaccccatccccacaaccttcaccacctctagcacctccagtgataagcactaattgcctatatacaacccttttttgtttgaaatatctagagtaatttctgttttcctatctggggtagtgtaacataagaagaaatatatatttggtctctgcccccagttcctaacacaaagctcctaaaacccttggaaattcctgaatgatggcggtgctaagagcattgtcctttgttaatttatcatttttcttttctcctaggtgttttttcctttttaaacttttcttttaggttagggggtacatatgcacgttcgttatatagctaaacttgtgtcatgggggtttgttgtacagattatttcatcacccaggtaccaagcctagtacccaatagttttttctgctcctctccctcctcccaccctccaccctcaggtagggcccagtgtctgttgtttatgagttctcatcattttgctcccacttaaaagaacatacagtatttggttttctgtt

SEQ ID NO: 18362 - DNA, 2300 bp, Homo sapien; identical to SEQ ID NO: 18344

SEQ ID NO: 18363 - DNA, 2300 bp, Homo sapien
tctctctgtctctctcttcctcttttctttcttttctttcttggatgttattctgtcatccaggctggggtgcggtggtgtgatctcagctcactgcaatgtttgcttcaagcagttctcctgtctcagcctcccaagtagctgggactgtaggcacacggcaccaatgcctggctaatctttgtgtttttttgtagagacagggtttcaccatgttgcccaggctggtctcaaactcctgagctcaaagcaatctgcccacctcagcctcccaaagtgctggggttacaggtgtgagctactgtgctcggcttattctttcttttttttttaatttttaattttattttttggggcgattattctttcttttttaagtttgaaaatattccaatcaaacataaatgtgtagagaaatgacgtgaccacactatgtgtttttaagctattgctttgtttagaagatggtgaccggatggagagagggagagtggctgaggtgaaattagttatatggtttcaggaattgaggctagaaatgatggtctgttgggttagggtgactattagttgttgaaggggttgaattgataaggtgtggtagtagggttctaggggtgcgagcatcggatgtttccagggcacctctcaggctatcagcttgtggaacgaagtcaatgatgggataactagcagaggaggaggttgggggtagggaccttaaattccatttttgactgatcaccttgttttggggccttgaagacatttgccaaagctgttagattatgagcctgaagctcaggagagagggctaggttgggggatataaatctcagagttagtacagagataggaatgaagtcgtgggagtgagtgagattgcctagggaggggtgcagaaagaggagagtggatggggccagtgagagccagggcgactcccatcattgcaggatcagttaaacgtggctgagttcactaaggagactgagacagtacagccatagagatagaaggaaaagggaagctggggaagggtgtcaaggagggagtgagcagtagcgtcagatagaagatcaaattatggaagaactgagaaggcctgtgttagatttattgacctggtgatcactgctgaccttactgaaaaccagctacccaatggtggagcagagctaaggtgctgttgcgtgagaggaccgaagaaagcttagtggacaggttgcttgacctcaggagttttagaccaatctgagcaacatagtgagaccctgtgtctacaaaaaattttttaaatttagctaggtatggtggctcatgcttatagttctagctgcttgggaggctgaagcaggaggatcccttgagcacaggagtttgaggctgcagtgagctatgattgtacctctgtgctccagcctggccaacacagcaaggccctgtctcttaaaaaaaaaaaaagcaaatagagggtgaagatgtgaaggaagagagtgcgatgaagatgtggggatcaaggaaaggtttgttttgttgtttttaaagatgtaaaaggcttaagcatgccaaggtgaacagattggagatattcagatatgggagagaataggaatagtaaaaagttccagacagtctgggtagggtggatctggctcatagagggagggagttggtggaagagagttaccttcttctgttgttccaagagggaggaagaaaagcatgggtaaagatgtagactggcttttacactgtatggtggaagtggaagtcattcccatcggcggcttctctgctctgaagtacactgtgatagtctcctgctgagagaaagggcaggtgcgtggctagagattggagagtagagaaggtttgagacacctgtcctgatgaatgggcgagggggccagcacattctgtttgaaggctatagatctttgactagcaggctgctttgtaaattaaaagtactgtccgcatgttgaaattattttgaattgttcaaccagcacaaatcataattaaatgttttccccatgtttcatttaggtttctgtgtggagacagtagaatataaaaataacaccttcgctgtctgggatgttggcagccacttcaaaatcagacctctgtggcagcattttttccagaacacaaaaggtaaagattattcggtttgtagcctcgatactgtttctgtgaaatgtctctaaagacggatgcttgaagtgataccttctggtgctctgctctatttacactgtcagccatttcctctcttagggtctctttatact

SEQ ID NO: 18364 - DNA, 2300 bp, Homo sapien
aaaacaacccgttcttgggcaaaacgatcttatgagtctagcgtcagaaattcttactcatggtaagaaccatggagaaacaggtaggaggtggtctagcacgtggagtgatgttcagtgagttagcagctgcagggaagtgggtcaaagtacacttgtgcaccctggataacagctaactatatataatgctgcctaaagcctggcttgtaactctccttaatcctgtgagggcagtttccattctgtatttgcttaaaaagattaaggtggccaggctcggtggctcatgcctgtaatcccagcactttgcgaggctgaggtgggtggatcacttgaagccaggagttcaagaccagcctggccaacatggtgaaaccctgtctctactaaaaatacaaaaattaggcaggcgcagtggcacatgcctgtaatgccagctacttgtgaggctgaggcaggaggatcacttgaacctgggaagcaaaggttgcagcgagccgagatcgcaccactgcactccagcctgggcgacagtgagaccctgtctcaaaaaaaaaaaaaaaaggaaaaagaaagaaaaagattaaggtgtgggagtgggacagacccaggctacttaatatttttctgtaaaacagcagggataatagtttcttttctttctttttttttgagacagggtcttgctttatcgtctaggctggagtgcagtggcacgatgttggctcactgcaacctctgcctctcaggttcaggcaattctcctgtctcagcctcccaagtagctgggattacaggcgtgtgccaccacgcccggctaattttatatttttagtagagatggggtttctccatgttggtcaggctggtctcgaactcccaacctcaggtgatctgctcgcctcggcctcccagtgtgctggaattacaggtgtgagccaccacgtctggccagggataatagtttgtaattcactgggcgttacggtcctgcaggtaacattgtttttcttatttatttatttatttatttagtcaattctagcagtatcttctaactttttttgttcgtgttttttgagacagggtctcgctttgtcacccaggctggagtgcagtggcgtgatcacggctctctgcagcctctacctcctgggctcaagtgatcctcctgcctcagcctcccgagtagctgggactacagccgctaccatgcccggctaattttaaatttgtttttttttgcagagatggggttttgccatgttgctcaggctggtctcgaactcctagctcaaagccttggccttccaggcgtgagctaccgcgccgggcctgctgaagttcttgatatagtttctggcacatagtatatgtttaatagatgtttgttgttctgatgatttcagttatgtaccatttacaggcgtttgtaacctttttagctaacaagttgggcatttagggaactgactatagaaagcatttctcggaaacgaggactggttctgcgacgtcttaacgaggtgcgggtggccagtattttccccaacttgaaaatctgtgtagaggtgggagggcagtctagcctcaggcggaataggaaaacttccttatgcctaatttcagtgtcagtgtgtggtatttcctacgcggaacaccgccccaaactaatgtctacgtttaactcaaccgcggtaaatttccttccatggcactattaacttggcccggcccacatgtcccctcccggttggtgtgaacgctccgaggttagctcaaacctcggcgattttcccagctgattggccgtgcaaatagacaatccttttgcttttctgattggtcgcacatggcatcgggggtgggggacgtgggcgtgtctcgccagaattcgtttaactgtgatttgaagatgaacatggtattgccagagcttcatggcgtcgcctacggcgctccctccctcccaggcccttactcttctttgcgttggccagatatgtcgtcactcacaaaacttcgagctcattggtgcaaaagctccaggaggcggtgggtgattggttggttgctgttcctgcccccacgcctgtcgtggtttagctgaactgagctgaaatcctaaaggccgcggagtcggcggtgttgtaggtagcggtaccttgagtggcaacaggtgagtctccggctgcagggatggggcggcagcactcaagacctggctggatctccacttcgtctgcgggccagaaactggagggcggcggtggctttcggaaagggattgggctccg

SEQ ID NO: 18365 - DNA, 2300 bp, Homo sapien
agaaccaatgtcatcttctggatctggtaattatttggacaaaatctctttgattctaggttcaaagtcaaggtgtcaaaaaaaaaaaaaaggatacaactgttaagcttatttaattatacctctcactgtacaaataaggaaactaggccaggcgtggtggctcacttctgtaatcccagcactttgggaggacaaggccagtggatcacctgaggtcaagagttcgagaccagcctggacaacatggcaaaaccctgtctctactaaaaatacaaaaattagctgggtgtggtggcaggcgcctgtaataccagcgacttgggaggctgagacaggagaatagctagaacccgggaggcggaggttgcagtgagccgagatcatgccactgtgctccagcctgggtgacagagtaagactgcgtctcaaaaacaaacaaacaaaaacaaataaggaaactgggctcagagagatgaaggtacacaggtgatgggtagatagggacaaagaaaagaacctaaccctttggactccccaagccattctaatatttgtttttgtaagttagtagcttctgcacgttagtatgtcagaactcaactagtttcctatctttcctgataacctctccgacccacccatgatttagctaacatctgatttggtcaaccaagcaccctggtcctcaggttcagtgtgagacttaatgaaataggcgtgaatttttttttttttttttttttttttagacggagtctcgctctgttgcccagcctcgcaatctcaactcacttcaacctctgcctccggggttcaagcgattctcccacctcagcctcctgagtagctgagatcacaggcgcccgccaccacgcccggctaatttttgtatttttagtagagacggggtttcactatattggccaggccggtctggaactcctgaccttaggtgatccacccaaagtgcttggattacaggcatgagccaccgcgcctggctggcatgaattttttcttctgtccctagttcatcttcaggtcactgtctgattttattagttctcaaatttaaatcactatgcatgctcagctcttctagttatttcccttctttcctcatgttgggaaaaaaaccccgatttattctaattgtgagaaatgaaagcgaacaaatcctatcattccctattgtcttgtgcaaatatgaagagagatatgatagtggggtaaataaaagcatcagggaatccattcggcagaatctttctcctctcagcgtgcttgcagttagatattctgagattccagtggagaaatggtatggtggaaacattgaggttcaacaaggctcaatttagggcatattttattcagattctaccatatatattgtctaaaatgaaacaacactggggaatgaaaaggttggtcgaagatgcaagttgcctttattaaataaagacaaatatttaataaaaataatgtataaaaataatcacaattcactttcaaatctgaaaatactgagttttccaggctacacataaataaaactgccaacgatgacaattccagcaactaggaaaacaagtacgcctacaaagaaaagtgagaaaattcatggagaatttgaactcagaaccaactcctcggagctgatcttttttgggggaagccagggaacgcgccgggcgctctcatcagcaagaccatgtttaaagagagtgtggaagcacagaccaaaatggacattcgagggcgaacagcagctggcaaagggataagtgatccgaagcattaaagcccttgagacaaattccggcgcgaaccgccagtgggggatgagactcgcaggcgcagccctccaggccccggcggactgacacgcacgttggaaacggagtcacccaccacagccccgcagctccagccaaaatggcgccgccgctctgcccaccccgcgcaccccaggcggccgccgagcccgcgcgcgcgccctgtggagcgaggacgccggggacgcggccagggacgcgcgcgtcctcacggcggttgcacgcctgcgcgagggcgggcggcgggggcgcgcgcgcggcgggggcgggctttgccgagcgcagagctgcagccgccgagccggacgtgtccgcgaagatggcgggccgggtgagtgccggtctgggagcccaggcttgaggcaggggcgccgggctcgcgggcactctggggtccaggcggccccagaggagtgggagtgaatccgagcaatggggcgcgaggccagagcgggactt

SEQ ID NO: 18366 - DNA, 2300 bp, Homo sapien
aaaattagccgggcgtggtggtgcatgcctgtaatcccagctactcaggaggctgaggcaggagaattgcttgaacctgggaggtggaggttgcagtgagccgagatcgtgccattgcatgccagcctgggcaacaagagcaaaactccatctcaaaaaaaaaaaaaaagctgtcagagaaaaaagatattaccttcaacaagtatttggctgtcagctgttttcctgtctataataatgaaagccataagacagggagtaatattttccatatgcttagagaaaataattgtcaaccaagaattgtatatcttgtgaagaatgggggcaaaattagacactttaaaacagacaaacactcaatgttgtaaccatcaaaccttccctactagtggaaattcagatcaatttcctgaaggctaaaaaaaaaaaaaaaaagtgaccactgatgtaaagtctgagatttaagaaggattgaagagtaaagaataatggtaaatctgtggatatattgaaataaatattggctttataaaatgatgtatgcggaggttttaaaaatagaactaaataggccaggtgtggtggctcacgcctgtaatcccagcactttgggaggctgaggtgggcggatcacctgaggttatgagttggagatcagcctgaccaacatggagaaacctcgtctctactaaaaatacaaaaaaaaaaaaaaaaaaaaaaaaaaaaaaaaaattagccgggtgtggtggcgcatgcctgtaatcccagctactcaggaggctgaggtaggagaattgcttgaacctgggaggcagaggttgcagtgagccgaaatcacgccattgcactccagcctgggcaacaagagcaaaactccgtctcaaaaaaaaaaaaaagaactaaatatatgataacaacatccaaatcaaaagagtggttaaagtattttatgatctttatactgttgaagagaaaggtaaagctattcaattaactttagattttgataggtatgtgtattagtattttcagagtaactactaaaataatataaatattaggaataatttatagcagaaaaaacaatttttaaaaggcaaggaagaagtgaaaaacatagaaaaggtcagataaagaggaaacaataaaatatagaaatcaaatcaaatatatggtagactaaatgcttcattcagacaaagaatgtcagattggattatttaaaagcaagcaggccgggtgcagtggctcacgcctgtaatccgagcactttgagaggctgagacgggtggatcacttgagatcaggagttcgagaccaccctggccaacacggccagctggccatggccagctaatacaaaaattagctgggtgtggtggtgcacacctgtaatcccaggtacttgggaaggtgaggcaggagaatcacttgaacccaggaggcggagattgccgtaagccaagatcatgccaccgtactccagcctgggcaacagggtgagactctgtttcaaaaataaataaataaataaataaataaaagcaagcaaacaaacttactgaaacaacacaaaatccagctataattttcaagagagatagctaatacatatgaatgtagaaagatagaaagcaaaaggatggaaaaagtctatcaggcaaactctaaccaaaagggaggtaaactaactatattagcatcagacaatatgatctttcagacaaaagagacagctagagataggtccctcaacaatgagaaaaggtttatttatccataaaggtaaaaacaattccaaacttgtgtgaacctaataattgcctcaatatacaaagaacaaaatgacacaattataagatgaaatagacaaatctaccatggtgaggagtttcaaaactccctaattgaaaaattaaaaagacaaaatggttacagctgaaaattaaaattaaaaattcattttctcggttgcaatagccatttttcaagggcttactagtgacatgtgacaatggctgctgtattggacagcacagaaagtacttttgcactgcattaatttagaagacttaatataattaacaatattaataattgagtattgaacaccacatccaaggtgcagatctctgaataatatctgatcataatgtgggcaagttagaaattaatgacaagaaaaggcagaaacatgggagacaggtgaagatttcttaaacagaatataaaaagcactagatacaaaggaaaaaagtgattaattggatttcatcaaaagacactgacttagtttg

SEQ ID NO: 18367 - DNA, 2300 bp, Homo sapien
ctttagttacataatataacgaaacaaacattaaacctactgcttctgggacagtcttctcaccaaaactcagggaaaatgggagggtgttgccactgactgacttaatgaaagtatctgacaaatgtaaggtctttcaaatagtgagataagaaatgtatataaattatttgatcgactacttactttctatctatacacacacactatcagtatataatgtgtattttcattttatagctattaaatatgaggttctagaatgagttttcagtttgcagaattctgagaatctagttccaacacctttgagaggacaacaaccacaattgcacttgccatatttattagtcaaaatgaagcgaagtcaatctgttgaaagctttgttttgtttttctgattagtttgtttaataagacattcaaattatgatctttaatataatttcttcccctaatagcttggtgctaacagtggtttgcacatcatcatctttgatgaaattgatgccatctgcaagcagagagggagcatggctggtagcacgggagttcatgacactgttgtcaaccagttgctgtccaaaattgatggcgtggagcagctaaacaacatcctagtcattggtatgtttactttttaaaaaagtactattcattcaaaaacgttagccataagttctgaattaagatgtgtgtaggttgtgattaaactgttttgccagtgtttccaaattagaatccagtgatattgaagaatctattgtaatgcctaggcttaataggaaaaataaaagatggatttcagtcacttgtaggtttaagcttatagctcacccacaggtgaaaaagatgtaggttgaagcttatagctcacccaaaaatgaaaaatacacatgaaacaatggaatgcagtggttttcaaactgggtcttgcaggccttcgggggtcctcagaggtgctttcagggtcagtgagggccagggagtgcgtttcagatcctacatcactattataacttcctcttttagctgttttatgtactgaggtgcttctgaagatgacttctgggggaaaaaaaaaaaaaacaccctgctgttttatgaagtctgaaaaccactggcctgtaaaaaagagaaggaactttggagtcagagagatcgtgtcacattgcccctctgtcactttgacagattatttaccctttgaatcttaaattttctttttaaatactggaagttttcataacatttatattccattggcttatacagtagtgaaatagtaaagcaaagtctccttagcttgttagggaaattactattcttacatatactaaaaggacatttgattttatttttgaactctgatcatttgttgttttgttttaacatctgtgttcaggaatgaccaatagaccagatctgatagatgaggctcttcttagacctggaagactggaagttaaaatggagataggtaaggagatctgtcactgattgggtgtgtggtggggggagtggaggcatttagagttcattaacaggaacaatgtcatatggtgtagtattttttagaaaaggtttatatcatgagaagtagatgtttacatgcttgagtacctataaggaaaacattaggatcataataatctcctctaggctgggcgcagtggctcacacctgtaatcccagcactttgggaggctgaggcaggtggatcacttgaggccagttgttcgagaccagcctggccaagatggtgaaaccccttctctactaaaaatacaaaaaacttagccgagtgtggtggtgtgcacctgtaattccagctactcggaaggctgagataggagaatcgcctgaatccaggaggcagaggttgcagtgagctgagatcgtaccactgcactccagcctgggaaacagagcgagactctgtctcaaaataatagtaataataataatgataatctcctctgatggtgctttcgagactaggaaaatgcctattttatttttaatttcatcaggcttgccagatgagaaaggccgactacagattcttcacatccacacagcaagaatgagagggcatcagttactctctgctgatgtagacattaaagaactggccgtggagaccaagaatttcagtggtgctgaattggagggtctggtgcgagcagcccagtccactgctatgaatagacacataaaggtcaggaaaatcagctaaacagattataaacattatgccagtattctttctctttcctttcaagcatatcaaggggtag

SEQ ID NO: 18368 - DNA, 2300 bp, Homo sapien
tgggcaggactccagcaggcagctctgatcagaaagccacctgggagccctgtgggtgggacaggactccaggtaggacctagcaggcctccatccaagagggaggtatgtggaaagctctccactgccagagccttggtcctgaggctctgcattcatggcaatggtaaccctctttccaggtgaatcagaaacagggcaccccagaatcagcccagccatgaggagcatctctagggatccccatctctgcagcccccaccaggttcaccactcctggtcaggttcacgatttttcttcgccttgcagctccttggtgctctccgcctcccccctgcccctttcttcctcacaccggtggctcagcctccccccgacagttttcttggtttctgtctcagcgtctctctcatctctgagcccctctctctctctcctcctctcggattctccttttcctccccttccttcctctctttcaacctcccctcccaccccctccagtccagcaatgggctgggaacgcagcaggagccatgacaagcccaggcggctctcccgacccttggtgcccccgaggccatttccccgcgctccctgtgccggcagcagccgcgtgcggagagggctcgccgaccagaaggggcagcaggttggagctgtgggtacggggggctcagatcaaaggccaggaatgtctggccccctggcgtaagacttccttcagccatggccctcacctcgtggaacgcccgccgttccaggcctctgtgggactcgggtcggctcattctctgccctttctgccacagttccctacacagcggtccctgctccccaccggcagtgcttccttcaccccagaccggggctgcgcagagtcctggtgcctcaggtggcctgggagggggcctagggaaaggcacccaggtgaccgggcgtgagtccccaaaacctgaccatgatgtcaataccacccagggctgagacctaattcctcgctctggagagggagaggagaggaagcaagcccgaagggggcctggaaggactcctttcctgtggggaggggtgggtaactggaggcatttggtgtccgcacagggcaagggcctttatcgccaaaccccaggctggagctccctatcagtagaaccggggcctcaggcgggacggtcgggcagtgaggggcgctccggagggcagcaaggtcttccaaggacctgggccgccctcggccagagctgcgcgtttcaccggtccctgatggtccaaccgagaatcccactgaggctgtgggtcacgcctccgacccgggccagaggtcgggcctgaacccctcaaggaggagaaagtgacccgactccgagagcaggaaatgcgactggccgctggtgtcagttgcaggaaatgcaaaggcagcaggaggtcccgataccgatctgatccctgacaaaagactcaaatgacactcggctccgtcccccggcgccgcccgcagccagaccttcgagcctccgcggacttttccgcacgttcctcggacacccgggaagtgacctcccgcggccaggacgagaggccagagagcgggcggactcgggaggctggaagctgggagggggtgcgttcccccaccctctgatcctgacctgcccgagcggggcttctggaaacatccctgtgctttctaccctcgattcctcgcgggcccacgtcccaacgggtcacggtccccgccagcaaaggagccacccgttcatgcccacgccaagccctcgccatgtgaacgcccgggtcaaagcccccgcgccctaaccctggccagcgggggaccgcggcggtagcagagggtccggcccaccgcgtccccccgaagccccgcggcgtccggggcgcgggctttgcccaagtttgctgggcgatgcccttcccggagcccgagttgtgggccgggcgggaggggcgcgtgattgacaggctgaactacagactcatctcttaccttaggccgcgggcgctgattggctgctcgctgacatcctcaaacccggctgctccgcgctgggctcgggaggggggcggctgcgggtggaggtgcgcttctgacaagcccgaaagtcatttccaatctcaagtggactttgttccaactattgggggcgtcgctccccctcttcatggtcgcgggcaaacttcctcctcggcgcctcttctaatggagccccacctgctcgggctgctcctcggcctcctgctcggtggcaccagggtcctcgctggctacccaatttggtgg

SEQ ID NO: 18369 - DNA, 2300 bp, Homo sapien
tgggacaacagagctgagggcttgcagtcagggtgcgctgtaagtgcctgaccatacagtctgtgtggtcagggcatcttggttggccagagaccctgtgggtgagcgaggctagagctggcagaaccccagaattgcacccggaagccacctggctatgagctgagattacccccagcatctgctctgcctcaaggtaccagataggtgatctggggtggcccatccagccttaagagtgggttggatgacagaggaggccagcactaggcccctgtgactcggatactcacgttggagggagaggtggaggacgaagcgtaactgtcttccagttgtccagaaaggctgggcaaggtcctgggtcaccttctctgttctaggcccatcagaggctttcttcagggtctaggagaagagggggagggccccagagtggcggggtcaagttcagacacccctgagcactgctctggaggcaggcaggtcaggcccaaaaggtgcgtgggcctcagggagccacttgttcccctccgggtcccctccagtgaagagccacagaggaggggactgggaaaccagggttccagcttcagctttctcctgactggctgtgtgtccccggacaaggcactcaccccctctgggtctcagtgtccctgcaggttgaaactgccaaatgaagagttctttgggtcctgtatgcattgagtgaatgctctgcttccccgtgatccctgaggccaacaccctttgtgttcctgtgccctttcagggcagaccaggacactgtgccagagctggctgcaggcctctggctagagctaccccagccttcagcagaggcttgtcctcctaggtgaagggttgtccatgcccagcctcgtgaggcccgcgtggttttgggcagtgcccagtggcactattggcaggctccaggcactaaaggaagagaccgagaccctgaaaggtgggggaggaagacagagaaggaagaggtgcctgcagagggggtgctggtggctgcccctcacaaacgtgccaaaggttgccaacttgagtttaagccttggttccagaacacaaagcctcctctctgggggccttgacccctcggagcccccaccccgggccggctgagctgcccggagggaactagccccagaagggcctggttgttggctgcgaagtggctgggagggaagttttaatgatacacaacacaagacacaggggggaaaagagagaggggggtggtggaggagagaagggaggttggggggagaaagaaagacctcctgccaggcctgttgccaggaaacggccaggcagccagaatcagccctgctcttttcacagttggctttaagcaccgagagaaagcccgggccataaagggggacatgtgttgctgggtgtgtaaggctagcctctgcagttaggggagcccctgcccccgcccctgccgctgcaccgagagccccttgagcccccagccctgcctccacgcctggggattatggatgaacgattgagctgccgagcaatggaaaaggcaggggtggccctggccttccaatgtcgcagccactttgggggtgaaactcaccagttgggtccccaggaagctggcaggggctggcagggcagggagatctgggattccaacatggcacgtccacagaaaagtattcctattggctctgcgtggtccatccaggttaggggggtgaggtgtctggacttctaggaatcctcaacagggcactcagaagggagctgacaagtcccagaaacctgcattctggctcctggttcttgtcacggatgccatggtgggaacaggcccctttaggctgtgccttggcacttggggactgtccctgcagcgcagtgactgctgtgtccctgaagagtccaccacacagccaggaaagagcaaaaagagggggagggttgttgacaaaacgagctcatggccctggctgccaatccagagtgatgtcagctgaggagtgacatggtgctctcagcacagaggacgtcagcaaaccgggaagcagcatgtgcgtggaagctgggcctgagccctgacgcttcagctgagctccctgggtgatggctccttccacaagttctaacgtcccactgaaagcaagctgcaatttctgttgcttcttgtatcaattgcatgaaaggacgggcagtttcttttgatcctctggcatgccaaggcctgaatgccagtcctgggagccttaccagccctctaagaagaatcagaaggtgagtgttaggga

SEQ ID NO: 18370 - DNA, 2300 bp, Homo sapien
ccaccccagtccatggctcttccttctctctgactcacactggtccagctcaggcccctcatcctctagcttctgtgatcgtggttcaaaatcttaccagtgatatgctggagctgggtccagctggcctgcagggctagctgtgcacatctcttcctaactccagtgatcagaaacgatgccacattggtggcatgaagtcagccatgatgggaatatttaaggcacagagatcaacagatgatacaaatcagaccaccatcaaccctccttgagaaccagttgtaaacaccatcacaccccagtcctgcctgcaggtataacgatcactgatattaggtgccggcacctgctaggcatttaatatctttttttttttgttttgagatggagtcccattctattgcccaggccagagtgcaatggcgtgatttcggctcactgcaacctccacctcccaggttcaagcgattctcttgtctcagcctcctgagtagctgggattacaggcatgcactgccacacccggctaatgtctttgtatttttaggagagacagggttttgccatgttggccaggctggtctcgaattcctgacctcaggtgatcctctcacctcggcctcccaaagtgctgggattacaggcatgagccaacgtgcctggccagcatttaacatcttacctgcacaaaaatcctgttagatatttctcatcatccatatttcatatggggctcataacttacatgatttgactccaggtctctgcacattacattgggccatgtggcctcaataagtagaaccatgggatttgatagggctggcagagctgttaggaatcatcagatcatgtaatcactgcgctcatttgacagagaaactgagctcaaagaggctcaaagaggtgggggcttcctctgttaatgccacctaacacggtagccaccatcttcccaacacctccctcaacacctctctcagccccctaccatgctggtgtccactgaaaagccaaggtcgcagtcacttgatgttccctatgcatggctgattttttggaaactttacatgcagatcttgacattcattgcaagttatattttgttttgcttgatttgaccccgtgttcgagactctcaaaaacattttaaatctcacttgggtcattggttgtatgtctcctttctagacaggtaccacgcgccgctttgatctctgcaccttcgcagcagaaattggggttaaactttaaaaaataataagcaaaacagaactttggggcccaacacttgaagttcccaccctatctaccagagattctggcatctacacaccttggaaagtgggtccctcctcccgcagggctctgtctgccccactgtccactttggatttctgcgctggggaacatcagcagcattttgtcaaaagcccacggaggcccacgctgcgcgcctcgccggtaacagtcactctcccgtttaaaaacagagcgccctttcctctctcccctctgcccaagactctttgcctggcaacagggtcccctgagccattggacatgcatttcccccgcttccagagagcggttctgcaccaggacccggccctgccctgagtctgcgggctgcggcgaagagaccgcacttgcccggcaggagggcggacaatgacccgggttttccaccgactccagatgcgtccctcctcctacccctccaccttctctacctcggagaagccattgcgcttgcctccgccccatcccggagaggcagaatctcctccgtccccgcctcgtaccctcctccccgcctctccaggcccggggggcttcacgttcagccaccgcgaccccgggcgggcgcggcgccaggtgagcgctcacctggggccggagggcggggcaatgggggaggggcgggggcggtccaggggcggctgccccacccgcgacggggcggggcgagggcggtggggccaatggggcggggggctcgccgcccggggctggggagcctcccaatctcctcctttcccagcgccgcctgccccgccccacccgggtttaaagtcccgcgggcgggtggtggcggagctgcgagcttgagcggcgcgaggagatgctagagggcgcagcgccgccagcaccatgcgccccccgcccgcgctggccctggccgggctctgcctgctggcgctgcccgccgccgccgcctcctacttcgggtcagtgcccgccgcgccccccgcccgctccccggcctgcctgtctctccctcctgcgctacagct

SEQ ID NO: 18371 - DNA, 2300 bp, Homo sapien
aagataatctcctctgctcagctcatcagaatactcattctattttatagaataaggtgttgcctggtgctagaatcgcaaatagccagttaagatctgtaactgtgttgtattaaaggagagaaggttagcactccctttgacaaggatggaagaggcccttgggcctgacaacacgcatacggttaaggcattaccacctacttcgtgggatctaaccatcgtttttgaaatggtgctgggaaaactagctagccatatgtagaaagctgaaactggatcccttccttacaccttatacaaaaatcaattcaagatggattaaagacttacatgttagacctaaaaccataaaaaccctagaagaaaacctaggcaataccattcaggacataggcatgggcaaggacttcatgtctaaaacaccaaaagcaatgacaacgaaagccaaaattgacaaatgggatctaattaaactaaagagcttctgcacagcaaaagaaactaccatcagagtgaacaggcaacctacagaatgggagaaaatttttgcaatctactcatctgacaaagagctaatatccagaatctacaatgaactcaaacaaatttacaagaaaaaaacaaacaaccccatcaacaagtgggcgaaggatatgaacagacacttctcaaaagaagacatttatgcagccaacagacacatgaaaaaatgctcatcatcactggccatcagagaaatgcaaatcaaaaccacaatgagataccatctcacaccagttagaatggcgaccattaaaaagtcaggaaacaacagctgctggagaggatgtggagaaataagaacacttttacactgttggtgggactgttaactggttcaaccattgtggaagacagtgtggagatttctcagggatctagaactagaaataccatttgacccagccatcccattactgggtatatacccaaaggattataaatcatgctgctataaagacacatttacatgtatgtttattgcagcactattcacaatagcaaagacctggaaccaacccaaatgtccaacaatgacagactggattaagaaaatgtggcatatatacaccatggaatactatgcagccataaaaaatgatgagttcatgtcctttgtagggacacggatgaagctggaaaccaacattctcagcaaactatcgcaaggacaaaaaaacaaacattacatgttctcactcataggtgggaactgaacgatgagaacacttggacacaggaagggggacatcacacttcggggcctgttgtggggtggggagagggggaagggatagcattaggagatatacctaatgtaaatgacgagttaatgggtgcagcacaccaacatggcacatgtatacatatgtaacaaccctgcacgttgtgcacatgtaccctagaacttaaagtataataataaaaaataataaaataaagaaaaaaaatctataactacatttcttgtaattttgtcttttgagagtatacatatcttatttcctttcccagaccagaacctctttgagggcaggaggaacccggttttccctactttacacatgacacataataaccactcattcaatgtaggtttactggatggataaataggaatggggggtagataggcgggagagtgagtagacaaatgcgaaacaggaaaagcttgcgccaggaaaaacagtgaagagcgaaatctccagacccccgattaaatggtttaaagtgaagccaagcaagaacctccagtcctctctgcggcagagaacagcagatgatagcggctcgccttcaactttgctctgaggacctctcgttagtatcccgcgattgtccttcctaacgcctgactgaatcctgaggctagccttcagcgaacatgtacaccgccttgcccttcacgtgaagccgagcctgtgactacacttatccttccgtcgccggcctcatttctccttccccttctccgatctcgcaaccactgctagtaaggcgcgcgtgcgggcagccctggccggcaggggagggagggtcctgcgaccggaagccggaaaccggaaggggggctgtgaggacgtgttccgaggaagccagagccggagccgtggcctgcggggccggcgacatggatcccctgttccagcaaacgcacaagtgagggccggtcggggagcgggcaggggctagacgaggcgaggccaggtgagcctggcttctggggctgaggcctcggacgtcagccagggtagagg

SEQ ID NO: 18372 - DNA, 2300 bp, Homo sapien
cctgacccaaacaatggcagcatctcaccccacctcccaacacctccacattgggggtcaagttttcaacagatgaacttggggagacatattcaaaccataacagggagcagaggctctgtgatgcctgtgtgttggggcatcccgaatcccttcactccaatttgccatgccctttccatccccttgtctcccacttcactgtcaccactggaattcaagtctccaggcagcatcttttgcctgcattattgcaataacaaagtgctttctttactctcctgcaacaatcaaagcatgcaaattaacatacgggtgagaaaccacccctgcccccaccccccttcgctactcaggcaaagacttttaaaataatgataacaatgttgggggtggggagccccctttccccacagggcatgattgtacactggtatatttctggaaagcaatttagtaggaagtactttttgattctttttttctttttttattttattttattttattttttttgagacggagtctcgctctgtcacccaggctggagtgcagtggcgtgatctcggctcactgcaagcttcacctcccgggttcacgccattctcctgcctcagcctcctgagtagctgggactacaggcgcccgccaccacgcccggctaatttttttttttttttttgtatttttagtagagacagggtttcacggtgttagccaggatggtctcgatctcctgacctcgtgatccacccgcctcggcctctcaaagtgctgggattacaggcgtgagccaccgcgcccggcctactttttgattctacaggtccatttttcaaaatacaatctaaagaaaaatcagttttggcacaaatactttgttacaaggctccttatggtaatattgtttctgatgaaagaaaaaagaagacagaaagaaagaaagaagaaagaagagaaagaaagaagagaaagaagaagagaaagaaagaagaaggaaggaaggagagaaggaaagggagaaggaagaagaaggaaagaaaaactcagacatccagcaggaagcttggttaaataaactgtagtagtccataccttaaaatgccattccttcactaaaaatgatgttgtagctcagtagtttgtgcatcacgtgggaactgttagaaatgcacattctggggccccatcccacatctgattcagaaactcttggggttggttggggtggggaggttgggggcgggaggtggaagcaatctgggttttaataaaccctccaaggcaattcagagccatagctgtagaggaccatcgctagggaaagttacgctgttaagtgaggaaaggttgggaggcagtaagcaggaacggtgcatccccatatctgttatctagagaaaggcacaaatagaaaaagtctgggaggagtttatacccaggtgataacatcgacactctctaggaggcagattataaagttttagagtaatttcggtaattcatgttttctaaactagtctacaatgactatgtttgtgtaaaaaagaaagaaaaaaacagtaatttattttttaatttaaaaaaaaagttaaatgggaccaagttgagaggagggtgtagggaaggaggcagagagcccgcctcgccgcgacagctttcaccccgggaaagctgtgaggcaggaccgcccaggagacccggggccagtggagtgggcagcgccaggggtcccggcgactcatctgatgtctagcaaggcttacgagggcttaaataataagcgaagagagtcagggcagattccggaataacttcactgctaagggtatcaaatcctggaatgggcaccttggagaggttttctagccaagaacggacagcgggtgccaggagggggtggagtttcgccggcccgcggacagaggctgccggatctcccgaccccctccagcaccgggactccggggaggctgcgcccgcggcgggattcccgcccctcggagatgccgcggggaccggcggggcggggccgggccgttgctaggggaggggcggccaggcgcgcgaggaacccagcgggcgaccgctaagcacactaggttctccggctccagctcctgcgccgcctgttgctcgctcctccgggcggtcgcttcccgcccggtgcccaggggtaggcggcccgagagcgcgcaggcagccagcctcccgccttcgtcccctccccgtaccgcaggagccggtccgaggggtccggagcgtccctgagagcgcggaccccggcgagcagcccagtg

SEQ ID NO: 18373 - DNA, 2300 bp, Homo sapien
gtgaccctcaaattagccttattgctgggcggggtggctcagacctgtaatcccagaactttgggagccgaggtgggtggatcacccgaggtcaggaattcaacaccagcctggccaacatagtgaaaccctgtccctactataaatacaaaaaaattagctgggcgtggtggtgcagttttttgctccctggaggactttgtgttaagcttccttccttgcagctaaatgttgcagacatttaagcagttagaaactctgcatatgagcaggaatcaaatccaaagttgtagggccagaatggtggctcatgcctgtaatcccagcaccttgggaggccaaggtgggaggatcactggaggtcaggagtttgagaccagcctggccaacatggcgaaacctcatctctactaaaaatacaaaaattagcaggtcatggtggcgggcgcctgtgatcctagctatcaggaggctgaggcacgagaatggcttgaacccgggaggtggaagttgcagtgagccgagattgtgccactacactccaacctcccctccaggctggtctcgaactcctgtgacctcaggtgatccacccacctcagcctcccaaagtgctggggttacaggtgtgagccaccatgcctggccaagatggtgtttatgttaagctattgtgcaaaaaaaaacttttgtaaagaaaatatatcgctgtatcttaattccatatactttcctgactactcttctaccataattgcaaaaattctatgatttctttgtataacatacccatcaaatcagagtgggtatattcagtggcctgaaggggactcaaggtgaagattctcctctacatctgactttagaaaagactttccacctgccttgtggttcagaaatctagtttcacacagttcacttcgagatagagggaagcattcaggatgtgtctggactagagcagcagtttctgcacatgctcccctctgtcctcattaatttgctgatgcataacttaggaaaagcacactaaaggtctgtttttctttttccctcacaccagagaacaggctcattaggtccctccacgaagaggtttaggtagcatcaatacaaatgttttaaactcaccatctttactaagcactttatacaactgggagtccctcataaaaatctggtggccgggagcggtggctcatgcctgtaattccagcactttgctcaggtgggtggatcacttgaggtcaggagttcaagaccagcctgaccaacatggtgaaacctgtctctactaaaaatacaaaaattagctgggcatggtggcaggcaactgtaatcctaagtactcaggaggctgaggcaggagaatcacttgaaaccaggaggcggaggttgcagtgagccgagatggcaccattgcactccagcttgagggacagagtgagactctgtctcaaataataataataataataataataatcatcatcatcatcatcatcatcatcatcatcatcatcatcatcatcatctagccagcttcactacaattatgtaggcaacaccaggaaaacactggaatcacagttgataaaaattaatgaattcactcaaaaacattcagagtgccatgtccatttgtgccaggtactgtactaagtgctggggctacaaaatccatctcaaagacacaccaagatgaggactttgtccccaggggactttcattcctcaaggaggaagcggatgctgatgggaaaacatatgagagccatgtggggatctgtacggcagggtgacaaggagaggacaaagcaggaatgggggctgggttaagaaagacttgagagacactaacttgcttatcttgagtttctgtgttcatcttaaacaacagaaaaaggcatttgcttcatggtgatgaaaaaatcagagctagctgatattggaaactagcactcatttcatataaacagaatagagctgtacccttcaaactaagtcacagttactttcaaagattggcacaagggtctcaacacaccaagtgtatgttaggggctgggctcctttggagtcaaatcttcctggtaaacaaagctacactgcagtcatatttggcatatgtgacatataggcccactgcatttccttccaaaggcaagatgccaagggaaggtgccagtaattttatgaccaatatgacaccattttgtggtgtttgtaagttgaaacaatatatttccctgcattacacaagtttgtaaaaaacaaacaaaaaaagaggccccagctgt

SEQ ID NO: 18374 - DNA, 2300 bp, Homo sapien
cctcctgttctaaggcattcttttcttgactaaggttgtgcctgggccatggagagactgagtgggaactggctcaatggctcaagtttgaggactctacagcaactcttttccacaaaccaaatgatatgaatgtttttatttatttatatttatgtttccactttttaaaagtctttttgtagagattggggtctcactttgtagcccaggctgatcttgaactccaggggctcaagcgatctgcctgtcttggcctcctaaagtgctgggattacaggcatgagccagtgtgcccagccttgagtgtttttagattcacagtagatgatcatttccatttctggttcaagtccttcattttatacattaaactaaggtgcactgactcccagtccatcgcctttttggtatctttatgggagtaaaatgtggcaagcttttttccagcctcaaagactgtctcagagtaaaagtttaagaagtactgctctaaataattttattaaatatgccttattagatgaggaaaactgaaatatttttatacaagccttttgctgtagaacaatgggacagaataaaggtagctcacaaaataagggaacatttcttgcctgttcttttttttccctccaaattcttctgtacaggtccagatagatgggctatgtttcctttctattaactgaggagagagagatgaaaggactggagcatgtcatcactgtcttaaatgtactgaaattctaacagctctagctgaaaaaatgtccaaagcaggccgtgaaaataaatttaaatgacaaactccaaaatgatctatgctagaatcccaaggctgtcagggaaaactggttccatggaagaaggtagtcaaagaaataagcagatcagatgacctagaccctcacccaatatgcgcgatgtacttggggagaaagtaacctctttcctttattcacctacataggttcgtgagccacacatctccccacaccaagctcctccatacaagacctcggactgcatcacgtaaatgctttttcaggggcaaaatctagagaatctgaaacggtgagccttttttcttttctttctttctttttttttttttttttttttttttttttgagatgaagtctcactctgttgcccaggctggagtgcagtgcagtggtgtgatcttggctcactgcaaactccacctcctggagtcaagtgattctcctgcctcagccttcagagtagctgggatcataggtacccgtccccatgcctggttaatttttgtatttttagtagagacagggtttcaccatgttggccaggctggtctcgaaattctgagctcaagtgatgcacccaccttggcctcccaaagtgctgggattacagcatgagccaccatgcccagctgtgagcctgtatcttaatcaaagtcctgagaataaccttgaagaagactcccttgcaatgaggaacaacagaagaagcaagggacctggaatctggcagacctgggtttgaattctggctctgtcactttctggtgaagtgacttgagtaatgaacatgagcctttctgggtagcatttacagcacaaagcaatttgaggaataaatgaaagagcacgtgtctagtgcctagcaatgcgctggacacagtgccggtgctcagccatcatgtcacaccagcactgaccggtgagcataaaccctggggatgcccagagctggtacagccaggagctccagaagcgtgggattctcagagggaagtggagctcactgctctacaggtcctgttcaagttagaaagtaagatacaatgcacacaaagccaaattgtcatcattcagctcctattacaggagaactaagagctgcattgaaaattacttgcaaagcttgtaagtggttctgccacttattagccgtgtgaaccttagcaaattacctagcgtctctgagtttcaacttcctcatctgcaaaatagaaatgataataataaccgcatcgcaagagttgttggaaaaatgaaaatgaggtatcataggaggtaacatgtatggagcatttaccataggccaagcactgttctaagaacttcggacatgttatctcacttgtataagtacttaggtgcctacaacataaacagcacctggtaaattaagtattgaaaaaatgctatggggcagaggaagaaatgctaagcttctgtgagaagagaagacagcttgttacacaggtgaaaagaacaagctgcagctgagagaagaaaagtataagagtt

SEQ ID NO: 18375 - DNA, 2300 bp, Homo sapien
tgtgtaaaaggaatagagtgggggcgcaaaaaccagtaagatgagaaaatagtgtttcctcagttctagtatccaggggaaaaaaagaaaagagaaaatactgtttcctgccacttaagaggaaggactcacatatcctaccttccatcagccttgaaggagacaagtgccctctctctcacacccggtggccttcccttcccctttcccagagcctccaagaaggcccctggcctggcctgatgcccaccatcagcagcaataggcaccaaaacctttctccttcctatccctccccacctcccaaaagggctggggacagcaggtgtatccttgttagttccatcatgagacagcacattcctacaatgtcgtacagatgtaaattctcaaattaatctacaaatttaacgtaatcctattcaaatcccaagatagtttttggtggtggctgtttttaagacagggcctcgctgtgttgcccaggctagagtgcagtggtacgaccacagctcactgcatcctcgacctcccaggctcaagcgatcctcccacttcagcctctgaagtctctcatatggtgtccaagaaatggtgacaaatctcacaaagggactaggctcagcacggctggaatattcagggaaggtgtcaagaagaaagatgaacttgtgttggcttttgagagatgcataggactcccacaggcagagtgaaataagggcattttagatggacaaacacacagacagaagcagaaatgtgggtggtgtgactggggtatagtgaggggctgctgtggctggaatggagggctgccacaataatggaaatggtaaatgaggcaaataaggttggactggtggcatagcgtcaaggttgccagctttattaaatcactcttccaatatgctagcactggcctgttgggaaaagtaatatatcatgtaatcgaacaaaagacaaacagaggcaagctccaggaatgggcactgtaaacaggacttgccccagagtagccagatgtaggctttagataagttgatgcaggctgagcatctctaatctgagggggaatgtctcacatggtgtccaagaaatggtgacacatctcacagagggtctaggctcaggagggctagagtatgagacgttccccctcgcctgtgaacttaaaaatgtggccaacaatttttgtaaaagatggctactctgtagtgctttaactggacctatttagacaatgccttacacactggaggacgatactgtgtaaatctaataagtctacaagacaatacttctgtcttttggctctctccttcctctccagggtgatgacaaatccgtgagggtggagattatacctctctcatcatttcagcaccaaggaaataaattagtggcagagtaagggtgacttgatgagtacatccaattgttgacatagttttgggtggagaaattttgctattatatcgacttcttaaaatagtctagtgggattaacttggtttcaattcacagagatctggaagcgaggatcttttaaaaatcctgaaatatacactgcaataaaagaacaaagcatacacctcagccttaaatgactgaagaagtatgtcaagtagcagcaggtgggaaagtggctttggttttcagtttgtgagctctgaatccacacagaaacaggactgcattctgacaacctgaattaattattgtccttaccacaatgaggcagaaaagtataataaaaatcattagtatttcagtcacaattaatgccaagatgagtttgtcagtatagccatatcctggaacttattttgtgagctaaaaaaaacaaaaaaacaaaacaaaaaaaaacacaccagaatgagagctaactattcaaaaccccagtattccaggtgagtagcttacaggttcttttttatttttttgaaagagggtctcactctgttacccaggctggggtacagtggtgcaatcaccgttcactagactcgacctccctgggctcaggtgaccctcccacctcagcctcccaagtagctgggactacaggcacgtgtcatcaacccagctaatttttttattttttgtggagacaggctttcactatgttggccaagctggtctcaaactcctgacttcaagtaatccacccaccttggcctcccaaagtgctgagattacaggcatgagctaccacccctggcctacagttcatcttgtgccctaatctatatttcactctctacatgagcaaagtgggagatcactgtcatgaccaa

SEQ ID NO: 18376 - DNA, 2300 bp, Homo sapien
taaaaatacaaaagttagcctggcgcagtggcaggtgcctgtaatcccagctactcgggaggctgaggcaggagaatcacttgaaccttgggggggcagagcttgcagggagccaagatcgtgccactccagcctgggtgacagactgagactccatctcaaaaaacaaaaaaaagaaaaagaaagaaagaaaaagaaagaggtaattctgggtgccgccatggaaatggtaaactgacatggtgcactggtgagcgtgtcttatggaaagctgctttcaccctgtccctgtttcagctagtcatcaatttggtctggtgtccaagccccacctctggagtccagttccacctcctaactcagtgtgggctttattacctggcttgccttcttgaagtggcctcgcatggcagagagaaagctagagacctctctggggcctcttctcataaatatactaattctattaaatcagggcccagttttatgaccttatgtgaccttaattacttcccataaatcccttttttttttttttttttggagacagcgtcttgctctgtcaccctggctggagtgcagtggcatgatcttggctcactgcaacctccacctccccggttcaagcaattctccttcctcagcctcctgagtagctgggactacaggcgtgcaccaccacacctggccaattttcatttgtttggtttttttgagactgagtcttgccttgtcacctaagctggagtgcagtggcacgatctcggctcactgcaacctccacctcctggttccggtgattctcctgcccaagcctcccaagtagctgagattacaggcgtgcaccattgcagccgggtgatttttgtattttagtagagatggagtttcatgatgttcccaggctggtctcgaacccctgacttcaaatgatcaacccgcctcggcctcccaaagtgctgggattaaatgcgtgagccatcatgcctgggcaatttttgtatctttttagtagagacagaatttcaccatgttggtcaggctgatcttgaactccggatctcaagtgatctgcccgccttggacgcccaaagcgttgggattagtggcgtgagccactgcacctggtcaaatccctttttttattttttactttttaattatttttttcttttgagatggagtttccctcttgttgcccagattggagtgcaatgatgtgatctcggttcactgcaacctccgcctcctgggttcaagtgattcttctctctcaggctcctgagtagctgaaattacaggcatgcaccaccacaccctgctagtttttgtatttttagaagagacggggtttcaccatgttggtcaggctggtctcaaactcctaaccttaggtgatccacctgccttggcctcccaaagtgctgggattacaggtgtgagccaccgtgcccggcccaaatttcttcttgaaataacattttaaatgaataaaataaaagatgtatactcaacaaattaggaacagaaagaaacttcctcaacctaaatgaagagcatctattaacaactcacagctaatactttgtgtgtgtgtgtgtgtgtgtgtgtgtgtgtgtgtgtgtgtgtgtgtgtgtattttatatacctatataacatctctccctatggctttccggcctggagttttcatcacgtcgcttcctggatgaaggaacctcgaggggtgaggggcaggggttgggggtgatggagaagagaacctaaaggggacttaggtagggggttcagagtagccgactggcgtgacgctttgccgggattcctattcctattcctcccacctcaggcccccttctagtcctctcggccaaaagcctctcgtttccaagggccgagatagagacagagacagacagatacacagacacagaaatgccaaggcaccagcttccctctcccctttctgtcccgccccatcgctctgacggacaccatcagtcagccaatggcgctcacgatgtgcccctgaagggccaatgagcgccagaggagggcggaagattccccgcccccacttctaggcttggttgagccgcgcaggaaggtccgaggctgggggagcagccgttggctctggtgcccctgggggtgggagcacgagtgggcaaggatgatggtgaggcagaggaggcggccccgagggagcgcccggctgagaggcggggggccgaggggcccggggagcgggcgtcaccgagggccctggaagcggcagggctgggggagaggagacgcgt

SEQ ID NO: 18377 - DNA, 2300 bp, Homo sapien
ataaatctggagtactgtgttcagttgaaagggtcacattttaagagtgatagctcttacttatccctttctttccattcccaatcttagatactctcatctcatatctagcgtggtagattgtttccaaagatgacccaaaaactcctcccatggcacacgccctttgtggtgttactttgccactcttcccattaagaagtagactattcctcctggtgaatccagggtggctctgagtcttactctgaccaacaagaagtgatgctcacaggcctaggcctaagggacctcacagcttctatttttgcgcactttgttgtcaaccaccaagtcaagaagctggagctaaactactgactcataagaggccagtgtgaaaagagaggtcatgcagagaagaaatgaaggacccagccaatagctaccactgacaccctagacatgtgagtgaagccatcttgaatctttcagccctagccaagccagtgctggtgatgttcttctatatctgtgtgactgtccaatatggcagtcactagccacatacagggctactgaatccttggaatgtggctagggcatctgaagaacttcatttttaatttcattttaacttaaactttaaatagctaatggctactttccaggccagtgtaaaagtctgttaccactcaagtcatccagcataatcccgctaaagcaactgggcacagggcagccaaaaatcatcttagcacctgccctttaggggctataagtatatatacagtgacaagacaaggcggtggagaaggatgcagtgtagctctgtcagccttgtttttaaaaatgaaagaaaaaatatctccctctaacatcacccaaagggaaatttccaagcaatggaatatatcatgattctcacatctagcctagagagctcctgactagaaaagtaactttcaaaaactgtttcctcatctgctgaaaaacaaaatttaaacagtcccctggttcactctttttggggggagaaggggagcagaaaggaaatatgagagagtctacattgcatgctagacacggccacatttataatacatcgaattctcttaatccttttttttcaaactaagcgaacataagttcagagaggtaatttgccaaggacctatgactagttagtgctaaagataaaattcaaaaccaggcctctgaatttccgaccccctactcttcccaccacagcggaatgcctcacctatcaaaaataaaaatttctaatggcctattgagcttttccatgatctcttcacctaagtaactatttccaattaatgccttcttagcagactgatcccatttttcctcccttcactttcctatacttctttttcctctaattttacccatccttcaaactccattttaaacttttttttccttccatagaactttccttatcttatcacaattgccctctctgaatttttatattacttataataggcaccatataatatagcgttctctgttacactgcttttcccttaaatagaccttaatctccttgaagacagaagctatcctatgtctttggggagtggcaatctttccaaatttctttagctttcccccagagccgtgagtagatacttctggaatggacgaatgatctaaactcaatagacaaatacttgttgattcattaaagacagccccaaactctgctgtttcaccctttgcttcataatctacagcacaccaattaatccaaaagggctgaggggctaatccacactgcagccccgccacgtaacgctacccgcccgcgctgtcacgccacgcccagcctgctggttgcagatttggcgtagcccaaccctgggacggccgattgggcgtggtgtgcgtggctgaaggcgtggctgagaagagaaacctacgctttgggtcagactcggtagcttccggtaatcttcgacaatttccggcaacggttttctctctcgtcgaccaacctcgggtatttccgactcccttcgggcttttccgtctggttcccgctcggctttctccacttcgggtattcccgtgtcccgctcggaagcactcggcaatcgctcggcctcccccatcccccggtaacggtcgctggtgagtttaaatgagcaggggctggccgggccggagccgctacagggggggcctgaggcactgcagaaagtgggcctgagcctcgaggatgacggtgctgcaggaacccgtccaggtaatgataaccttcttctctggggcttggctggcagcctcggtcg

SEQ ID NO: 18378 - DNA, 2300 bp, Homo sapien
tgaactcccaacccctgtggggaatggggtaggtcaaggagaggactgacagggattatagaagagtgcgagcgaaggtacaaggaatcaagtttggtagccggcaaggaagagaggtgaggcagaagatgaggggaggaggtgaggtgcacagagcaaaggagccaccatcccagctcaggaccagggctgggctagaatctgggccctggtctcgttctagtattcccttgagcaagtcctggccctttttcctgcccgtttcctttgagggcttctctgtcaccaccagtgagcgtgtataggctacaggaggagcagtgaagagcagtgtgctacagagagcactgcaccccaggaaacagaattagttggcccagctctgcctataagtagctgaatgtcttgaggcaacttcaacgtttccctggaccttagattccttgcctgtaaaacagcatggggccagatgatctctaagggtccttctggctctgaaggcaatgatctggggcatggaacctgtagttagagagctgggaaatgggcagatgtgggctccagggcacccagaattgcaggcttaggagctaacagcaaccaggattctgtagtctagcaatcttgctttacaggtgaggaaactgggcctagaaaggcgaagtgatttttttgcctctctcagctttattcctcttttcctctgaactgtagagtctaaagattcagcacaaagcagttttgtgtagtggatacataagcttttttgttgttatttttctgaattattttgttgactttcaaagttttttttacataaacagtaaatgctcgttataaaaatttccattaatacaggaagtgaaaaaagtaaaaaactgcaaattgctgttatcctcccacccttaccccctaggtccccagaggtgtctctgttaacagttcagcgtgtatccatcctgactcctccaataaatgcagaaacttgtatgtctctccccgacaactggattatcatatacattattcaagcataggctttagactcagacatatctacatctaatcccagcttatagctaattatttgagtgaccttggccaagttgttcatccagttttagtctcaatctccccatgtgtaaagtgaaaataataatagtatctacctggcctggcgtggcggcttatgcctataatcccagccctttggaagaccgaggctagtggatcccttgagctcaggagttcaagaccaacctgggcaatttagcaagacctcatctctactgaaaaacaaaaaacaaaaaaactcccccaaaattagccaagtgtgctggtgtgcacctgtagtcccagctactcggaaggctgaggtgggagaatcgcttgagccaggaaagacgaggctgcagtgagctgtgattgcaccactgcactgcaacctgagcaacagagcgataccttgtttctgttaaaacaaacaaacaaacaaaatagtatctaccttataggatcatggtgaagatttaatgagattttatatgaatagcacttaacagttcctggtactgatagtagtaagcactacacacacacacacacacacacacacacacacacacacagagcacagaatgagttagaggtaaagtgaaaactaaaccccaagttttctgaccctcagtctcctcgactttctaccacatctctctgcttctctcctaggtgcctaggcatgggttcagtgctcactacttgttgaatgaatgactgaggttgtgtgtaagggggtagatctagggatctgaggtctgtggagttcctgggatgcctgctctggaaaatggaggctttcatcctgtgagttgggagggtgtggggcagtgtgggttggctggaccagctgttgcttcagagctccatgcctggagagttgggcctctaggcagagctgagggcccagagtggctctcagcttaaaggatcttggcttagaaggaatgtgcagtgggctgcctctgctcgggaggggctaaaaaaagcctcaccctcccctgggctttgtgtgaggcttatcaactgctcaagtcagctcatctctctggctgctccggcatatttgagaaggtctgtttccctggtccttctgggtttccaccaattggcaagaagggatcagcctgtcctagaggtgaagagagagctgtggcatgaaggggagggggctggtggccccaaacctggtgacaatacacagttgtcagctgtaccctgctggcgtttcttccttttatagt

SEQ ID NO: 18379 - DNA, 2300 bp, Homo sapien
aagaaaaggagcagaaagtgaggccaaaaagagcagtctgcgaggtagggacaaggaaaagagtcctaagagccaagcttggaaaacatttcaaaggcaggttgaaaatggtgtgttgaaaattgaaacaatgtagaattcaggggaccttgtcaacattagctgtgaccttgattaagtcacttcccatttaaggatctgttttcctgattttgactcttaggaagtctgactaatcggtgaactggctctgctccaaggagcctagttagaggctccaagaagcctgaacccagccctctcctcctcagccagagaaactctgttctcttcagtttcatgcactgacttccccataaaatttagttcgaacaaaaggctatgggtctaaaccaaagtttgagaaccactggattcaatgaacccctgctcaaccgtataaagatccctggttttgtgtttcaaccagtcactcacaaagctgaaacccttcctcaaagaaaatctgggaaacaaagggcatgtatatagaccttggccttgtctccccagccagactgtaaattctaagaaaagcaaacttgggctcatggttctcagcttcccatgacaggcaggcagccttggctgaattcttagatgtttcacagagttctgtggctggatgattgatagttaggcaacagaaaggccatgggaaggatttatttcaccttggggagtcctcagggatgtaaggactccctttctgggatgactggacccctgtgctcccatataaatatttctactcatatacatgtgtgtttaacttcctcacatcatcttgctccttcttcccaattgctggttttcaggcgtctcttttccacgtgcctctccccactctcctcctctctcagcctgaggttcctgacctctgaccctgactctttccagggcactgagctggaatcctgggtctggagtcaatgagatgtccagaacaggcaggactgaaccaggtaccaggagctttgcactcagaggaagaggcacctaaaaaagcgaggaccaaaccaaaccgtggttgacctatacaatgggacatgattccgccttaaaaaaggaacacgaggacattgtgctaagtgaaataagccggtcacaaaagacaaacactgtctgatttcacttatccagggtggtcaaattcatagaaatggaaagtagaatgctgattgccaggggctgggggaaggagggaatggggagttatttattgagtacagtgtttctgctggtggaaatgaaaaggttctggagattcattactgatatggtttggctgtgtccccactcaaatctcatcttgaattcccatgtgttgtgggagggacccagtaggaggtaactttcccatgctgttctcatgatagtgaataagtctcacaagatctgatggtttttaaaaggggaatttccctgcacaagctctctttgcctgccgccatccatgtaagatgtgcctttgctcctccttgccttccgccatgattgtgaggcctccccagccatgtggaactgtaaatccattaaacctctttttcttcccagtttcaggtatgtctttatcagtagcatgaaaagagactaatacagttacacaacaatgtgaatatacctcactctactgacttgtatgcttaaaaatggttaagatggtaaatttcatgttatgtgtattttacaacaatttttgtttaaaagcagcaagagcaaggaccaaaggaggagtccctgcctcagcctggcccctctctgcctgccatctggaggtgtgattaggtagagggtgagcccaaagggaataaaactcctccaggtgacaactcctcaagctgctggccttccagagcttgctctcctgggtctgaccccaatatctctagatccacaggcttttgtccttgtctcctagctcccagatactactcatttctctgagcacacatgaggcctcaggtgactttatctctctctctctcacacacacacacacaacgcaaaccaatgcaattcgttaattagttttaaaaaaacaaacaaaacagagactggtcagaatcccagagcccagcctggccgtgttagagctgtttattaacagggagggcctgtaaggtccttggggcagtggtgtggtgataagtcgaggactccatctcagctcacccagccggggcctctctttaactcaccctggtatggctaaagccaagggccaggcacctgaaagaaagtgctaggaggaaagggca

SEQ ID NO: 18380 - DNA, 2300 bp, Homo sapien
caccccccctccaccttccccaaacctgcttcacatcatggtctgaactagtttttcagattaactttggaatgcccttggctgagaggaagggttagttcagacagttgtgggggggcttataatgttatttttagtttacaggttcttacaatttacatagaattgttcaatattaattcaacataggctactgtatgataagttaaggaggaatattgtaatacctagagcaaacacacacacacacacacacacacacacacacacatgcaaacgaggtgtagctaggaagccagtagagaaaaaaaaattatcccaaaagaaagcagaaaaagagaaacagagaaaccagccaaaaagatagaacgaataacaagatagtaaatgtaaacacaaccatcaattactatactaaatgtgaatggactagctcctttgccttccctggggctgggagtgcaggatggactcacttgcacaattatgtcatgtttgctagggcttgggctagggttgtggacttagcatacttgctgaggccagtgcccaccccaagtggttgctgacagcagggataggctaaggagacacctaagtggctggagattggttttatatatatgggaatggagcagataactaaatacttaggcagagatgtaaccaggccatgtgacctgaactttgctccagggcattgacactgctgttaaaatgcttctggcctagaggccctctgcagccaggggaggtagatggagcttcagcctgaaaacccaggtcagagggcccaagtaccctttgcagagctggcttttccccttgcaaattgctagtgacgcttcagctgatgtgtgttactattaaggtcctagtgtttgggagggtggggcaggaggtggaggattgtcagaaaaaaattacatggaaaaagatggcatctgagatgttttgaaagataagtggaattttccaagtggaaaaaggaaggaaaatcagtcagataggaaggcatggagcattggggaatgacaagtatcttcttggactagggtgggagatgggctggagagatgggtcagggccagttgtctggcatcttgtgtgtctcagaagagggtgggcacgctgcgtagggaagcccagggccactctgaaagccctaaaggggaactgatgcctctggccttgtttttatcaccatcaggactacccattgaggcaggctgcactaccagctacttcctggtgccctcttgctcatagccatagtattttgcctctctgagcttccagaggttttaagtctggggaagacccagggactcaaagaaagattggggtgggagataaggggccacagtttgggggagtcaggcaggaggcctttgaggaaaatagataaagtcccaaagcctgtgagtgtgaatttggaggcaatatgctgtgttctgaaacgttttcagacactggctaggtgcaagcaagtgtttgtagggcgaggctcttcatggacctatcactgcttacgcaagcttgggatgtggtcttgccctcaacaggtaggtagtctaccggaaaaccaaactaaggcaagaaaaaaattagtgaataataaaggactgaaccggttcagagaaggcattcagcagatgtttgccagtcaaatgaattaaagtgtgaatgaatgaaactcgaggtagtgggtgaatgtgtcccaagaatccagcgaaacagggtctcccaggaggcgggactggaagggtccggagaggggccacaggctcctggcctttctaagcacaccaagtgcccagtcgcggacccccgggaccaggatgcgctgacgacccggctggcaggcgggtcctcgtgggcgaggcgagggaggcggcgagagaggagcaatagtttcccaccgctccctctcaggcgcagggtctagagaagcgcgaggggatctagagaagccggaggggaggaagcgcgagtccgcggcccgccccgttgcgtcccacccaccgcgtcccctcccctcccctcccgctgcgggaaaagcggccgcgggcggcggcgcccactgtggggcgggcggagcgccgcgggaggcggacgagatgcgagcgcggccgcggccccggccgctctgggcgactgtgctggcgctgggggcgctggcgggcgttggcgtaggaggtgagtgaggctccggctcggcagcgtcgcagctgccccaggatctgcgccccggtcaagttgcggacttggagccggcaaacgcggagggctggtcccgc

SEQ ID NO: 18381 - DNA, 2300 bp, Homo sapien
cagcctgtgccacgattgcaggagtccctgccatcatgtttacagaggacagtatttgtggggagggatttggggctcagagtggggtaggttgggagaatgtcagtatgtggaagtgtgggtctgtgtgtgtgtatgtgggggtctgtgtgtttatgtgtgtgtgttgtgtgtgggagtgtgtaatttaaaattgtgatgtgtcctgataagctgagctccttagcctttgtcccagaatgcctcctgcagggattcttcctgcttagcttgagggtgactatggagctgagcaggtgttcttcattacctcagtgagaagccagctttcctcatcaggccattgtccctgaagagaagggcagggctgaggcctctcattccagaggaagggacaccaagccttggctctaccctgagttcataaatttatggttctcaggcctgactctcagcagctatggtaggaactgctgggcttggcagcccgggtcatctgtacctctgcctcctttcccctccctcaggccgaaggaggagtcagggagagctgaactattagagctgcctgtgccttttgccatcccctcaacccagctatggttctctcgcaagggaagtccttgcaagctaattctttgacctgttgggagtgaggatgtctgggccactcaggggtcattcatggcctgggggatgtaccagcatctcccagttcataatcacaacccttcagatttgccttattggcagctctactctggaggtttgtttagaagaagtgtgtcacccttaggccagcaccatctctttacctcctaattccacaccctcactgctgtagacatttgctatgagctggggatgtctctcatgaccaaatgcttttcctcaaagggagagagtgctattgtagagccagaggtctggccctatgcttccggcctcctgtccctcatccatagcacctccacatacctggccctgtgccttggtgtgctgtatccatccatggggctgattgtatttaccttctacctcttggctgccttgtgaaggaattattcccatgagttggctgggaataagtgccaggatggaatgatgggtcagttgtatcagcacgtgtggcctgttcttctatgggttggacaacctcattttaactcagtctttaatctgagaggccacagtgcaattttattttatttttctcatgatgaggttttcttaacttaaaagaacatgtatataaacatgcttgcattatatttgtaaatttatgtgatggcaaagaaggagagcataggaaaccacacagacttgggcagggtacagacactcccacttggcatcattcacagcaagtcactggccagtggctggatctgtgaggggctctctcatgatagaaggctatggggatagatgtgtggacacattggacctttcctgaggaagagggactgttcttttgtcccagaaaagcagtggctccattggtgttgacatacatccaacattaaaagccacccccaaatgcccaagaaaaaaagaaagacttatcaacatttgttccatgagcagaaaactggagctctggcctcagtgttacagctaaataatctttaattaaggcaagtcactttcttcttcttaaagctgttttctagtttgagaaatgatgggattttagcagccagtcttgaaggtctctttcagtatcaacattctaagatgctgggacttactgtgtcatcaaatgtgcggttaagattctctgggatattgatactgtttgtgtttttagttgggagatctgagagacctggctttggcaagagcagatgtcattccatatcacctttctcaatgaaagtctcattctatcctctctccaaacccgttttccaacatttgttaatagttacgtctctcctgatgtagcacttaagcttcatttagttattatttctttcttcactttgcacacatttgcatccacatattagggaagaggaatccataagtagctgaaatatctattctgtattattgtgttaacattgagaataagccttggaattagatatggggcaatgactgagccctgtctcacccatggattactccttactgtagggaatggcagtatggtagagggataaatagggggcggggagggatagtcatggatccaagaagtccttagaaatagtggcagggaacaggtgtggaagctcatgcctgtaattataaccttcagctactaagacaggtgtggtggctcacgcctgtga

SEQ ID NO: 18382 - DNA, 2300 bp, Homo sapien
aaaaaatttttttttgtagagatgaggcttcactatgttgcccaggctggtctcagattcttgggctcaagcggtcctcccaccttggcctcccaaagtgctgagattatgggtgtgagccaccatgcccagcctgacacagccattcttaaaagaagacatacaaatggccaacaggtttgcgaaaaaaaaaatcactattattagggaaatgcaaaataagattacaatatcacctcacacctgttagcatggctattaagctgggtgtggtggctcacacctgtaatctcagtactttgggaggctgaggtgggcagattacttgagggtcaggcgtttgagaccaccctggccaacatggtgaaacgccatctctactaaaaatacagaaattagccaagtgtggtggcacatgcttgtaatcccagctacttgggaggctgaggcaggaagattgcttgaacccaggaatggaggttgcagtgatttgagattgtgccactgcactccagcctgggcaacagagtgactcaatctcaaaaaaaaaaaaaaaaaaaaaaaaaaagaattgctattatcaaaatgatgaaaaaaatgtgttgctgaggatgtggagaaaccttttacactgttagtgttattacagccattatggaaaactatatggaggtttcccaaaaaattaaaaatagaactaccatatgatccagcgatgctatttctgggcatatattgagtaactgaaatcagtatatcaaagacttatttgcacttccatgttcatttcagcattatgcacaatcgctgagataatggaatcaacctgtgtccatcgatggatgaatggataaagaaaatgtagtaaacatatgcaatggatactattcagccttaaaaaagaatttctgtcatttgtgacaacatgaatcaacatatgcaatggatactattcagccttaaaaaagaatttctgtcatttgtgacaacatgaatcaacttggaggacatactaagtgaaaaaagccaggcacagaaagacacataccacatgatctcacttatatgtggaatcttaaaaagtcaaactcatagaagtagacagtagaatagttgttagaggctggaaagggacggggcgggtaggagatgcaggatggggagatgctgttcaaagggtacaaggttcagtcagacaaaagcagcaagtttctgagatctattgcatagtgtggtgactatagctaataataatatatcgtatatctcaaaactgctaagagtaaatttcaaatgtctcaccataaaaaacgttaaacaaggtgatggatatgttaagcttgacttagtcgttccatattgtatacatatattaaaatataacattgtaccccattaaatatttacaattatgatttgtacatatatttaataataataaaaatctaaataaaatattaaagaatgcctacaaagcaaggtttaagatgtaaatgaacacagtagtatcacggaagggattaaatattgtaacatttattgagcactacgtatatatttttgaattcccacaaccctggaagaatgagaaaatcgagactcagggagcgttaagtattttgcccaactgcatacgataaatacataggaaaaacaaacacacagaagaaaaccaaaccaaccaaagtatctctttcaaaaggaaacgacagtctccttaaaggcaacccgagacaaatttcagcaaagccgtgggacacatggccttcgagctgctgtccattattgagtagcagaagccaagaaggatggaatgttttggaagaaaggggtcgggggtcggggtgttcaaaggacggaccgaaggtaagattgaagtggggtcagaccatggcgggacagcgcaccggagaatgaacagcgattagggaagagtggcgagcgggtggcaaggacggagggcggaatcccggccggggctgcgggaggaaagcgcacggacaggagccccaccgctcgaatgcagcgcccggcggctggcctcgtgaggtcacaggcccttacgaggtggggcaggcaggcgcggccgcagtgccttccagtcagcgcggaggcggtattgagttcagccgctccccacagccccggagcccctgggcggtggcggtggccgcggcagcaccggctcgacagccgatagggtcctgggcccgctccgctcggggtggtcggtgggcggagcgtcgggctcggtcaggtgaccgcgggggcggggccgcgcggcgcgggatcctgggaag

SEQ ID NO: 18383 - DNA, 2300 bp, Homo sapien
gaaatgcaaaataagattacaatatcacctcacacctgttagcatggctattaagctgggtgtggtggctcacacctgtaatctcagtactttgggaggctgaggtgggcagattacttgagggtcaggcgtttgagaccaccctggccaacatggtgaaacgccatctctactaaaaatacagaaattagccaagtgtggtggcacatgcttgtaatcccagctacttgggaggctgaggcaggaagattgcttgaacccaggaatggaggttgcagtgatttgagattgtgccactgcactccagcctgggcaacagagtgactcaatctcaaaaaaaaaaaaaaaaaaaaaaaaaaagaattgctattatcaaaatgatgaaaaaaatgtgttgctgaggatgtggagaaaccttttacactgttagtgttattacagccattatggaaaactatatggaggtttcccaaaaaattaaaaatagaactaccatatgatccagcgatgctatttctgggcatatattgagtaactgaaatcagtatatcaaagacttatttgcacttccatgttcatttcagcattatgcacaatcgctgagataatggaatcaacctgtgtccatcgatggatgaatggataaagaaaatgtagtaaacatatgcaatggatactattcagccttaaaaaagaatttctgtcatttgtgacaacatgaatcaacatatgcaatggatactattcagccttaaaaaagaatttctgtcatttgtgacaacatgaatcaacttggaggacatactaagtgaaaaaagccaggcacagaaagacacataccacatgatctcacttatatgtggaatcttaaaaagtcaaactcatagaagtagacagtagaatagttgttagaggctggaaagggacggggcgggtaggagatgcaggatggggagatgctgttcaaagggtacaaggttcagtcagacaaaagcagcaagtttctgagatctattgcatagtgtggtgactatagctaataataatatatcgtatatctcaaaactgctaagagtaaatttcaaatgtctcaccataaaaaacgttaaacaaggtgatggatatgttaagcttgacttagtcgttccatattgtatacatatattaaaatataacattgtaccccattaaatatttacaattatgatttgtacatatatttaataataataaaaatctaaataaaatattaaagaatgcctacaaagcaaggtttaagatgtaaatgaacacagtagtatcacggaagggattaaatattgtaacatttattgagcactacgtatatatttttgaattcccacaaccctggaagaatgagaaaatcgagactcagggagcgttaagtattttgcccaactgcatacgataaatacataggaaaaacaaacacacagaagaaaaccaaaccaaccaaagtatctctttcaaaaggaaacgacagtctccttaaaggcaacccgagacaaatttcagcaaagccgtgggacacatggccttcgagctgctgtccattattgagtagcagaagccaagaaggatggaatgttttggaagaaaggggtcgggggtcggggtgttcaaaggacggaccgaaggtaagattgaagtggggtcagaccatggcgggacagcgcaccggagaatgaacagcgattagggaagagtggcgagcgggtggcaaggacggagggcggaatcccggccggggctgcgggaggaaagcgcacggacaggagccccaccgctcgaatgcagcgcccggcggctggcctcgtgaggtcacaggcccttacgaggtggggcaggcaggcgcggccgcagtgccttccagtcagcgcggaggcggtattgagttcagccgctccccacagccccggagcccctgggcggtggcggtggccgcggcagcaccggctcgacagccgatagggtcctgggcccgctccgctcggggtggtcggtgggcggagcgtcgggctcggtcaggtgaccgcgggggcggggccgcgcggcgcgggatcctgggaaggctgcagagctagagcagcgccgcccgaggggcggcaggggctgaccacagagagcgcgggggcctccagccgagaggaagggagggcagctcgggccggtagtgggacccttgggggacagaggtggggaggggaggcgagacccgctgaggagttgggaggggagccttcgaggtggagggtggagaatgcagtagggtgcgaggg

SEQ ID NO: 18384 - DNA, 2300 bp, Homo sapien
aggggactgagtgggacaaaggggcagattgaagggtgactgagactgatcaggtggttcctcagaaatggtggttgttgtagaaggctggcggtcccgggggtggtgtcacttccctgctccttcagcgggaggcggagacctctattagcacactcatttccatcttgcgggtcgttcactcgctagcttacaggtcctctttcttcctgtagaagtcgttggcttcgtaagagcagggtctatgggaagcctcctcagcgtgggttcttggaagaggtggaggttcgttcactcgacgtttgttacacaaatatgaaaacagggtgacgaaagtttgaacgttcatgaatggcagtagctgcaatggagttgtgtatgcagttggtattaatgacgttttcagtccctctggcgagagaaaagcgagcgagtcgggcggcttgtgagggaaatgtggcatgagaggaaagaggaaggtattttgtgaaaggatgtcatacagagtcatgcttcagtgaagacgcctttgtttttctcatcttaaagcctcacagccccattttcctctcagctactgccttatttctcttaacaacgtaactccttgaaagagcctaccctactggctgggttcaatttctttaccccgttctctcttgtactcactctgacgacattgtctccttaccaccccacccagatggctcctttcaagtttgtcagtgtcctccgtgttgtgaaacctagcgaaccattcagtactgatcttaaccgcccaccccaccccccttttttttttttgagacaaggtctctgtcgtccaggctggagtgcagtggtgcaatcatagcccactgcagcttcaaactcctgggctcaaaagatcctcctggctcagtctttggagtagctgggactaaggtcgccatgtccagctgattaaaaaaaaaattctgtagaggtgggagtttcactgttgcccaggctggtcttgaactcctggccttaagcagccctcctgcttagacccccacccccgcatcaaagtgttgggattacctgcataagccaccatgcacagcctgattgctcactcttgaagtactttcttcacttggcattcaggaacccagacctacctgatttccctcctcacagtaaccagagtgatcctttcagaaagaacttcagattatgtaatccttctcctcagaactctttcaatgcttgtcactccttcagagtacaagccacagttcttactgtcatctaggggtcctccatgatatgccactttcacttagcctctctgatctctcctgcttcagcctcctggggccttcccactattccttgaacattcttcttgcctcggggcttttgtacttacttttctttctggctgaaatgctcttccctaagatattaatcagctccctacttcagttcttgcaggtctgtactcaaaagtctccctctcagtaaggtcttccttggccacccattctgttccctgcatctcttcccctatactacatttcatattcccctccctgctttacttttttttttgtacttattgcagataacatacaatatgttttatttttctattttattatttcactccctgactagaacataagcttcatgagggcagattttatatatatataaacaaaatatatatatatatatatatatatatatatatatatatagcatatatatattttgttcattggtatatccctagagcctaggagagaacctagtgcacactaagcatgcagacatatacgttgaattcatggatagaaaggtgaatggatagatgactggagaaaagggatacgactccctccatttctcttgatttgttcctgcaagttcaccgatagaagacaggattgaaatagttgagaaaaattatattgtcagagttacagggaatagactttctaagttaattttttcttttaagtttggagaggcttatgcggtacctgattcatccagcaaattaagacctgccaactttttgataatctcgtcaataaattacagaacaattgttcctttcaagatttattcaaaacgtgtcaactctgcttaattaagcactttgatgatttaagaaatcttggtgagtagcttagtaggaagggaatttgttcattcatccctctctccctctcttttcccctccctccataccattcctcctttcctctactctttccttcattatatatataccattgtatttgatactgtgagaaataattttaagaatg

SEQ ID NO: 18385 - DNA, 2300 bp, Homo sapien
caaatgtgataaccaacacttagaaattcctcaaattttcatattttcaactcacatctgagttacattttatgagctatttatcacagtgctagctatattacattatattacattgctagttataatcatcagtctttttcttgtaaagtttaactgcaagtattaatattctaatgaagacagagtacttaaaatcatttttatttatttctgacatatgtttatagtcattatttttcaatgtgatatgtccaacattcctggaattcaaaatatgttaaaataaaatagaaccacattgaaaatactcatctcagaaaatactggaaatctatgcaggtctccccagtaacccatcctacgtaatctcttctagatcttctccaaccagttcaatatttacctctaaactactgtgcatagcacttactgccttcactattcttgtcttcactatttaactgacattaatcatttgccttgtatttgtatttttcatatgtatagctcctataccaactatagcctaaatttataaagaactgggactggtaacttatcattcttaaaattatttctcacagtatcaaatacaatggtatatatataatgaaggaaagagtagaggaaaggaggaatggtatggagggaggggaaaagagagggagagagggatgaatgaacaaattcccttcctactaagctactcaccaagatttcttaaatcatcaaagtgcttaattaagcagagttgacacgttttgaataaatcttgaaaggaacaattgttctgtaatttattgacgagattatcaaaaagttggcaggtcttaatttgctggatgaatcaggtaccgcataagcctctccaaacttaaaagaaaaaattaacttagaaagtctattccctgtaactctgacaatataatttttctcaactatttcaatcctgtcttctatcggtgaacttgcaggaacaaatcaagagaaatggagggagtcgtatcccttttctccagtcatctatccattcacctttctatccatgaattcaacgtatatgtctgcatgcttagtgtgcactaggttctctcctaggctctagggatataccaatgaacaaaatatatatatgctatatatatatatatatatatatatatatatatatatattttgtttatatatatataaaatctgccctcatgaagcttatgttctagtcagggagtgaaataataaaatagaaaaataaaacatattgtatgttatctgcaataagtacaaaaaaaaaagtaaagcagggaggggaatatgaaatgtagtataggggaagagatgcagggaacagaatgggtggccaaggaagaccttactgagagggagacttttgagtacagacctgcaagaactgaagtagggagctgattaatatcttagggaagagcatttcagccagaaagaaaagtaagtacaaaagccccgaggcaagaagaatgttcaaggaatagtgggaaggccccaggaggctgaagcaggagagatcagagaggctaagtgaaagtggcatatcatggaggacccctagatgacagtaagaactgtggcttgtactctgaaggagtgacaagcattgaaagagttctgaggagaaggattacataatctgaagttctttctgaaaggatcactctggttactgtgaggagggaaatcaggtaggtctgggttcctgaatgccaagtgaagaaagtacttcaagagtgagcaatcaggctgtgcatggtggcttatgcaggtaatcccaacactttgatgcgggggtgggggtctaagcaggagggctgcttaaggccaggagttcaagaccagcctgggcaacagtgaaactcccacctctacagaattttttttttaatcagctggacatggcgaccttagtcccagctactccaaagactgagccaggaggatcttttgagcccaggagtttgaagctgcagtgggctatgattgcaccactgcactccagcctggacgacagagaccttgtctcaaaaaaaaaaaaggggggtggggtgggcggttaagatcagtactgaatggttcgctaggtttcacaacacggaggacactgacaaacttgaaaggagccatctgggtggggtggtaaggagacaatgtcgtcagagtgagtacaagagagaacggggtaaagaaattgaacccagccagtagggtaggctctttcaaggagttacgttgttaagagaaataaggcagtagctgagaggaaa

SEQ ID NO: 18386 - DNA, 2300 bp, Homo sapien
cgcctcccaggttcactccattctcctgtctcagcctctggagtagctgggactacaggcgtctgccaccatgcccggctaatttttttgtatttttagtagagacggggtttcaccatgttagccaggatggtctcaatctcctgacctcgtgattcgcctgcctcggcctcccaaagtgcagggattacaggtgtgagccaccgcacctggcctaattttttaattttttgtagagatagggttttgccatgttgggcaggctggtctcgaactcctgggctcgagggatctaacccacttccgcctctccaagtgctgggattacaagtgtgagccaccccacacgaccccacatactcttcaacacatacatacagcactaatttcatgacactattaatgtgtcgtgctataggttcaatactgtggctggaacttgtagggaaatacttaccacagaagaatgtacgatatagctgcgaagtcaagctttaaaaaacgcctgtaatccttgcactttgggaggccgaggtgggcggattgccggagctcaggagttggagaccagcctgggcaacacggtgaaacctcgtctctactaaactagaaaaaattagccgggcatggcagcgtgcacctgtaatcccagttactctggaggctgaggcaggagaatcgcttgaacctgggaggcagaggttgcagtgagccgagattgtgccaccgcactccagcctgggtgacagagtgagactccgtctccaaaaacaacaacaacaacacgtgatctccaaacccaaaagcaatctttcagttcctctgatagtccccagcactttgcttcgacctttgtagcaattccacttcagcctgaaatttcttgtatgtacagcctgtagctcctaacttattgcaaaatattgtagataagaactctgtaagctgtaattggcagaataataaccaacggctaagtgtggaaagtgtctgcctttcagcaacgtttacgctactgaatttaccagggtgatcccaacatcacgaatcctttaacaactcaacatgaagcagcacgtagcagttacctgcatgggttctggaattaggctgcttagattcgaatctcggttctgccagttatcacctatctaaccttaagtaaattacgtaattgctctgtgactcttttccgaaatgacaaatcacaaatgtttttgtcaattcacgtgtcttctgctttagtaaacatagtagaagatagtagtcaatctctttttttttttttgagacaaagtctttctctgtcaccgaggctggagtgcagtggcgggatctcggatcactgcagcctccgcctcctgtgttcgagggagtctcctgccttagcctcccaagtagctcagactacagccgcctgccaccaagcccggcgctctcttgctggcgcatgacaaccgtgcgttccaccctacgactaattttttttttttagacggagtctagctctggctggagtcagtggcgcgatctcggctcactgcaacctctgcctcctgggttcaagcgattctcctgcctcagccttacaagcagctgggactacaggcgcgtgccaccacgcccagctaatttttgtattttcgtcattttggccaggctggtctcgaactcctgacttcaggtgatccaccggtctcggcctcccaaagtgctgggattacaggcgtgagccaccgcgcccggcctccttttccttttttaactaatggaataaacggcaatgtgccaagcatacagcaatgcccattcccggccttcagaaagcctcgggcgcaggcgcagctcgcgttcaagcgctctctcgctggcgcgtgacaacagttggttccaccctacgcccaacattgtctccctgcgcacgcgcggccgtactccgcccgccttactccaccctcccccactcccgcgagcacgtgcgcgtcctcgcggctcacatttcggcggagggcgcgctccctggaaaattccactcctgtgctagctccaccctatgcggcttttctcctacccgacgctcttcactctcagctcccttcccggcggcctttgcgggaacaagatggcagccctcatacctcaagggttctcttgtttatcgagggttttgggctggtggtctcggcaggtgggtagggacggggccgataggaccctaggggctacaggaggaggacagagtcgagggaaatactctctgtgcaattgtccttggtgagctgggacaatacgagtcatac

SEQ ID NO: 18387 - DNA, 2300 bp, Homo sapien
gctggacagtactggtccattacaacatactacattcagttttggaaattactgggttctatctgagaaatttctataaagaaatatgaagattatggataaatctccttgcctttgacactttaaataacatttttaaaattgttatttcatttttatttttttagagacagggcctcactctgtcatctggagtgcagtggcaccattacagctcactgcagcctccatccacctcctgggctcaagtgatcctcccgtctcagcctcccgagtagctgggatcataggcacacgtcaccacacctgggcccacttttttttttttttttttgagacagagtctcgttgtcgcccaggctggagtgtagtggcgtgatcttggctcgctgcaacctccgcctcccgggttcaagcgattctcctgtctcagcctccctagtagctgggactacaggcacatgacactatgccaggctaatttttgtatttttagtagagatagggtttcaccatattggccaggctggtctcgaactcctgacctcgtgatccacctgcctcagcctcccaaagtgctgggattacaggtgtgagccaccgtacctggccctggcccccctttttaaagataatttcagttacattatatatatatatatatatatatatatatgcatttgtatatatacctcctcaatttgcaaggtatctacagaactgagagagccacagatagttcaccattaaagaggccatgattgctgaaggatcttttagtttaaaaagaaacaaagatgaaaatggggaaaaggtgaaacatcccattttatttatttatttatttatttatttatttattttgagacagagtctcactctgtcgcccaggctggagtgcagtggcgcaatctcggctcactgcaacctccacctccagggttcaagcgattctcctacctcagcctcccgaatagctgggacaacaggcgcccgccaccaagcccggctattttttttttttttgtatttttagtagagacggggtttcaccatattggccaggctggtcttgaactcctaaccttgtgatccgcccgcctcggcctcccaaattgctgggattacaggcgtgagccaccgcgaccgcccgaaacatcccattttaaacattaaatcatggaaacaaaaatacagtttttgaaatcactccctcaaaagtccaaatctcattggttgaagtaacctagattattaaaggtttttttttttttttttttttttgagacggagtcttgctctgtcgcccaggctggagtgcagtggtgtgatctcggctcactgcaagctccgcctcccgggttcacgccattctcctgcctcagcctcctgagtagctgggactacaggcgcccgccaccacgcccggctaattttttgtacttttagtagagacggggtttcaccatgttagccaggatggtctcgatctccttgacctcgtgatccgcccgcctcggcctcccgaagtgctgggattacaggcgtgagacactgcgcccggctattaaaggttttataacaaaactttcaaatcatcctttgaatttgctacttaacaggaactaaggccagagagcctcaagtcagggcttttcgctgacctggaggcagaatccagtttggggttttgcttgtaactggtattttatgcatgcgaccctggctgaactgaccaactgcgtaggcttcaatttcccgagggccccttatgcctttccttcctctgatcaagcccttcccggctccttccagttggaaggccgcccccagtcctgagcggcgccgacaggtgcagcgcccgcctccagccctgcgctcgcgcgagcaacccgacgccctcccgccccgccggccgcgccctcgtcctcgccgctccgccctctgcccaggcgtgcgcgcgcactccacgggggcgcgcccggccggcggggccgcgcacgcagccgccgccaccacttccccctctccctccctccttgcgggccctcctccccttccctcccctccgcccccttccccgtaggcagcccgcccgccagtccgcccgcaccgcctccttcccagcccctagcgctccggctgggtctctcccccgccccccaggctcccccggtcgctctcctccggcggtcgcccgcgctcggtggatgtggctggcagctgccgccccctccctcgctcgccgcctgctcttcctcggccctccgcctcctcccctcctccttctcgtcttcagc

SEQ ID NO: 18388 - DNA, 2300 bp, Homo sapien
ttttttagacaacatgttgtgattttgttagtaaatgatcccttcctttgcactgatactattcaggttatctggaagagttcatgtaccactaagaatgaactattgacttaacagtttggcttaggctcctggttagaacaccaccactcctctctccaccttaccttctgtttgtcccagtgcaaaatttgtttgttcttctctggcttaggtgaagattgtccccagtggatggtccctatcacaatctctactagtgaagaccccaaccaggccaaactaaaaattctaatggacaagccagagatgaatgtggttttgaaaaatgtcaaaccagaccaatgggtgaaggtgagttcagaatcttacctaaacagatttctctcacttatacattttatggccggttttaaattctgcttcagtttagtagtttcaaagaaaaaaaaaaacctaaacttttctttgtgaaacttaggacgaattttcatatagtattgtccagacatttgtccttatgttagggaaggtagtggtagagaagcagatccaaaggcataggactaaggaggagaagaaaaaaaaaaaagtagactgagtgtaagcatatatgaaccaaaatatgtgtagtctcacaccttcaaactcccctgtcattgtaatgaaaggttaacttcaatgatgtgttgtcaccatatgtgtactactgtaatctaatgagagcagacatacataataatcggttcgtgtcactgaaatgtaaaattccttagttggtatttcaaaaccatttcacaaaaataccaataggtaagaattatttttcattattctgtactctgtacctttcataatgaaagtatttactacagactcttaattgtatgttcctaataggaattatacattgtatcagacatttgtgcttttttttaaaaaaaagcccgccgaacgctgtggtagcactttgggaggccgaggcaggtagatcactttcggaggccgaggcaggcagatcacaaggtcaggagttcaagaacagcctgaccaacatggtgaaaccctgtctctactaaagatacgaaaaaaaaattagctagtcgtgatggtgtgcacctgtaatcccagctactcagtaggctgaggcaggagaatcgcttgaacccaggaggcggaggttgcagtgagccgagatcgtgccattgcactccagcctgggtgacagggtgagacgccatctcaaaaaaaaaaaaaaaaaaagccattttttctgtttatcaacttcttttttttttgagttggtctcactatgttgcttaggctggattcaaactcctaggctcatgtgatcctcccacctcaggctccggagtagctaggattatagtcatgagccaccatgcctggcattgttttacttttttaaatatatatttaaaatatactcactggaatattaccatttgaaattataatctggaagattatgttgtagcaatatgaaaaatttcttataaatgagaaaaaagttatgtacactacaattttgattaggttaaataaagggaatcaataaagtgatagttgcgttaaaattgtaggggtggttttaaaaatatttacatataaatagtaaaatatttgtatcttactgttttaccatttaactattttgaatataaatgttctcaaaactattttttggctattggtaaatagcctatagagaataatgcagttgccaggtgtagtggctcatgcctgtaatcccagggaggctgaggcgcggcggatcacctgaggtcaggagttcgagaccagcctggccaacacggtgaaaccctgtctctcctaaaaattacaaaattagctgggtgtggtggcgggtgcctgtaatcccagctgcttgggagggtgaggcacgagaatcacttgaacctgggaggtgaaagttgcagtgagctgagatcatgccactcccctccagcctgggtgacagagcaagactccatctcaaaaagaaaaaaaagaataatgcagtcagtaattacctcacgccaaaaatcttatgaaattgccttttaggtccatgtacttctttaaaattggaatctgaaaattgttattccgttcagtctctgtgcttataagatcaatgtttgtaaaggcctaagctttcttagagattccactgtccaggtgttttcatatatattaagtattttctgtaaacctaaaattgaggttagaaatagaaacccacattattttgtcccttccttgttctttctactgtc

SEQ ID NO: 18389 - DNA, 2300 bp, Homo sapien
tcagacttcctcctaggttttcccagtgtggctactgcagggcaattacctcacaagctcaagtcatatggtaaaaagctctatgaaccagctacatccaattacccctacatcattactgtgaaaatgaaacaattcaagaaattctttgttaccatttattttttctttttttgagagtcttaactgtcgcccaggctgaagtgcagtggtgaagtcttggctcactgcaacctctgcctcccgggttcaagagattctgtctcagcctcctgaggagctgagattataggcgtgcgccaccacgctcggctaggttttttttttttttttgtatttttagtagagacagggtttcaccatgttggccagactggtcttgaactcctgacctcaagtgatccgcccgcctcggcctcccaaagtgctgggattacaggcatgagccaccgcgcccggccctattattacacttttcctttatcattttaaaaatcttcattttttttaaaagagacaggatctcgctaagttgtccaggttagtcttgaacccctgggctcaagcgatcctcccaaagtcctgggattgcaggcctgagccacatactgtatgcacattttttttcttttctttgagatggagtctcgctctgtcgccaggctggactgcagtggcgcgatatcggctcactgcaacctctgcgtccagggttcaagcgattctcctgcctcagcctcaggaatagcttggacttcaggtacgcgccaccacaccgggctaattttttatattttagtagagacggggtttcaccatgttggccaggatggtctcgatctcttgactcgtcatccgcccccctcggcctcccaaagtgctgggattacaggcgcgagccacagcgcccggcccacgttttctttatatgcattttgctaagaaaaggcattcatgagtttcttccggggttgagaactgaaacaggttaagaaccacaatcctttattcctgtacacacattctttctggttcgaggttgggcctttacagggtacttttggagggtgaaacatttccatcctgtcaagtacctggtagctatggatggggggtctaagaggaggaatcccttagctcacccctaagcaagtcagatttatcacagcacaggtctcaagccccatataagcaggcttaggggactccttggagaggaagctgcttgtagggacaagggccgtcaggagagcttgagcttatcaagccactaaccagctgtgtgaccttggacaagttccagaccctctctgggctcctgaacccattccttaccaagccattaaccagctgtgtgaccttggacaagttccataccctctctgggcttcagtttccacatctacacattggcagtggagccacatggccttacggatccctcccagccgaaagcagggtaccaagccgacctagccattaaagcagcttcctgtgggcgcggcgcaggacttcaacagtcccccctcccccgctcaggcccgcgaaaacctcgcgcaacacgcccctcggagcgacggcgcttacccaaccgcagccccagcgctcgaacccagctccgcctcttcccgggggcgtcccatcgtgccccgcgccgggctcctagggttgccgggcacctcccgccttcccgcgccccgaccccgaactcctctccttagttctcccgggcaccctatcctatcaacgcctactatcccagccaatcgcgcaggatccgagtcgtgcctccggtccaccctcctcccagcgctcagccggtctgagctcaaggcctttaccaagcccacccaatcaacggcgggctctctcctaccccatcccaatctccctcccctcggccaatccgcgcgctccattccgctgcccgcccagccaacccgggccttgaaaccagcaggcgaatgggcgcgagacggcccttcgacgctgagcgcctggccagttagggattccgcgtggccaggacaacggccaatcgtcgtggagcgcggcgcctccgcggagaggtccggtccgaatatccctccgccttcctccctccctcgctccctccctgcgcgccgcctctcactcacagcctcccttccttctttctccctccgcctcccgagcaccagcgcgctctgagctgcccccagggtccctcccccgccgccagcagcccatttggagggaggaagtaagggaagaggagaggaaggggagccggaccgactacccagacagagccggtgaat

SEQ ID NO: 18390 - DNA, 2300 bp, Homo sapien
caccaggcaatactcaaaatgacatcgttaacacttcctgagcattcgcaggctgctgtatttagttctgatccccattcttcctccatgagagtgcttaggtggggcatgatctccagcttagaaaggttaaggtaacttgcccaaggtcacacagcaggaaagtagcaaaaaacttgtttctcttgcccagcagtttggcaggtgctcaaataatctttgtgcacagggtgacatctgttgtttcttcatttccctgacctgtgggtacttgagggtggccggggagtggtgtgtggggagggagatggctgtccttcttcatgaatgaatctttgacctccttagtttactctcacttccaaagaagttacagctttaatctctctgtaccctatgttcaatgtatttatcgcagcaatgccccttttaccaagagcaacgaagagcaggtctaatgatttccttctcaaaagcgcaaagaccaaaaaaaaaaaaaaaaagccagataaatagccccacttcctccccaaatatacagcccataactaaacaaccaaaacaaccaaagcatcagccgggcccctgcactgaccgcagacgcccccaacacacgccaccacgccacactgcgccgggaggcgtcggggagggggcgccagcgcgggccgctggcgccgcagggagccggtgggctccgggcgcgctgccaggaagggccgcaccgtaggggccgccgcctctcgccacgtggtggtggcagcggcggggtccggggcgccttcccagctggagaaacccggagcagccggggaggaggaggcggaggaggcggcggcggcggaggaggagcggggcggacgggagggagggggttggggggaggggtggggggtggggagagacccggcggcggcgacagggcgaggagcagagcgcggtaccaggggggtgggggcactggtgcccgtttggggagggagcaggcggagggggtaagctgcgattacaagcaggaaccggcagcagctgtgagtccccggctggggctagggctgggggaggggagcggcgcccgggctgggccccaggggtcgcggggtgggcaggaggaggcggcaggagggcggctggcagccgcacgggatggctgggagggaaggggtccggtgtcggccgccctcatcccctcgcgtccccctccgccgccgttcctcaggccgcgccactcccggagccccttccccggccccgagagggtgtccgggggcccagggctcggccggttgtgggggagggggctgcgtggtctcggcccccgagaggggaggggcgacaatttctgtcggccgagcgaaaggggtttaaagggcggctcttaaaggggccgcaggaggggcccgggccgacagaggcactcaccccttccccagccgccttccattgcgctcacccgggcgctgggcccagagaggaatgcggaggaaggaggcatttgtggtgcggcctcggggacagagccccgccagcggggtgggcgcagaggggcgggcgggggtctgggggggtgtggtaagcgctggcgcgcggagctggggggaggggatggcgtgggaaggagagggttaaaggtggggccggccctacaaacgcgcgcacacactccttactcagacccagtcactcgcgtttccctggcacttagatgggcctgtgggtggcggaggggggggggtggattgaattggagcctgcgccggagccctttgcaccccaagctcctgcagcccgacctgggggccccgctgtctgaactcacagctccctgccgagccccctctccggggtgcacataacgctccagcgcgcgcacacacctcggacagtcccctcgcgtctcacgtgacacgcggcccggacgtgccaccctgcccacgcgctcacgcacgcgtgcacacaccagcctcctggtcgctgccccactccgtcccgacgcccctgcgaccccgaaggcactcattgactgacacacctacactcattcacagacgcacactccccccatacgccaaccccagacacacattcataaccaggcccgagagaagtacacacgcaccccctcactgcctactcctgctttcgggagcctgagtcattcctgccccctcgtagggttccccatttcccggtgcgcgggcaccctgagacagccttgggaattcgttcgcgtccccttccacctgggtccccttccccagtttgcgccccgtaacactcagccaaggacttcctgtggg

SEQ ID NO: 18391 - DNA, 2300 bp, Homo sapien
ctgttcagaggcaaggggatgaatcacttgacctgaggattaatgtggaaaagaggagggggagagagagggaggagcaagactccatttgatcttcaacagccaagcactgagcaaaaatgtcccccaaaggggtgtcagcattcaacagtctcacatctcctagggaatcagtcattcaggagggtcttactgaaagctctcatgtttccccaaaagtagtgaaggatcccaaggtcaccctctcttccaagcaatgctgccccactttgaacatcaggcagaaacttccctgttccttaaggtacggagaaatggtgggtaaggtgttggggaggaggccagtcctgtgtttctggtactgtcatgtatccggtctccaacctcaaaagatgtgctgattctctctcccccaagcctccctgggtcatgcccacctcctggagtccccagctttgcctttgcctgccaacttgcctcttggttcagctctatttgggagcagagagtccccataggcccctaagggtgaagccctgtcaggctgggacagaaatgtagagctggggccagttcccaggggagaactggggaggactggggtgaaggtagagagaggagaagttaaactttaacatgacaaaaatattaaagtatttttcaaagtactcttaaaaatgtaaatctttatctatatactgatatgcaaaatattccatgacaccttgtggagtgaaaaaaaagtacacattataaagcagcatgtgtagtgtttatataaattatatatttgtgcatgtgtgcaaaagacagagacagagagtatataaggagtgaggtctcagagggtgttcactgaaatgttaatcctgtttggctttagggggtggaatttggggtgatttatacagtcttgtttttacttttctgtgctgcttaaatttcctatataagtatgtttcatctttatacacaggaaaactcccaatgatgctattttcaattggggggggggaaacggatagttttcatcataaaaggagtctaatacattagttaacataaaaggaaaatggagaaagaaaagcctccatcgtcctatctccgaggcagcccttcagagcatgtggtgggtttccttcctgtcagccggctctgaatctgttcaaagcagcttttccatccaggtataataatagattggaaagtgctgcacacgtacaccctctcatgtaaggcttgcagcccccctgaaaagtagatctgtttatttcccccagtctatggatgaggcacgtgaggttgactttcaggcaaggaaaatgacttgcctgggtcacatatacctggcaggcagagccagacctgggactctcagcactggcagcccaatgctacttccagtgcccatgactgccatgcagggtaggggagcttttgtgggccctgccaggcccagctcagggccctgcaaacccctggctgctgctgatgcagtgcgctttaaggaacatttcctgttgtccatcaggttccaggtctgcccccagggctagagctacaagatgcagccaactcagcacatgtggacctctggtggggagaaagagggcaacccgaaaggtcacttagcacagagtctgggcacacagtaggtatcaataaagatcgattgaatgttcatggtcaaagttgcttctagtgtgcccgtgctccgagcctctgagtgccaggagaatgcccagcgagtcccacttgggccatctcggaaggcttcctgtaggagagggcctttgagctgagacttcaaagctgggctgaatttccccgagggtccagaagagagccacgggctggtgtgtcaggcagcggagctgacactcccagaaagcaagatcttcgaactacagggtgcgcgcaggctctcgcttctctccaccatggggggccctgcagtactcgccaagagcgtagaatttgcctagtattagccacgagagggcggggtggggcgaggcggagcagggccgaggtggcggagtgggggggagccggagagcttcataaagccacagcaaagcgctgcgactctagtgacagcggcccgctggagaggaagcccgagagctgccgcgcgcctgccggacgagggcgtagaagccaggcgtcagagcccgggctccggtggggtcccccacccggccctcgggtcccccgccccctgctccctgcccatcccagcccacgcgaccctctcgcgcgcggaggggcgggtcctcgacggctacgggaaggtgcca

SEQ ID NO: 18392 - DNA, 2300 bp, Homo sapien
aagatagggctattgtcccctgcctccttggtcactgcctcttgctgcacgggctcctgagcccacccccttggggcacaacctgccactgccacagtagctcaaccaagcagttgtgctgagaatggcacctggtgagagcctgctgtgtgccaggctttgtgctgagtgctgtacatgtattagttcctttactgctgaccacattgtacccatttcacagagaaggagcagagaaattaagtggcttgctcaaggtcatgcagttagtaagtggcagaacagggacttgaaccaagccctctgctctgaagaccgcgtcctgaatttcttcactagagcttcctcatcaggttacccagaagtgggtcccatccaccatccaggtgtgcttggatgttagttctccaccctcgaggtgtacgctgtgaaaagtttgggagcactgctttataataaaatgaaatatattctacttcctttattttgtggtttacacggttgtcctccctctaaacttactctcaggggcttctctgtcatctgactttcctcactcttgcttcccttcctaggaaaatcctcttcccctatacctgttcccacaaatggcatcccgcgcatgcttgccctattaaaggcagctgacagctgtacccactagctaacgtgtctctggtggttctggacaaaaggcctgcgggaaaactaggattctctattaatggggaattctgagagctctagggtaggaggcctcatgcaagtcttcatgaaccagaaattcctaataaaggagacgggatgcttaactcagagtccaccatcatccttgactggagcacattctgggtggatgcaggggtgacccggggaaggtggctgttcaacattccttctcggacttgaagcaatgccaccgcttccttagtcttggacaggcactgtctggcagggatgacctgcagcagctcttttgtggcctgggccaggaccagcttcccccagtgcctcatcctgtgctgtatgcccagggatgttcaatcactgggaagtggcttaaaaggcccttgaggctcctggatgccagagcttgtctggtcagtgctgcccagtgctcctgtccctcccagaaccctgccaggtgctaacaacaccctcctcctggggtggctggagcagcactgaggctctgaataaaggcaagacagtgggtgttcccgagagatatgtgagaccctgaaacgtaaaccaagctcggtgaggatgaagtggaagggataagtggcccatgtcacttttggggtcagagaagaaacttgaatcacatccttcacctgaggccccacctacttctttccagaaaacttagctgcgcttgaaactgtaggtctatgccacattcatttgaatgaattttagatctttgttaagagccgatttttcattagaattgagcagctgggcacagtactccagcagaagggtaaagggaagggaggggaccagcattgcagcccttttaacggcagctgtgactgccccaggcctgctcctgatcagagactgcaggctgtggggtgtcttcatacacacaagcactttcagatctccatggggcctgacctagtggggcatcaccccagtgaagggcctcagtgtggggactgctggctgtccctttcctggcttgactgcccctgctgactgtgctcttggcactctcttatggtcccagagggggcatctgtccctccaccatcaacctgatacttttgctggctccaaattttgcagtctattttcagatgtaaaatgagaggcggggggcgggggttaattaggaattggccttgggtactaacagggtcactgccatgctagtctgaataaatcctttatcaccactggcgtacagccaacagttccccagtcctctgatctatctggaaccatgcccagcagggactgtgcccccactcccaagccacatcgatgctagggcagtctgctcagccctgagtcctccggggagcaggggggcagagctgagcggctgcccggagcttggcgggaggaggggacaggggagagggaggtggggagatccggctagaggggaggctctgacatctccttccttcctggttcctgcagcagctgctgccactgctcagcgcggtgaggagggagccggtgactcggagacggtgactcagaggcagagcggcgcaagggccaaggagtactggcgtccatggaccctggggtaagggggctgcgtggcagcagctgacatt

SEQ ID NO: 18393 - DNA, 2300 bp, Homo sapien
tcacgcctgtaatcccaacactttgggaggccaaggtgggcagctcacttgaggtcaggaattcaagaccaacctggccaacatggtgaaaccccgtctctaactaaactacaaaaattagccaggcgtggtggcacacacctgtagtcccagctactcaggtggctgagccatgagaattgcttgaacccaagaggcagaggttgcagtgagccgagattgtgccattgcactccggcactccggcctgggtgacagagcaagactgtctcaaaaaaaaaaaaagaaagaaagaaagaaaaataaacataaattctcaggccctgcctagacctactgaatcagcaattctggggtggagcctagcaaatagtgttttttgtttgttttgttttgtagagaccaggtttcactatgttaccaagacgggtcacaaatagtgttctaacaagccctcctggtgatgctgacgcatgctaaagtttgaaaaccaccactctaaccgctgctctgacaccctgtcctatgatttgaagaggagaaaaaaatgttacaccattctcacagctctcagacaagtttctctttcctcctctcttcctgtttacagataatgctacagagcaccccacagaaaacaagggaggcactcaaaagccctgagacaaagtgaccacttaatcctcaacacaagggccaagactagaacttcccactttcagtcatttccaagactgggatgtgacctcagaaaaaggtccagatagaaggcggctctaacagtcagagagtatggatatttgctggggtaagaggtcttattgccagcagccacaaaacctaactgttaagactgcaggcaggctttggaatcaaattaaactggattttttttttttttgagatggagtctcgctctgttgcccaggctggagtgcagcaatgcgatctcggcccactgcaacctctgcctcctgggtgtaagcgattctcacgcctcagcctcctgagtagcggggactacaggcacgcgccaccacacccggctcatttttgtatttttagtagagttggggtttcgccatgttggccaagctggtctcaaattcttgacctcaggtgttccctccgcctcagcctcccaaagtgctgggattacaagcgtgagccaccgcgcccagccgaaactggattttaatctctcttccgccaattactagctgtgaccttggccacccaactggtctgaacttcagttgctgcgtctgtaaagaggagatgcgaatgtctttctcacagggtgctttagatttaaatgatttaaaagatttaaatgagctaacacatataaaaatagttatcacagtgcctggcctatattaagtgctcaaatccattcactaaacaaatatctaccgcacgcttactaacatccagcaccatgccacctgctggctatgctgaatgaacatggttctgcccttgcggagtttaatagaggaaacaagcaactaaacaaatgcaaaattacagattgcgacggggctaaggagtcaagggaagacctgaggtgacatttagactgacacattaagatggagacataatgcaaaggtctgggcgaggagtggtccaggcaaaagaaacgctggagacagacaacatctggacgttgttgctgtgattaccagtcgagtcacaaggaactggacggggtaaggaggccagcgatctagctggggtcagagattatgggaagaatcagtagtagaggagggcagatgaggactagagagcggccgcaagacacgccgtgaggacctgggccactccttacccgcctggggcaggagaccccctcgcagcatccccgccacggccgcagccatctccaccggaagaatggacggaagccgagtggagacggaaagagctaaggattgtggggtagcgaaccccggggccggaagcagtgggcgtacccgccggctgtagccgtaagacgcatgcgctaggccgggccaacggagcccgcctttacctccccactcggcgtccagtctcttagcaacgactccggcttcctaggaactgctcctttctcaaccattcctgcccacaacaccccagcttgctgccagcaaagcccctccacacccctcaaactccagacccttcacatcaatttactgttttcttcgacctcaccccagcaattttctctgaatcaaccccctttcctcctctcctaagtctctgagtttctctctcctcctgccatcctgagttctgccatcctt

SEQ ID NO: 18394 - DNA, 2300 bp, Homo sapien
tccccatcttcagggaaagtcaagttccgcttagtgataagggcttcagtgatgcagacgcccccttcctctggaccctgggctgacttccctgtgaaaagatgagtccaactgtgacacttcctcactcttggaggccttaccccgctgttttccaactgctctacccaccgtcccacctccctactcacctccagacatgatctaaaataaaaggctgctggtctgaggcgggagaggaacgaaaagagaggtcttggcggcccctaaggatggcagaactcaggatggcaggaggagagagaaactcagagacttaggagaggaggaaagggggttgattcagagaaaattgctggggtgaggtcgaagaaaacagtaaattgatgtgaagggtctggagtttgaggggtgtggaggggctttgctggcagcaagctggggtgttgtgggcaggaatggttgagaaaggagcagttcctaggaagccggagtcgttgctaagagactggacgccgagtggggaggtaaaggcgggctccgttggcccggcctagcgcatgcgtcttacggctacagccggcgggtacgcccactgcttccggccccggggttcgctaccccacaatccttagctctttccgtctccactcggcttccgtccattcttccggtggagatggctgcggccgtggcggggatgctgcgagggggtctcctgccccaggcgggtaaggagtggcccaggtcctcacggcgtgtcttgcggccgctctctagtcctcatctgccctcctctactactgattcttcccataatctctgaccccagctagatcgctggcctccttaccccgtccagttccttgtgactcgactggtaatcacagcaacaacgtccagatgttgtctgtctccagcgtttcttttgcctggaccactcctcgcccagacctttgcattatgtctccatcttaatgtgtcagtctaaatgtcacctcaggtcttcccttgactccttagccccgtcgcaatctgtaattttgcatttgtttagttgcttgtttcctctattaaactccgcaagggcagaaccatgttcattcagcatagccagcaggtggcatggtgctggatgttagtaagcgtgcggtagatatttgtttagtgaatggatttgagcacttaatataggccaggcactgtgataactatttttatatgtgttagctcatttaaatcttttaaatcatttaaatctaaagcaccctgtgagaaagacattcgcatctcctctttacagacgcagcaactgaagttcagaccagttgggtggccaaggtcacagctagtaattggcggaagagagattaaaatccagtttcggctgggcgcggtggctcacgcttgtaatcccagcactttgggaggctgaggcggagggaacacctgaggtcaagaatttgagaccagcttggccaacatggcgaaaccccaactctactaaaaatacaaaaatgagccgggtgtggtggcgcgtgcctgtagtccccgctactcaggaggctgaggcgtgagaatcgcttacacccaggaggcagaggttgcagtgggccgagatcgcattgctgcactccagcctgggcaacagagcgagactccatctcaaaaaaaaaaaaaatccagtttaatttgattccaaagcctgcctgcagtcttaacagttaggttttgtggctgctggcaataagacctcttaccccagcaaatatccatactctctgactgttagagccgccttctatctggacctttttctgaggtcacatcccagtcttggaaatgactgaaagtgggaagttctagtcttggcccttgtgttgaggattaagtggtcactttgtctcagggcttttgagtgcctcccttgttttctgtggggtgctctgtagcattatctgtaaacaggaagagaggaggaaagagaaacttgtctgagagctgtgagaatggtgtaacatttttttctcctcttcaaatcataggacagggtgtcagagcagcggttagagtggtggttttcaaactttagcatgcgtcagcatcaccaggagggcttgttagaacactatttgtgacccgtcttggtaacatagtgaaacctggtctctacaaaacaaaacaaacaaaaaacactatttgctaggctccaccccagaattgctgattcagtaggtctaggcagggcctgagaatttatgtttatttttctttctttctttctttttttttttttgaga

SEQ ID NO: 18395 - DNA, 2300 bp, Homo sapien
tctactaaaaatacaaaaaaaattagccgggtgtggtggcgcacacctgtagtcccagctactcgggaggctgaggctggagaatcgcttcaactcaggaggcagacgttgcagtgagccgagatcacaccattgcactccagcctgcgcaacagagtgagactccgtctcaaaaaaaaaaaaaaaaaataggaagaaggccaaacatctatgacaagtggataacagaggcaagtacaggggaaaggaagaaggaggaggaagaagggaaagaaggaggaagaggaagaagaaagaaagaaagaaagaataaggccaaacatccctgacaagtggataacagaagcaagtacaggggacaaagggagtacataggctgtgcactaaattcacagtaggaggaatcagggaatgcttcctagaggaggtgacagatgagtaggcattagccatgaaggtggggggatatggggagaaggcatttcaagcagaaggaatagtacatgctaatacagcccttccgaaactccaatatgcccatgcagattctaattcagtagatcgggtggaggggctgagatgctccacttctaacaagccccctgtgatgccaatgctgctgtcctacccctgcaccccctcccatccacacatactctgagtagtaaggtactaaggtgtgagtacacagtgtgggaaattgtacacttgtggagagtggccagaaataaggctgaaaagcagaagtcaactcatgcttaggcattgggatttatttgggaggaagtttctatcagtgaatgcctgattagatttgttatttaaaaggatcactttggctactcaggaggctgaagtgggaggattgtttgaggagttcaagaccagtctggccaacagagcaagaccccatctctaaaaaagtaattaaaaatactttactttttgtttgttttagaaatagggtctcaccctgttgcccaggctggcatgcaatggcatgatcatagcttactgcagccacaggtacctgggttcaagtgatcctcctgtctcagccacctaggactacaggtgtgcaccaccatgctcagctagtttatttttattttttagagataggattctgtctctattgcccaggctggtctcaaactcctgggctcaagtgatcctcctgcctcagcctcccaaagtggtgggtgtgtaggagagaggtgaacacggccttatctaagacagttgagtgaggatggtgaaaaagaaatggaattattttgaagaagggaaaatcagctgggcattaccactgattgaatgtgtggagtaaggagagaaacaaagatcagttgacaaatcagtacacgtcagggacctggtcatcctgagtgtttcagccttctagcaccccttttctcccccatgcactcacatcttctctgacagttccccatcttcagggaaagtcaagttccgcttagtgataagggcttcagtgatgcagacgcccccttcctctggaccctgggctgacttccctgtgaaaagatgagtccaactgtgacacttcctcactcttggaggccttaccccgctgttttccaactgctctacccaccgtcccacctccctactcacctccagacatgatctaaaataaaaggctgctggtctgaggcgggagaggaacgaaaagagaggtcttggcggcccctaaggatggcagaactcaggatggcaggaggagagagaaactcagagacttaggagaggaggaaagggggttgattcagagaaaattgctggggtgaggtcgaagaaaacagtaaattgatgtgaagggtctggagtttgaggggtgtggaggggctttgctggcagcaagctggggtgttgtgggcaggaatggttgagaaaggagcagttcctaggaagccggagtcgttgctaagagactggacgccgagtggggaggtaaaggcgggctccgttggcccggcctagcgcatgcgtcttacggctacagccggcgggtacgcccactgcttccggccccggggttcgctaccccacaatccttagctctttccgtctccactcggcttccgtccattcttccggtggagatggctgcggccgtggcggggatgctgcgagggggtctcctgccccaggcgggtaaggagtggcccaggtcctcacggcgtgtcttgcggccgctctctagtcctcatctgccctcctctactactgattcttcccataatctctgaccccagctagatcgctggcctccttac

SEQ ID NO: 18396 - DNA, 2300 bp, Homo sapien
ctcctgggaagtggaagtagaatctactcctaacctctagggtgggtgaatgaaataagaaatgagaaagtgacagagaagaagacagcctggaaactgcaacctgggggtgcgctgtggcctctctctgcctctcctcctgcctgtttccgccccacagtgggaagccgggaaactgcaggagatgaacccgccttcctgcaagctgcttcaggtgcccagatttctcagcacgcagcttcgatgtttgcttctggaatgacattaattggcaacctcacaatccctccccgacactgtatcagaaacagccttcaccttcccattaatcctagcatgactgaccgccagcaccctagcacagtaggcttgaaagaaggccaaactccactaaaacactgttagaattgttttctttctttctttctttcttttttttttttttgagacggagttttgctcttgttgcccaggctggagtgcaatggcgcgatctcagctcaccgcaacctccgcctcccaggttcaatcgattctcctgcctcagtcttcccaagtagctgggattgcaggcatgtgccaccacgcctggctaattttgtatttttagtacagatggggtttctccacgtgagccaggctggtcttgaactcccaacctcaggggatccgcccacctcagcctcccaaagtgctaggattacaggcatgagccaccacacccggcccactgttagaattgttaagcaaatacagtaaagtcagaggatacaaggtcaatgtacaaaagtcaatagtgttcctatacactaataacaaactatacaaaaaagaaatcaagaaaatagtcccatttacaatagctaccaaaataataaaatatttaggaataaatttaaccaaagaggtgaaagatctgtactctgaaaataagatattgatgaaagaaactgaagaagacacaaagacatggaaagatatttcatgctcacggattggaagaattactattgctaaaatgtgcatactactcaaagccatctatagattcagtgcaacccctagaagcagataacctgcagcatctcccctctctccattctggagggctccacagagcaaaagggtgtaagatgcatttgtcttaatgatggctatggagagatggtttgtagagaaaaatgaactgaaaatcaaaacatttgggatcagagtgtacctccacatgactgtgtgtcacctttggccaagacttctttgtggtttcagtttcactacaggtaaaggcaccaaatctttgaactagaaagttctaaatttccctttaaagcgatcttcctatgggtttgagcactatcagacagataggtcctctgggatcagatgggttttgtgcacactttcccttatttatttattttaagagacagggtcttgctctgtcaccgcggctggagtaccgcggtgtgatcttggctcactgcagcctcaatctctctggctcaagagatcctcccacctcagccttcagagcagctgggactagaggcacgcaccaccacgcccagctaattttaaaatattttctgtagaggcgaggtcttgctgtgttacccaggctggtgttgaactcctgggttcaagtgatcctcccaccaccgcctcccagagtgctgggattacaggtgcgagccccccgcacccagcctccaccactctcgtattctgtatcttattcccctaggcgcctccagcctgggattgcgcctctgggattcaaaccaggactcaagtatctgaggttcttccttaatctccagatgtcccagcagtcccctttctctgacaaagtctcccttttcacgcgggatcctttccacccccagctccagctccccgcagtgactccgtggggttagcagcctttgtcaggcctcaaatgggcgcctgggtaggacagggagccaggtgggactcgcaaggccgctctgctccgggaagtggtgcaggcgcgcgccctggtggaaaacggcggagctgcaggctccgttccggctccgaccccgaggccgaaggccttccaggtcacctgagagtctccgcccaatggggcggccctggccagaagcggaggaggtggcacccgggaccgagctggggtcttggaggaagagagggtgaggggaatacagtactgggggtgagagaagggttggacagaagagggtcgggtatctgggcatgcgcagggccgcaggactcttggtggggtagcgagggggacggtcccacgactgctc

SEQ ID NO: 18397 - DNA, 2300 bp, Homo sapien
attgattgtcaaattagccatggccacaaagatccagagcagttcctgtgaatccacatccagagccccaagtaacaagaaggcaaaaagcaaaccccgactgatcagaaatctcaatcccccgatgtcaggcggcatctccggcttccaaatacctgtcacttctctagcttggtggctgcttttacagcatttcaccaaggaagaaactgaggcttagaggcacctgacctgccagggtcagtttagcaagtgcagggctggggctagaatttaaatccgtcaacttctagtccacaggtctttgtgcatacaccttaatccaaccaatatttacctggaactgacttatttaataattataacaaggatatcttccatttacccggcgcttaccaggggccccttgggctaagcatttttaggcatatcaattcctttaagcccccaggagaccctaccaatgtgtacccaggttgtccggatgagggaaatgagccttagaaaagagggagatgcacagatgaatccgacgtcgattctggataagaacgtgtgcgtgtctgaggggtaccatgcacatacgcatacacacatggattgattttcaccccgcttatgcactcggtttagctatttttgagttacagtttgagtgtgtcccaaacgggcatgcaggacaggtaaaccaatggcgggggggagtaggggctgtagaggcgagattaaatcagcctaaattcaagtatgaaatcgactgtaaagaggaaaacgaaattttaaaaagccgacggcaaagcgcacagaggagacgaatctgaaaaatgaaagaaatagggaaattaatctgcattcccctgtgaaaaaaggggtcacatggagagatcaacactgcggcatgggagtgaagcatggggccacctcagcggccaggcagaagaatgcgtgggtggaggacggaacttccctacccaccggtgctttgcgggtctcggaaatgtcgacccatccagatcttgagggaagtttttgtgagctccgcgagcgcgctgaaattttaccagaatattgcactgggcatgtgaatttttctcaaaggaatccaagacccctccccaaagttaagaaccttgggtttagttattctggtgagaattagaaaggaatggtggcaagggatagctcaattccttccagaagtgtcccttcccagggccattcaggcgcctgcccattcttcagaaccgggtgctcgggggcgagggtgtgcgtaggctgagcatttcccgaaggacaggagggcgaggagaggcgaatttgagaggtggatttcttaggcactggggttgctacctaaggggaggggcagagtgacagctgctgggacctgggaccagagtaggggggaagcagagaccggtggtgggcagaggctgggagaggggaggagaggaggtggtcacccagaaaggtcagagagggataccccggaagggagagggaaaaaaggacggggaagggtggtggtggagagaagcggcgcggggtgcggggggtgaggcagggcaggggacgggggtcgggggtcgggggaatggcgaaggagggcagccaagacaaatttcacacggcctaggcctagaggcgaactggaaacatacttggcgctcaatcttgtttccttctttcctcccagttccggggcagggctgtccgttcagagagggtcaagggccatcgaggcaacctaagggttgctgcctaagggtggctctgtctcacccccaggacctgcccccttatccattccccctgggtcttagtcctgcgtcctctgctagaccgagctagctccagggcagttttccacccggcggggcgggtcttagaacctgggaatcaccccacccgggcccctctccctgggagtggaggggaccagggaggagcgagggagcgggcggcgcacgccctagttatctttcctcccccactcccgcccaccccctcctcgcggccctggctgggctccggtccagccgagccctcaagggttaaaggcggccgcaggtgaggtgggcggggccgcgagtccgggggaaaaagcagcgctggggagaggatgaaggcagagagcgcgggtgagtcacgggcggagctggccttgttcgctcgctggctcctgcccgccctccgtcctccgccctctcgccagcgctcacctccgccgcctgccgcctgccgccagccgccgggtctggctcgccctgggctcctgccccttaccgctggagagctcg

SEQ ID NO: 18398 - DNA, 2300 bp, Homo sapien
tccgagggctggcgctgggagtgagctgctggagttgggggaggtggctcgtgtgggggccagggggcgggtaggggagctgagatcaagagagaggggcttgaattgaatctaccctcagccccactgggtcttcagcttcctcagccccctcccctcttctggctccaaaggccagaagccaggactctgcagtcccgccccccactccaagctacaggccgcatggcacccacccatagctttcccagctcctctctcccgcccatcactggtgttaggaaaacacattgtctggaggtgcgaatagaggaggaaagggggtctcctgccaggtagggtgctggctgtgttcattgctgtccaggcagggtctaaacacacccctgactgatccagaggccaggggaaggtgtgtgggcctgaaggtccaggttgagggctgggtctttttcctctcccaaactcccccccaaccccaagattctcccatcttttggactggacctgctacctaagcatatggaaccgattgaaagaatttgtatgctcaccttataatttatgcaaatcaactctgtaattaactataatttggaggcatcctttggtatttgagacatttatccatgaggaaatgccctagtgataatgctcccgtattaacattatttactccacctgtgtggtctcctcagcttgtttcccctccccactctgattttctgtgctggaaggtggggagggacagggaagcccctccctggagcctgcctcagtcctgatgcctgggttcccccagggggttgtgctggccctgtcctcccaattttgcctaagattgaagaaagaggtccagctctgcctcctaagccctctaatactctattctctcctgcttgatgggtggctttctgctgagcttttacctcttcagggcctcagtgttctcatctctgaaatggggagaggaaggacctgtcagggcctttatgggataattgctgaaaagttaatgaagagactgggaatccccagtctagaggttgctgagggtataggggaggagcaggagaagagttttgggtaaagactccctggctcatcctgggagggaggtagcatgtaagtcttggggtactgggttctggtgtgtgtagagggggtacaactgctcctgtcctctgccaagggcattgggctgtggtcaaaaacaggatgtcatcccgtgaaaagtccccaggccactctcctatgtgggtcagagttcacagcttcagtgagctttgggaaacaagtcttactcttctgtttcatctccgttctccttcctggtcttttgtccatctctgccctgggacatgtttgtgttagccagtatacctaaacttacaaccaccctaaaattaggctcatataaatagagatctgggggctccccctaaattcaccttcaggccccttctcccttttccaggccaccttcctaccctcttcaccctcctggagttccaggagtcctgaactgtctgtagcagttcttggctggactctgcctctggtctttctggtcttaggtgacctcttgtccatcctaagcttccccactccatccaaagtcagggaaaaggtcctcccttcccatttgacaatgagagatcccaggtccaaaagatagattacactgggtcctcttgggggatccaagttgggaagtgagtatgtaaaaagaggatgaaaagggagcgagagaaattgtggctcagagaggccaacaacactgacatgaagctctgcaaggaggaactgacttgaagacgtgtggtgtgtgtgtgtttgttgggggcatgagcccttcaggtctcaaaaatggaacttctttctctcttaccaagtccatggaggaaaactcaggaagaggggatggaatttggagagttccagctatcccagctctccaccctagcaatgctgtcatttcctccatcctgcaagaaccactttgtccctctcccactgcccagccaactctgcggaaggaaggaagtgcccccagcccccactcccagctgaaatcctcctttcctggcagacctcacggactcagatctcacctcctaccactcccctaggagagctgggggccactgtttcctggattatcctaaaagcttctgaggccgtgaggacttggcagcatccctgctccctccttcacctccccctttggcactgcctgtcacctcctttataaagcctggctcttttatcaccgccacttggccctcactgccgccgcc

SEQ ID NO: 18399 - DNA, 2300 bp, Homo sapien
ctgggggtggcagaggctgcccctctggccggggtgggggcctgtctggaatctgccctgatcctaccacccacagggcagccatcttgatgcccagcatagtggacacattcacttggttccaagagtcagctgatcccaggcggacttcaatgtctagaggaagcttcatctttcaagtgcctagagtatggattcaagaacctgaaggccaggcgcagtggcttatgcctgtaatcccagcactttgggaagccgaggtgggtggatcacttgaggtcaggagttcgagaccagcctggccaacatggtgaaaacccatctctaccaaaaatacaaaaattagccaggcatggcggtgcgcgcctgtagtcccagctacttgggaagctgaggcacaagaatcgcttgaacccaggaggcagaggttgcagtgagccaagatcatgccactgcactccagcctgggtctcactcagacagagtgagactccgtctggaaaaaaaaacaaaacctgaggcagccagccacggtggctcacacctataatcctggcactttaggaggccaaagtgggcagactgcttaagcccagggattcaagaccagcttgggcaacatagccagaccccatttctacaaaaagtacaaaaattagttgggcatggtgagggtgcctgtagtcccagctacttgggaggctgaggtaggaggatcacctgagcccaggaggtcaaggctgcagtgagctatgatcacaccactgcattccagcctgggagacagaatgagaccctgtctcagaaaaaaaaaaaaaaagcctggcatggtggtggctcatgcctgtaatcccagctgtttgagaggccaagatgagtggatcaccggaggtcaggagttcgagaccagcctggccaacgtggtgaaactccatctctatgaaatacaaaaattagccaggtctggtggcgggtgcctataatcccagcaacttgggaggctgaggcagaagaattgcttgaacctgggaggcagaggttgcaatgaactgagatcgtgccactgccctccaggctgggtgacagagcaagactaagtctcaaaaaaaaaaaaaaaaaaattgggtgtggtggcacacgcctgtagtccaagctacttgggaggctgaggcacgagaatcgtttgaacctgggaagtgaaggttgcagtgaactgagatcgcaacactgcactccagcctgggccacagagcgagactttgtctcaaaaaaaaaaaaaaaaaaaaaaggtaaagcacccagagttagatccatttctcaaaggctgtgaaaggagttaagtcattcattaagaagtgattccaagccatgtgcggatgagaaagagacagcagtgaagctaggggattctcctgctgaatccttcctattctgtggtgttcagaaaaccaagattcgtagaggggaaaaagtggcattgatctatgaacctgggacaactagaacccagcatgtgggacttcctgttgtgtaggtgcagaggagactcagcctcctgtagtgcctggagcattggacttcagacctctgctcagtgcctgtgggcgcagcctagaaccctggcagagagggcacccttgcctcttccatctctgagtccccaaagttctggccctttgcattatccttgattgagcctgtgagcttcaaggacaggagataatataaagataaacaggaagtgccaaattagagacacgaagtttgttgttttagagggcgcccagcgccaagcagcggtgccaggttggcagtcctggagcctggtgtctgcctgctctctgcacagccagctgccccttggaccacagcaggagggccctctgggcaggaaaggaggatgggatggagcatggcagggaatgggttaagcaagtcattcttttttacccaccagctgaacatttgcagtgtcacctctgattcattctgggcatttagtcactcattccacagatatttttaagctccttccctgttccaggcatgtgcttggtacagcctcttcccccaaagctaacatcctcactagaatgtaagcttcatggaggcagggggtttcgttcattgcactactcccagtgcttggaatggtgcctgggactctataagtgctttgtaagtttgttgaataagttaatggaaggacgaatagatgaaggaaggaagggaagaaagaaggaagggagggaggaagggggcccttaagtgggcataggagggtcccatgatttttcagt

SEQ ID NO: 18400 - DNA, 2300 bp, Homo sapien
acctctccctgacctgggggcagagaggagagctcggggagggggaggaagttgggagccacctcgtctccaggtggggcggggtcccagcagcgataaccatcttcttggcagctccaacctgttctattggtatttttttttttcctagaggagaaaggtgaaggccttggcggggagttattctggctctgaagtgtccttgcagctccccaggcccctgcaggccttgtgcaagagctgtaaatctctcaccacccacaggcctgggggggcctgccgctgggactttcatgtccggagattttatgcctttgctcctctgttgggctccatagctcctgcctggggcctctccctagcctgtaaaaatccagtcccataaatctctgctgccccccaggagccaagcagagttcttcccactccaactcccactcataagcatctctcccctcaagagaccacagtgaagtggcaaggtcgaagcaaaaggtttccaagaagggcagcagctaaatgggggtcttcctgggacctcctccggcatcagtctctgcttgggtgggattggactctgtaactgaatggtctgtttccagcttcaatgctggaggggcttctgggggtctctggtggggaggcccttggcctccactgcctattagtatccacctgagcctcccgagacaggtggctgtctgtctgccaagcccccaggtgcattggaggtggcaggcagcccagtgactatgctgctttcctggatcaaaatgggaaacccaaggaaagggaaaggcataacagtggctgaggcctggaggctcatggatggactgcacggtccagtggattctggggtaaaacacagtgcttaacttcttagtctgatgggggagactgtgcactcgtccaggacctgggcattgagaaaggggccagattgccggcactgggtaggactcagggcagggatgatactgtgcctgggaacgtcccattagagaagaggagcaccagactggcttgggaaggaggaagaggcgagagctgcaaagggagcagggtgtccccagcagaaagaacagtttgttcacaggttcctaggagagaggatgtgacctgggtggggggacgccagcatgtttgccaggaaggtgaggagcctggctccacccttcctggaaagacatgagaaggagagagtggccttcatgctgaaggtggggagaggtaaggtgggcggtgggagggagagctctatggtggaagggcttgagtgggatgcagctgctcaggagagaacccaggccaaactctcactgaccctcctggcctactgggatctcactgccagatgagcagacattgggaagcccaggatctctgttcaaaagtcatctcactcacccacccgcatccccgccatgtccagattctgacttgcatcccatctccccatgcccactgccaggctgagctactgctcatggctaccatttattgagtacctactgcatgccaggcactgctccaagctctttacatgcgttgactcattcaagcccattttccctatgagataggtcctataatcagccccactttgcagatgagaaaactgaggcatagtgagcttaagtaacttgctcaagatcacaccactggcttcacagtcaggattccagccaggcacctggctctagagcccatgtctccacctctgccctctgctacagaagaggcttcaccaccaaggcccggggaaagggtgtcctctgtgcctcctcccaactccttcagaggccagtggggttggccctggacatttggagagaagcctgccagttatcctctttccacagggagggggcagttgtagcctaacgttctggtgctttctaggggtcctctgccttttggggtatgctcacctcaaaggcagcatcagggacaagctcctgattcccacggggtgccctgcttccgctagtgcccagcaaccatggggaaactgggcaatagcaaaagtgaaactgactcagccggtttcccacccctgccaagggaaatggggagcagcctcggctggacaacaaccaattaggcactttttattgcccacgctgtcataatcctcagagcttggctacgatgaaggagaggaaataggataggatggaattccaagatgcctttagagttcatcccagccattcccctgcttctagatgggaaagttcaaataccatccacaagaactttcctccaagtgaggcccttagccctggaagtcaata

SEQ ID NO: 18401 - DNA, 2300 bp, Homo sapien
cgctctgtcacccaggctggagtgcagtggtgtgatcatagctcattttaagttcaaactcccaggctcaagtgatccacccacctcagcttcccaggtagctagaactaaaagtgcgcaccaccacatgcagctaattttttttgtagagatggggttttgccatgttgcccaagctgggtctcgaaatcctgggctcaagtgatccgcctgcctctggcttcccaaagcactaggaatacaggtgtgagccaacacatccggccatggatgcataggggtttaccagaagggaagggtcacataggaagtcaactagtggaaaaaagcgtaagtgtttaggaacctggaatctttcctggagggaaaagggtaggatttgtaggaagggaacgggggtagagggaggagataaagcatgaaagatacaccagtaagagtgtgtcctctggtggatgctgaggttaagaagaaaaaagagtgggaggactttgcctagaaaggagtttgggctttatctaggagatacggatcccatgaaggatctttactagaggagtattattgtctaaagtcttgtttttcaaaggctaacactgagaggagaagactggaagaggctattaacatttattcagcaattactgtgtacccggtattctgctctgcattttgtattatcacaccaaccttttctagcagtgtttttcaaactgccagtcatgatcaacaagaaggagaataagataggataggataagcatagaaactatcagtgcgtcacaagtagtaagcattgttttcggaaactttatgacactctcatacaaatagcagtgtactggtctgtatgcaaaatgtatttctcttgatggactatgtttttttttgtttgttttttttttttttttttttaagccatcgcgctaaggtgtaggtgtgattaacctcgttttactgatgaggacatgaagctcagggagtttcggtaccctgcctaagttagtgggatgtgtaggtttcaaacccagactggtctgaagccagaatggattccctcactaagctaggcagccttcccaagttctcggaagagacttgggagcaaagataaacctacccgcctagtgcctaccaagtgctttacctcatctcaagaaggtaagggtaagtggggcagaggccaagcagtacttctcaaactcaagcgtgcaattctgtccacgcgaggcccttgctaaaatgcagattctaggcacgccccgtgaagtaccgagtcggattaggagaggcggccaggggagcctgcctttagaaagagcttcggatgattcagatgcacacgtttgggaccgtgggctatgggggtcgccgcaataaccatgtgaggattaacgggggcttaaccgattgtgaaaatccccttagaagtgtcgcgtaaacaaccccaactcccactatggtgccggaccccagtgcctcactgtacaaagtcgcccctccccaggcgacaacgagagagggactaaataaaaggttgatggctttccactcaccaggcatggggttgagtggcagccggctactgccgaagagcaggtaaaagctcctgccacacctgggcgagactggacttagggcgcaatgtatatgctatttctggggcatttgtgggcctcaccctaaggacttctgattggcttcagggcagatctatcattcatcctctgggttagaggtgggtggaaggtcaacctcgaccaatacaaaagcactcttcggctaagcccctccccttccagcttcctgttgctgtacatcaaccacccagcgggcgggactttgcctccctccaattggctgatgcacatgtcactcattattcaattggctttcggttggtgcgctctaccgtccatcagtgacattgcacagacctattggtcaaatcaacgtcgctctagacgcctctggttgattggttaatagtgctgtcggtccccaatgttccaagcgcttattggtgaaggctgccgtcgctcgggcggtggcgggctccgggattggcggttgcttggcgggcggtgtcaggctctcggtggcggcggaggcggcggaggccagggaggaagatgtcgtaatgagcggtgggtcccggccgctgccggcggggtcttcccggcccccaagggtcaggaagacgggcagaggccgcggggagagggagccgaggccgggggttcccccctggggctgggtctggcgtcggggcccggcttcaggaggggcgggggagggag

SEQ ID NO: 18402 - DNA, 2300 bp, Homo sapien
atgggggtcgccgcaataaccatgtgaggattaacgggggcttaaccgattgtgaaaatccccttagaagtgtcgcgtaaacaaccccaactcccactatggtgccggaccccagtgcctcactgtacaaagtcgcccctccccaggcgacaacgagagagggactaaataaaaggttgatggctttccactcaccaggcatggggttgagtggcagccggctactgccgaagagcaggtaaaagctcctgccacacctgggcgagactggacttagggcgcaatgtatatgctatttctggggcatttgtgggcctcaccctaaggacttctgattggcttcagggcagatctatcattcatcctctgggttagaggtgggtggaaggtcaacctcgaccaatacaaaagcactcttcggctaagcccctccccttccagcttcctgttgctgtacatcaaccacccagcgggcgggactttgcctccctccaattggctgatgcacatgtcactcattattcaattggctttcggttggtgcgctctaccgtccatcagtgacattgcacagacctattggtcaaatcaacgtcgctctagacgcctctggttgattggttaatagtgctgtcggtccccaatgttccaagcgcttattggtgaaggctgccgtcgctcgggcggtggcgggctccgggattggcggttgcttggcgggcggtgtcaggctctcggtggcggcggaggcggcggaggccagggaggaagatgtcgtaatgagcggtgggtcccggccgctgccggcggggtcttcccggcccccaagggtcaggaagacgggcagaggccgcggggagagggagccgaggccgggggttcccccctggggctgggtctggcgtcggggcccggcttcaggaggggcgggggagggaggattcccgcccggaggaggagcggggctggccagccgggcggaggcacccggaagggggcgttcgactccccgccccctcggagcccgccgggcgggagggcggcgcttccgggggccggcgagaggagcgggcaccggggtggcctggcacccctcggacgggtgccgacccacttcaacgccgctctcccgcctgggcgaactatgcctgggtcggctctgaggaggcagccaacagcccttgtgttcgccccgtgtctgagaggccttcctgcactcttaactgtagatgcccaccagcgattcagggctccccggagaacagagaggggcgagggaacgcttgagacccggacgctgccaaccagatgggcactgctcggcatcgacgacagcccggttactgatatatccccagtcgggcgatggtgtcaggacacgagagcactccctgggcagatgacctctcaccggggagtgggcaaaaaccttcctttaatgtttttacttggatccttgatcttccagctagatatctgcaagctcttagcagaattgtgagaagtttgagaacttcttgccagagctcccagcctgttacttgacgccccgtaggggagactactgcagtcccaaagctcaggcgcaaacaatcttaaggaattacagaagaaataaaacaaaatagatactcgctctcttcctgtacccacctccatccccattgctgacttacggttttcagcctcttatccatgcttcttatgtttccttgccagcggctttctaattttagttcagaaggaactatgttttctcctctgggcaactgagaaacctgtcctcactgcattccttggttttgattgcaatatcctgtcatgtttgtttcttaattaacttcatccaaggggactcagtctggcctttctcagtgcattctcccaaagttctttcttcttctgaggttacttcttgttcacttattgtttcctagagaaaggtatgagccagtagatctgctttaaacaatgaattggcccaagtttcccgtttacagatttcattacagatggacactgtttcaaggtgcactggcatgcactgtctaaaacggtttcatgctgtaccccagaaggcattcagtttcacagtggagggctgtattgagttggtattctggatgatacaatttttagggctagaaagtttagagtgttggctggctcacaggctgcaaaggaaataatggtggagtccagaccacagcagtaatttcaattactaacacaaagaaacccattgtctgcaataatgaatataactgcagtgtcttgttttgttttaaattcttgtgtgc

SEQ ID NO: 18403 - DNA, 2300 bp, Homo sapien
gaggcgggtggatcataaggtcagaagttcgagaccagcctggccaagatggtaaaaccccgtctctactaaaaaaatacaaaaattggccgggtgcggtggctcatgcctgtaatcccagcactttgggaggctgaggcgggcggatcacagagtcaggagatcgagactaccctggctaacatggtgaaaccccatctctactaaaaatacaaaaaatcagctgggcatggtggcgctcgcctgtagtctcagctagttgggaggctgaggcagaattgcttgaacccgggaggcagaggttgcagtgagccgagatggcgccactgcactccagcctgggtgacagagtgagacttcgtctccaaaaaaaaaaaaaaaattcaaaaattagcagggcgcagaggcgggtatctgtaatcccagctattcgggaggctgaggcaggagaatcgcttgaacccgggaggcggaggttgcagagagccgacctgaaaagagctgccaatggccaaagagaaaaaaagagccgacctgaaagagctgccaatggccaaagttgacctttagccttcaaaagtgtcaaggtcatgatggtcaagtaaagaatgaggaagtcatcctggccaacacggtgaaaccctgtctctactaaaaatacaaaaaaaattagccgggcgtggtggcacgcgcctgtaatcccagcaacttgggaggctgaaacaggagaatcgcttgaacccaggagttggaggttgcagtgagccaagattgccactgcactccagcctggtgacagaacgagaccctgtctcaaaaaaacagaaaaaaaaaaaaaaaaaaaaaaggaatgacaaagtgtttcagatcaaaagagactaaggagacaactaaacgtaatgtgtaatattggatcagatccttttgccacaaaggaattagtggggcaagtggtgaaaacacagtggggtcttggaattagcagtgtgtttcactgctaatttcctgggtttgacgattgtattgtggtaatgtagaatgttcttgtgtgtaggaattaaagcgttcagaaatgacaagggggatcatggtggcaatttacactcaaatgagtcaaaaggaaaaaagttctttgtaaaaaaaaaatcctgttgtgattttgatttgggtaatttttaattcctggattatttatgactgtgcttcttctcacttaaaagctaacaaacatctcatctctttaaaaaaaattttttttttttaaatagagacagggtctctgtcacccaggctaaaatgcagtagaatgatcatagttcactgcaatctcgaactcatgggttcaagtgatcctcccacctcagcctcctgaatagctgggactacaggtgtgtagcaccatgcctcactaatttttaatttttttgtagagatggggtcttgctatcttgcccaggctggtcttgaattcctgggctcaagcaatctctagcctcagcctcccaaagtgctgggattacaggcataaactacctcacctggcccatttcttagtaaatatgcaaatctcattcccagttttctgatatgtgcccctttttcaaatcactgatattttatgtctgattttgtgtgtgtgtgtgtatgcgtgcatgcatgtgtgtgtgtgtatttgcatctgaaggttcagcaagctttttttataaagggccggagagtaaatattttagctttgcggggcatattgtctctgctacttaactgtgctactactgtagtgcaagggcaacacaaatggacgtgtctgcactccaattaaactttatttacaaaaacaggcaggtgggctagatttggcttcaaagttggtcacagactgcaaacctctaatatagaatacaaattttttaaaaatgtacgtgtccttgacccactttcagggatttatttagctgtaagattggaaacagcctagatatatacagttaacaaggtatcagttgtataataatcagcatgttgggatgttataaagctgtgtagtcatgaaaaaataatactgtagctaaatctttctgcatatgtatcattatttccttagggaagacctgggttttagtcctgtctccatcaacctcaagaaatgggacctcatggaagggaggggaggcaatgccgaggatgtgctcctgagcaggtgccacaattcttcacctgtaaggtaggtctgatcatgggaattcacagatatttgtgatagatgacttataaaaaatcacctggcaacataaaatatcacc

SEQ ID NO: 18404 - DNA, 2300 bp, Homo sapien
tacatccgcacgccttccggtgaggtgcagacagtccttgtccaggacagccccccagcaacagctgcagccacctctaacaccacctgtagcagccctgcatcccgtgctccccatctgagtgggaccagcaaaaagcactcagctgcaattctccgaaaagagcgtcccctgccaaagattgccccagccgggagcatcatcagcctgaatgcagcccagttggcggcagctgcccaggcaatgcagaccatcaacatcaatggtgtccaggtccagggcgtgcctgtcaccatcaccaacacaggcggtgaggatggcccctgtggccagggtgttggcagtggtacctgctcctagcaggtggaaactatgggctggccccgggatttccagtaacaatagtgaggatgctgtccatcatagcttaagggtacgtccacctgcagcttctcacctagtccttacaatagcactcagagatagtttaaggcacatgtccccatctgacagctgaagacagagaagatagatgtactcggaaaactttccaactgacatccaaacgcaaagacggcttcttgaaggagaaagccttgcgttaaggttggaagaaaagaagggagccctggcagtcagaatagtttgtgctgcacttcagttcagtggtgagatttatgctgtgaaaccagccttgcaaataaccaaaggaaaaattggagcaacctagcaaaaatggctccttatgtagggggagctctctgaatttctcttcatccttaatgaattttttttttgagacagagcctcactctgtcgcccaggctggagtgcagtggtgcgatctctgcttcagcctcccgagtagctgggattatagacgcccaccaccacgcccgactaatttttgtatttttcgtagagatggggtttcaccgtcttggccaggctggtcttgaactcctgacctggtgatccatccgcctcagcctcccaaaatgctgggattacaggtgtgagccaccgtgcccagcccatccttaatgaatgtttagcactttaacacatttgcttttccctcttgaggtgacccccaagaggataaggcatcctagaggatctgatttttcccaaagcccatagaactgtgtcctcttttgtgttttttggtttttttttttttaagacatggcctcagggcctcgctctgtcatccaggctgaagtgcagtggcacgatcatgacaatgcagcctcagcctcctgggctcaagcagtcctcctacttcttcttcctgagtagctgggactacaggcatgtagcaccatgcccggccaattttttagttttttgtagagatgggggtctccctatatgcccaggctggtcttgaactcctgggcccaagcaattgtcctgcctgccagagtgctgggattacagctatgagccactgtacctagcctgtgacctcttgtctttttaacagaaatccctggagactttcctaaaagcagagttggtatctcacaggggcctaaggttggaggagattcaggaagaaatgtcttaagacccttcccagctgaaatcatgttggcaatattctaaagcaaattctgcctacatagtacagtggttcagggcactgactttgaaatgggcttcctgggttcagatctgggttctaccacttactagctgtgtgatcttgatatgttattgagcctcagtttcttcatctgtaaagtgctgatgatagtacctattttatagggtcatggagattaaatgagtccctgtacaaaggtccttaaaatgatatccaacatacagcaggctctcaaaaatagctgctgtgattatcatctttgtcatgtgcagaagggcagaagggttgactcgaggtttcaggcttcctcaccctgaactctgcccctctttgtccccacagggcagcagcagctgacagtgcagaatgtttctgggaacaacctgaccatcagtgggctgagccccacccagatccagctgcaaatggaacaagccctggccggagagacccagcccggggagaagcggcgccgcatggcctgcacgtgtcccaactgcaaggatggggagaagaggtaattcaaggagaaggcccaagccacaaggctggcctgtgttccccaagcccctcctggacagttgtccagagctgcaagctggcacagaccaggcaaggaagagctggcagctctgtgccaccttgccccctgcctccttgtgctctctgacctgaccccacatcctca

SEQ ID NO: 18405 - DNA, 2300 bp, Homo sapien
actcactactgcttacacaggttcaactgcaggggcttaggagggcaggagtacagcaatgttcttatacagaaagacaacttcggccaggtgcggtggctcacgcttgtaatgccagcatttgggaggctgaggcaggcggatcacaaggtcaggagatcgagaccatcctggttaacgtggtgaaaccccatctctactaaaaatacaaaaaattagctgggcgtggtggcgggcgcctgtagtcctagccacttgggaggctgaggcaggagaatggcgtgaacccgggaggcagagctttcagtgagacgagattgcgccactgcactccagcctgggcgacagagcaagactccatctcaaaaaaaaaaaaaaaaaaaaaaaaaaagaaagacaacttcaacaggaaagtaaatctactcaactttctctcaattatgctgatggaggaaaatgatggcagcacaaaaaaatccaaccagtggagaatccatagaccaatatcattaagccttgagacatgtattatttctttgcagcaaaattgtcttccagattctatctggctcaagctatgtacacataaaggatgacaggtatctaatgtagggcttcatgaagctcagctgtaatgcagacacctggccaggccaggaagttccccttacctggcacagtcctgggtgcctgcctagatggctcttgcagttccccttcctgatgctggtggaaagcagggctacagagaggtctcgacccaaggccgccccagccagctcagaattggactgggcatgagtgggtttcccatttttcagccttgcatccacagcctggaaaggctatgcacagccacctgctcagtgtactctcagttggcaattgcttgcattgacctaggggctagactcctactacctagcatgggcaaaatgtggaaaaagggaagcttgacaaagattggggagaccctggagaaatgggacattggcagccttgctatctaccaggacactggctcctatgaactccagtgcaccatggcaggggaaaccatgagcaaagggagtaaaatgctctgacccttgcttaaataaatgaggctggagggaaggggtttaaaactagaagaggtggcgggcgcggtggctcacgcctataatcccggcactttgggaggccaaggcgggtagatcacttgagatcaggagtttgagactagcctggccaacatggtgaaacaccgtctctactaaaaatacaaaacttagccgggcgtggtggcgggcgcctgtaatcccagctacccgggaggctgaggcagagaattgcttgaacccgggaggtggaggttgcagtgagccgagatcgcgccactgcactccaacctgagcgacagagctagtctccgtctcaaacaaaacaaaacaaaaccaaaactagaagaggaaaaccactctggtctgggataccttggtcccaaatttccttcttcccccttcccattcagccatcttccttctcacctcaccgtctcttcctcaccccactgcacctccccactcggggcatggtccacaagtcatttcaacctctcccactctcatgccctaatttctccccacaaccagattacccttttctctatgtgtccccatcaccttgcctcagagtctggcccctaattccattttccatttttcttttcccattccactagtctcccttcccagggggtacttcctgccctaagctcacctacaggcacctactatgggccagccacttaatactgactactcccctcaagcccccgggacacatcctccgccccgcctgagctgcaagagatcctcctatacctttaaccaacctccacgtgcgtgttaaccgcggtgacagcatttccttgtctctctgctcccgcccccaaaggcgctacccattggccgctgggttcctctgttctcgctctaattggcctcgttaccgaaaagctccaaccaatgacctctccgtgtctgtctccctcctccgatcctggaaactcattggctccgaggacttaggacctgttagcttggttgggcgactggcaaatccttccttccccggggtagaagtccagggtgagaaattggttccgaactcaaaggaacccagtgccgggccacagccgggtcacgtggccggcggccccccatgacgtgctggctgcggggcgtcacggcgacgttcgggcgacctgccgagtggccaggctacctcagtcacctgtgtggtcgcagtgctgccat

SEQ ID NO: 18406 - DNA, 2300 bp, Homo sapien
gtcacatgtacaagctggctctggcttcagtcccagctgtaccaatgccagcgcctggcccccagggtgagtgatttaacctctaagcctcagccaacttgtctgaaaaatggggataatgacagcacctgtctcaggtgatgataggattaaatgaacaaccttagggaggacttgttctaggggctgcctgccttaagcaccctataaatgttagctattaacactgggcagggctgcggtgtagggaaagtctgagatcctctgtggaggcctcatggattgagtaattggtgagaccctagaaagttctgtgtagtgggacggggtaggggaaagaggctttgggtaaggcagcacccctgagcctgacttccatccctccagctcctggtctcccttactcatcatttgaggtccccctggctgggacgaggcacctaacaaagcctcccttgtataggtctgtttgtttcactaataaattccctgagcaacagctcctggggtggggtggcccagcagcctgccaggagctgacctggaagccgcaggaccacattgtttagtggccaccttggtctctccctgtatttctaccacgagctccagagatttggccaacatttttttagttcccagctcttatggcttgagaaagagctggacctaacctcataaagtgacagctttctctcctctttcttatttatttatttatttatttttgagacggagttttgctcttgttgcccaggctggagtgcaatagagctatctcggctcaccgcaacctcggcctcctgggttcaagcaattctcctgcctcagccttccaagtagctgggattacaggtatgtgccaccacacttggctaattttgtatttttagtagagacggggtttctccatgttggccaggctggtcttgaactcccaacctcaggtgatctgcctgcctcagcctcccaaagtgctgggattacaggcatgagccaccgtgccaagcatctcttatttattaattttttttttcccctagagataagacctagttctgtcacccaggtggtagtgcagtgccacaatcatggctcactgtcgtcttgaactcctggactcaagcaaccctcccacctcagcctcccaagtagataggactacaggcatgtgccaccacagtcagctactttttgtttgttggttggtttttttttagacatggggtctctctatgttgcctaggctggtctcaaactcctgggctcaagcagtcctcccacctcagcccccaaagtgctaggattacaggcctgagccactatacccaccttctcctttttcttaaaccaaagctgtggggtatggtggagttccttataaaggaagggggaaggaaaccagtattaaactgagcacttactatgggacctctcataggccacttaatactgaccactccctatgagataggtattatttcagcccccttttacagaagaggaaactgaggctcagagtacaagcaaatgttcccaaggtcacccagctactaaggggtagagcccgagtttgaatcttaatcccaaaccaaaccactgaaactttggggtcaatcaccaaaggtctgccctactctcttagagcacctgacgggctctctgttgactggagagaactgaccactgaggtgtaactagctccttctgctgccccatccccatactaaggctagtttgatggtaaaaattagtgacccagttcctacattgtcacacctgggaacccttcctgaagcttgaaaggaacagtttgagcacaaaggtccactttacttacatgaaggaacataaaggcatgagaaacagtcatctcaataaatgcaagacatgagcataaaagaggttctctgcctttccagcgttgttattacagagagaaacctacaattattttgttaaacaaaattcaaggctccaggactcatctctggagctgatatgtcttaaatactattatagtaggaaagggagaggagaaaattccccacccactcccccgatttggcccgtgtagcttccctttgagggtgtgtgacttgccatctgcaaaagtcatggccaaaacaggaactaacaggccaaactaccatcaatctagtcttctacagcaccctaacagagtgccagggtcctctgtcccctccgcacctgagggcaaagttccaggaagtttactgccggtgttaggaggtgagctcaagttcagtgtctctgcctctggctccacagaaaccagc

SEQ ID NO: 18407 - DNA, 2300 bp, Homo sapien
cctactgtatgtctggtctggatcagtgatacataattctgggctctaagagctaaaagtctgtaagtggaaaccaatcatggtatatatatcatgttaaatagaagtatatgagcaggttctatgggaacacagaaggggaaacaagaaaactcctggcggggtgggaggtgtgatcattaattcaggttctgagggatgaaaagaagtttctcttgggtcgcacaggtgatgggggggacattgttacccaagagcacagccagcactcctaatctcacccttctaaggcagcctcatgcctacaaaggcaggcagagaagagcctagtgttcagggagagttggcaggggtgggtgtgcatgagaggaggctgcagaggccccatcctaggagagccaggccaagcgggttctgctgtgggctgtggggaggctttggaggactgtccacccaaggacattttaagggaaggggggctatttcagatggaggagaatacaaacccaagaggccatcagaagctggagcgagtagaagcaggattggaaatgggggacagctttaagagttggtgagctgggatttcaaatgtaacttagagggagagccagggaaaggggggattttatgccttttctctaccccgtgcctcaccctttgcctgacacgcacacctggtccatggaggaaggtagctggtgggtggattgggcacctaagctggtagcactgggcccaggaagtggcagagacactgagtatgtagcagatgttttccactctccagcgatgcccatccgaggggagagagaatgcaagcgcaaataggacaggccacctccgggtggctgcaaaacaacgctccccagacacggagccatctgcaagagcagccctggctgagcgctgcacacagcttggccaatggtgggtttgcaggggcaatgagactgcagatcggtgaggacgaaggcccctgtgcacacacactctacccctgtccccaaccgtgtgcccatcccctgccttcttgcccttccttctcttccagactcactagggacccatctctcctttccttgagaacttgctccaggttttgccaactttataatacccaggaaggccctttcaatagactgctggacatctgggaggagttgaagccagtggcactttgctagtggggacactggcacaggtctctttgagagtctgataaaagtataatctatgcagaaaaagcaatgcccctctgcccacaaacacggaattctgcataagatctcaagggccttgaagcccacctccaagcaaagtgggagagggatgacaatgtttgaggttgtggtgggtctggagagcctggcccgaggagaggctgtgccctttttttttttctccctagggagatttttgaagaggggctcttcaggtcaggaggaagccacagcccccaacccagtccccactttgaggcttgaggcaggggagggacagcctgggaaccggtctgccaaccagtttaaccgggactggtttcgactcagggagttcaaaggaagctggggtgcaccccgtcctacccagcctgccaatggaagcagcagcccttaactctttcctggttgtgccctgggcaacatccaggtggtggtccatgctggagaggggtctgcgcctcctcagaagatgaaatgggtggggtgaccctggctatagctgggaagtgcaaccagacacccaagagtggggaaactgagcgagagcctcctgtgctccctgaccccagatctcccttgggattccctcctcctgcgtggcggtccctggagaaccctggcttctgggtggatgcaggggcgctgggattggatttctggcatgatgaatattcatcagcttgagccggcctctgcttctgtttacttagccgggaggggctgggtttcaggttcaccttgactccaggagctgcagcagagcaggtaacagctcttgcacctgtttctcttgcacctgacgtgcagctgctcctacccacctctcctggctgagccttgcctgatacagcagcccggaggcaccacttgcttcccgagtctcaccctcccaggcagctcctacactcaactgcttctctaggaaaggtctcacctccagcctggagcagtcgggattacaggtacaggcagagggctggtgggtggggaaaccaaggcatagaccccagtcagagcacctggttctgcctccagggctgacaagcccagcaggaaagaggaacccaggcctct

SEQ ID NO: 18408 - DNA, 2300 bp, Homo sapien
gcgcctggcccatatatgatatttcatatagggagagtttacaaagcatgagaaatacagccacagtatgttgtaaactgtcatgagttactagtgtgtttatttaagcctctaaacagaaataccctgagataggatagctgttatctccatgtggggaaactgtggctatcagataggttatagaaatggtccaagacctcactgggcagaatctaggtcttcctgctgctgtatcacactatgcatttcaatcaaaaatttactaagcctcaagtgttgtgctgtggtgaacaggagctggggaaggaatatttagaaatggcatacccagggccgggcgcggtggctcacgcctgtaatcccagcactttaggaggctgaagcgggagaatcacgaggtcaggaaatcgagaccatcctggctaacacggtgagacctcgtctctactaaaaatacaaaaaaattagccgggcgtggtggcgggcgcctgtagtcccagctactggggaggctgaggcaggagaatggcgtgaacccaggaggcagagcttgcagtgagccgagatcgtgtcactgcactccagcccgggcgacagagcgtgactccgtctcaaaaaaaaaaaaaaaaaaaaaaaaaaaagaaaaggcatacccagcgctgtgagatcctgggggatctggcctcagcctaccctccctccttactctacccacttcttggccaatctcagactctcccttagcttcagccaccactcggaccacagattagccagcttgtgactctccaagctgtatctccagccccgacaactccctcgaactccaaaattatagacccaagtgccttctgcacactttccatctgggggtctcccagcattgccagactaggttcaaagctagaccccctcctccccaacacctgctcagcatcctgcatccctgtctcaggtggtggttcccacctaatcacctaggtgtcatccttagtgtctctctcctccacccaaacagccaatcaattgccaagtcctatacattttcctcctaaatattcctcagatccagcccttccccttcctcctcatatcttgtgtcccagctcaggctataatccctcgataacaacctccttccagcctccttgtccccagtcttatctcccatgcatccatcatcccagcagcctatctgtacaggttcctccctgcctcaaaccccttctgtgattcctctgtctgaagggatgaagtccaagttccttaataagtctccctttgatatggcctttccacccttacagcctctcctctagccactcgctgcctcaaaccatctacggtatagaggttggcctgcccgcggagccgacttcatcttgaaattcttcatcattttgtaacaagcagctgtgcatttccattttgcactggacctcacaaattacgttgcccgtcctgcctgcctgttgttgcttgcacccctcttgcagtttgtggccacctaagctttgtctgtgtagtctcctccacctaaaactcctcttcccacatcacccagctatcttcagctcttcgtttagactcaatgtaggtgttctctttgggacgtctcaccgactctcttccttccccttccctgccctaatcgcccaacacgttgcaggtgctcaaccatgtctattagagaaactgaatgaggaggcaaagcatgacaagtgccacaagagacctgcacactgctctggatggtaaagcgacgcaaggagggaagaaggtatttgcaacggcctcccagatcggcgctaggaccccgccagcagacgtctcaatctgcgtggagaagacccagtgcccgccaggggaagcggctgccaggctgggctctcgagcgccgcctgtcgcaatcccacggccgctgcagcgcaccccctcccgtcccctgccctgagcccgcctcgcgtctccaattggctgtctccattctcccgcccctcccgagctcagccattcggagcctggggtgggcggggcttgaggcctgagtggagcgtaaaccctgattggctgtacggaaggcggcgacgtggccgaaggatgcccgtttgtgtctaaacggaggctcggccacaacgccactggattggtggtagggcggggcgggccacagtctccagcctgaagcggaagtggaggaaagatggaggtgtggggacaggagctgggtgtgctggggactggccgcggacccctaacctgtgtctccggtctccctccggaagcggctcaaccca

SEQ ID NO: 18409 - DNA, 2300 bp, Homo sapien
tctgaattcaccactctgtagtgccatttagtcagtcctgcttggtggtcacgggggaagcttctttagcctcccttcagatttgtactggcccttcagcccatgtgcagtcttggtgtgtgagcttgttcttggtcatgaaaaggaccaataaaatgaccaccattcattgagggtttttttttgtaccaggtgctgttttaggcacttgacatgataaaaatgatcactgtcattttttgagtccttgccgtgtctcaggcacactgttcagtgttttacctgcattcccttttctagtcagtgtcttattattccccattttacatgtgggaaaactgaggcacagaatagtagacttgctcaagaaacttgataacgagaacccaggaccatctgaccacaaagctcagctcttagctctcactgaggaaatatgcatggctctgaagccacaaatctgggcccagactttgagaggtcagtcccattggtattcacatgtacagggtggtacttcactgttcacaacagagtcatgttatctagtccttagggcgctgtaggtattaggggctttgcagctgttcattcatccagtacttggcataaccatcttgtattttccattgtcatggttaaccccagccctgaggaaatggaagttgagcagcatcctcttgtcaggaagaaagatataattacccatagaagcaaaaatattatggggaattgagaatggtcaaaagtggcactttcaggaccaatttaaactttttgttatccctgtgttgaggcaattgctctataaaaatcacactgctaatgaagtcagattgtcagagcctggtttagccccaggcatctctttgggcttgtctttattcccatcttcccatgacccccatactttaaccaatgtaaagaaaacttttagactaatttcagtgtatttcactcgaattagtgatggaattttggtgatgtgaatgggaatgctctaatttgggtgcttctcatgtagattggctggtggacagaaggcactgcagcctgaaatggcagagtctggtgctgacgatccgcgagaagatcaatgctgccatccaggacatgccagagagcgaagagatcgcccagctgctgtctgggtcctgtgagtgcttaggggctgtcactggagtcccctctttgctgaggtagtatgtatcagctgagctactctcttgttatttagccaccagggctggcctttagagagggagcgatttttatttgaggtatagatgctggcttcttccactatgaaatgatttagggaaaagctacacactaaagttactggcagtatattatacatgaatcagccacctgcagtgcccagagtaggtgaagaagatactttagttctcgaaatcccgtctcttgctttctagacattcactactttcactgcctaagaatcctggaccttctcaaaggcacagaggcctccacgaagaatatttttggccgatactcttcacagcggatgaaggcaagtgtgggccaagggccggtagtatgtggttggggacatccaatccgaggagtcatagcctctgtggtctctctgaggctccagtggggatgcctacatagaatatttcctgaactttcactctgtctctatagtttactccaaaagtggatcctatccctgagtttaattttcaaacccactgctttagggattgcctgcactcttaaagtgggtggtccagccagcagagttgaaagaaggacaaggagtttgtgtttgatgtgatgtaaaggctgggagaacttaccctgtttagggattgagctgggatgtggctgtcgagtgcttttctggcttaacattgtttttctgttcttactcaggattggcaggagattatagctctgtatgagaaggacaacacctacttaggtaaagtggcccggcctgggagccctggtatccatggggaagcccactctcagagttctgagataccaggcttataggaggcacagtctgtgagtgggaagagactggagtgtagatgttgcccatttgtaggtggtaaaatcaattgtttttgatggaattgattttccctgagtggagtgctgggggaaggaggaggtccaggccggtagtggccattcgccgtgcctcagcgagcaggtgtgtgtgggtcctccaccactcacctcttggttagcgggagtgtgctgcccccacccccacccccgcacccccattctacacaaggcagaagaggcacgggttt

SEQ ID NO: 18410 - DNA, 2300 bp, Homo sapien
ctcggccttccaaagagctggaattacaggcgtgagccaccgtgcccggccgacactgggaatttgaggctgcggtgaactatgatcacaccactgtactccagcctgggtgatagagcaagaccctgtctcaaaacaaaaaaacaaacaaacaaaaagtcacattcattggttcttgcagggctcaaagtctgggcggggagaaggaacacttataaacaaactagtaaaggctgggaatggtggttcacgcctgtatcccaacactttgggaggctgaggtgggaggatcacttgagcctaggcgttcaagaccagcctgggcaacatagtgagaccttgatcatgatcaccctcctccccctcctcctcctcttcctttctttttctcttcttcttcttcttcttttttttttttttgaaacagattctcactcccattgcccaggctggagcacagtggcatgatcatggctctgcagccttgaacccccagactcgggtgattctcccacctcagccttctgagtagctgggactacaggtcacaccaccctacctggctaatttctttgtagttttagtagagactagatcttaccatgttgcccaggctggtctggaactcctgggctcaagccttctgcccacctcagcctcccaaagtgctgggattacagatgtgagccattgagcccagacttgagaccttgtttctacaaaaataaaaaaaataaaaaaataaaaaattacctgggagtggttgcatgcaccagtggtcccagctactcgggagactgagatgggaggattgcctgagcccaggaggttgaggctgcagtgagcccagatcgagtcactgcactccagcctgggcaacagagtgagaccgtgtctcaaacaagcaatattagtaaaaataatatttagagattgaaaaaagtgcaatgaaagaaagaaataggaactgagagaatgtgacaggagagacctatcaagtcagatatggtggctgtcaggaggaccttttggtaattatatttcagcagaggcttgaagataagaagacttgatgcattcagtgaggaaaaccccattctgtaaccatctagggtaagtgactgtggtccacaacataagagggcttgaagagaagaatagggaagaaattttgagtcaaaaatctgggttctatccccagtcaactagctgtatagtcttgaaaaggtcacacaacctctgagtctctctttgcttaaaatgagggtccattatgcctatcttacaggtgtgggctatattagataatggatgtgaaggtgtcaaatgtaaaatacacgcacagtgtttttaccggtaaatgcatacgtagcactaacatatcactgggatgtgaatttcccacttgccagtgtaccctgaaatgagagcttgtcttagttagacttagaccaaagaaaccaaaacatgctgcaaagcccgatgtcattggtggagcatttgtgctgctgggcgtctgtcttgcttctgatggtgccatatctgtgacttaggagagcctggggaggtgtctccgggcccatggttgccttctgcaagtagtgagagaggaatgagaaagcctcttcacagaggggtgtccccagaactgtcctcatttgctcttgcttatagaccctgtccctgagatctaaagggtgacctgacgtatttgtcctcatggtacctaccagaggtcaacagacaaaagtgggctttgcttgtgtttgctgctggccccaggacagcctatagacactggcgcacaccaaagccacaggccggagagcaggcaggaagcaggacgagggctggtcttggggcaccctgaggatgcagagttcggggatgtaagggactcgggaaggagccaaggaggagagagggagaggagaagtgggggaaggagaggtggggtgagggcgggaggggagatgggggagaacgagcaagaggacggggccccgaggaaagggaggccacgcgcgagagggggccgcggggcggcgcggaggcggggcggcggcggcgggcaggcggcgggcggcgctgtcagtgcgaggcggcgagcggaatgcagcggcccgaggctggccacgtccgcacccgggggagggggccgcggcggcaggccgggggccggcgccgcctgctcgagccggggagccctcggggctgcgggtacggagcgggcgggcgcggggatcccgggcggcgggagctgggcagggacagagcagggttagggggagcagccaact

SEQ ID NO: 18411 - DNA, 2300 bp, Homo sapien
atgctcttttcaccttctcaaaattgtcttgtagttaaacactgtagttgagcctttatatctctcaattttatgttttgttttgttgaggaagcatctcactgttgcccagactggcaccatcatagctcactgcagcctcaatctcccagctcaagaaatcctcccacctcagcctcctgagtagttgggactatagatgtgtggcaccaagcccagcttgtttttttgtagcgacgggggtctcactatgctgcccaggctggtcaagcaatcctcccgcctcggcctcccaaggtgctactgtgagccactgcgccgggcccagttctatgtttaaaatacttccttctcaaccttatttatttttagagttgatggccacacctaaatattcctcctttcttatacaataccagtctttatcttcattgtctcactacttcggggactgaatggtctcctattttattgttaacatgccatatccttcaaaactgtacatcctccaaggtgtggttaatttctgcttttaacaggaaaatcagaggcctgcctgcttgagtcccccttcaagtactcagtatttgagtgtctactaagttataacagttaacgcacaaaattctagtcctcatgttgtttatactcaggtatttattgggagacacgcgtcagtagtccctgataaatggaaagatcgcttgagtccaggagttccagtccagcctagaataggtaaaacatgctctctgaattagtctttgaaactggtaaactagctcagaagtttttttaagaattccatgagtggtttgctggtgtacgtttattatatgcagtgaaagtacttaatctgcaaaccaccccaaattaagcccctaactcgcaagcacaaaatggactcgattatttactgagttatcagttggccttgtccttagttgtacagggactaatgactcacctataaataatgggctcttctaagaagacacagttgagttgacacctctttgtcctatagctgggaggaacgcattgcaaacgccaacccaatgattccctaaatggggtcttcgcatcagctgcgttaaaatcaccccagcaggcaggttatccggccgccactccagggtcattaaatcagactctccagtgggacctcggaattcgtagcttagcaagctccccaagtgatgctgggagtaaactaacgtttgagagtcacaaacatgttttggcaatataaccagatgggactggagaaattaaaaaatgagaaacatccctaaaaaagcaagactaagctgcgtgggaggccaaacgaggggggtcctttgggctgtttctaccatgacaaaaatcgccattaccccacacctctcacaccgccaacgttccgccaacgttccgccaacgtcccaccaccctcatgatatccgtccgcggtactgctccagcgaaggtacccttgcctgggccatgaggcgcaaccgtccctcacagctggggtggcttctccaggttcgcaccgaggggaagttggggtaccggtttccgccgccagcacccaagatggcggcacgagcgtcgcaaccacaagaaccacatgcttcgtgtcccgcctcagcattctcgggtctcactagacttttgcaagtcactgtgggaaccctcaaggcgagggtgttccgcactctggcggcgatacaccttcctattccctgacctaggccttcattcccccgccacagaaagcgctggaagcgcccaacctggatacttcacccaacgcccaagcccactaacatcgcccgccgcgaaggcgcggccgaggggcccagaatgccagacactagggccttcgccctcctcattggtgggtccataccgcggggcgggcctaggtactcattgggccgggaattatgtcagtcttgggaaatcaggtccggggatgaggaggtacactcagccattgggccctctctgctgccaatcagagggacatccgtcgacggccccggcctcggctcgttgattggagaaactgttcctagggtgtttgcggcgggcgggtttccgagtgcggtagcaggagggggcggggaggtaagcggaggctccgagctctaggccggccggcggtggcggcggcgaggccgggactcgggcttagggcctgctgtggaggcagcggcggacgccgagctaagcagtgggtatcgggcacattcctttcccagaagggagggttgcagcgccgcggggccgaggcttatggggcgacgggatgg

SEQ ID NO: 18412 - DNA, 2300 bp, Homo sapien
ttgtctcactacttcggggactgaatggtctcctattttattgttaacatgccatatccttcaaaactgtacatcctccaaggtgtggttaatttctgcttttaacaggaaaatcagaggcctgcctgcttgagtcccccttcaagtactcagtatttgagtgtctactaagttataacagttaacgcacaaaattctagtcctcatgttgtttatactcaggtatttattgggagacacgcgtcagtagtccctgataaatggaaagatcgcttgagtccaggagttccagtccagcctagaataggtaaaacatgctctctgaattagtctttgaaactggtaaactagctcagaagtttttttaagaattccatgagtggtttgctggtgtacgtttattatatgcagtgaaagtacttaatctgcaaaccaccccaaattaagcccctaactcgcaagcacaaaatggactcgattatttactgagttatcagttggccttgtccttagttgtacagggactaatgactcacctataaataatgggctcttctaagaagacacagttgagttgacacctctttgtcctatagctgggaggaacgcattgcaaacgccaacccaatgattccctaaatggggtcttcgcatcagctgcgttaaaatcaccccagcaggcaggttatccggccgccactccagggtcattaaatcagactctccagtgggacctcggaattcgtagcttagcaagctccccaagtgatgctgggagtaaactaacgtttgagagtcacaaacatgttttggcaatataaccagatgggactggagaaattaaaaaatgagaaacatccctaaaaaagcaagactaagctgcgtgggaggccaaacgaggggggtcctttgggctgtttctaccatgacaaaaatcgccattaccccacacctctcacaccgccaacgttccgccaacgttccgccaacgtcccaccaccctcatgatatccgtccgcggtactgctccagcgaaggtacccttgcctgggccatgaggcgcaaccgtccctcacagctggggtggcttctccaggttcgcaccgaggggaagttggggtaccggtttccgccgccagcacccaagatggcggcacgagcgtcgcaaccacaagaaccacatgcttcgtgtcccgcctcagcattctcgggtctcactagacttttgcaagtcactgtgggaaccctcaaggcgagggtgttccgcactctggcggcgatacaccttcctattccctgacctaggccttcattcccccgccacagaaagcgctggaagcgcccaacctggatacttcacccaacgcccaagcccactaacatcgcccgccgcgaaggcgcggccgaggggcccagaatgccagacactagggccttcgccctcctcattggtgggtccataccgcggggcgggcctaggtactcattgggccgggaattatgtcagtcttgggaaatcaggtccggggatgaggaggtacactcagccattgggccctctctgctgccaatcagagggacatccgtcgacggccccggcctcggctcgttgattggagaaactgttcctagggtgtttgcggcgggcgggtttccgagtgcggtagcaggagggggcggggaggtaagcggaggctccgagctctaggccggccggcggtggcggcggcgaggccgggactcgggcttagggcctgctgtggaggcagcggcggacgccgagctaagcagtgggtatcgggcacattcctttcccagaagggagggttgcagcgccgcggggccgaggcttatggggcgacgggatggtgctgaggtgcaggaggcgggggccgagcggggttcccgccagagcccggccctgggcctgacagggaggggccccgcgcggggccgagaggaaagctggctccggggtgggatggactgggcagggttgagggcacgagaaggcgtggtgtgaggcctggacttgggagtggggtggggccatcgggacggagggcggggtggggtttgctgtaagggtgggtcaaggccagggaagtagcacttgttcgctggccgcccctggaggctagaagctccggcgccgagagtgggcatggcgacttggtctcagccggactcgggtatccgggcagggtgggaccagcctcaggctatgggccctgcacctacttgatttttaagggactttgtccggttcctcgaacttaattggctcctgggaggtttta

SEQ ID NO: 18413 - DNA, 2300 bp, Homo sapien
gtatagagcgctgattggtgcatttcacaatcctcttgtaagacagaaaagttctccaagtccccactcgacccaggaagtccagctggcttcacctctcatcttctctgtgctttcttgaagcccttttaactaaactctattatgatattgctgggctgggtttttcttacatgacagttctccagagccgtgaacagtgcctgcatcagcaaaactgtcttataaatgcaaactcctgccctgaacagtgcctgcatcagcaaaactgtcttataaatgcaaactcttgccttttggggtagagtgcaatagagtttccctcttcctcctgattagaaggatactttaaaataaaaaaataaaactttagttatattgtggcttaaaaacatgtttttttcctaattgtgtgtttccttgggatgattgggtgaaaggtgctgacggagattaatgacactgaaaaaggtgagcacaacttacaatgaaaaagaggacatttttgtggcgcagccagtgaaaagggggaaattcaggaagctatgagaggcctatggggggacctaacctactctagggaatcagggaagacctcaaaggggaagtaatcttaacactgaacagtatttttttttttagacgaagtttcgctcttgttgcccaggctggagtgcaatggcgcgatctcggctcactgtaacctccacctcctgggttcaagcgattctcctccctcagcctcccgagtagctggcactacaggcgcccgccacgacgcccagctaatttttgtattttagtagagatggggtttcaccatgttggccaggctggtcttgaaaccctgacctcaagtgatccacccacctccgcctccccaagtgttgggattataggcttgagccaccgtgccggcgtgagtaggaattttacagagatttgaggaggcagagattgaggactaagaaatcattggaaatttgaggcagcggcgatatgataaagttctggtgaagaatctaagattcaaaaattttgaggatgtgaattacagaactgtccagaagtggttgattttttgggggccaagcatcagggggctcgcttataaaaatcatatgttctaatttttttttttttttttttttgagatggagtctcgctccatcgcccaggctggatcgcagtggctggatctcggctcactgcaagctccgcctcccaagttcaagcaattcttgtctcagcctcctgagtagctgggactacaggcacctgccaccacgctcggctaatttttgcatttttagtagagacagggtttcaccttgttggtaagactggtctcgaacccctgacctcaggtgatccacccgcctcggcctcccaaagtgctgggatgacaggcgtgagcgactgcccctggcccatatgttctaatattctaggttacaacgctctacgctgcaatctctccaccgttacagtttaaaaactataagtccctaccaccctcgcctactgtgcgtgcgcggcgcgcggcgcttcgggccttgtagtcttggacagacccccgaggcccatggtgccgtgcggcgggtcgttgcgcctgcgcggtgcgagcggcgggcagcgcagactgcgaggctcttttgttcggctgaggggagggccgttggccggggcctgcggtacgccgcttcagtgagggacgccactgcggccacccggcttgctgccttcctgggcgccactcccccaggcgacccgacgcgacgcgccagcagcgcagcaccgattcctctcgggctcttgggcgctgctctgaggtgaggagcccgctggaggcgggagagctgggggagggggcgcggcggcggcggcggcgggagccctgcgtgagggaacgcgctttcgaggcggaggttaggagcggggagcgcgcccgggtccagcgtcctgcttctccgcttcccgcgctgagctcttcgcctgtcgctgaggcgtcggtgccagctgcgtgaaggatggagagggcggggcgcgaatcctgagccagagactgagtgcttgggggtgggccgagcacttgggggccgctcttcggggcccgggtggtctggaacaatgttgcttggctgggcggctgcgggatagggcggaaggggacaggcttgaggcttggataggcgtgaggaggcgcatacgaccgcacaacccgaggtttgtaactgtattcggaagacgccgggtccggctgggactgccagaggaacctggctttgcaggactacgga

SEQ ID NO: 18414 - DNA, 2300 bp, Homo sapien
tggtctccctgacttaaacaatgaagccgcggaccttcatggtgttaaaaacagctcttaaagctggcagggacccaaagagtgagcagcagcaagatttgttgtgaagagcgaaagaacgcgaaagaacaaggcttccatagcgtggaaaccgacctgagcaggttgctgctgcgggctaacaggaatgggtggggggcagggggccagcttttacacccttgtttgtccctgcccatttgctatttctgtcctatcagagtgcccttttttcaatcctccctgtgattggctacttttagattcctgcattttacagagcgctgattggtgcattttgcagagtgctgattggtgcattttacaatcctcttgctagctacagagggctgattggtgtgtttttacagagtgctgattggtatattttacaatccccttgctaggtatagagcgctgattggtgcatttcacaatcctcttgtaagacagaaaagttctccaagtccccactcgacccaggaagtccagctggcttcacctctcatcttctctgtgctttcttgaagcccttttaactaaactctattatgatattgctgggctgggtttttcttacatgacagttctccagagccgtgaacagtgcctgcatcagcaaaactgtcttataaatgcaaactcctgccctgaacagtgcctgcatcagcaaaactgtcttataaatgcaaactcttgccttttggggtagagtgcaatagagtttccctcttcctcctgattagaaggatactttaaaataaaaaaataaaactttagttatattgtggcttaaaaacatgtttttttcctaattgtgtgtttccttgggatgattgggtgaaaggtgctgacggagattaatgacactgaaaaaggtgagcacaacttacaatgaaaaagaggacatttttgtggcgcagccagtgaaaagggggaaattcaggaagctatgagaggcctatggggggacctaacctactctagggaatcagggaagacctcaaaggggaagtaatcttaacactgaacagtatttttttttttagacgaagtttcgctcttgttgcccaggctggagtgcaatggcgcgatctcggctcactgtaacctccacctcctgggttcaagcgattctcctccctcagcctcccgagtagctggcactacaggcgcccgccacgacgcccagctaatttttgtattttagtagagatggggtttcaccatgttggccaggctggtcttgaaaccctgacctcaagtgatccacccacctccgcctccccaagtgttgggattataggcttgagccaccgtgccggcgtgagtaggaattttacagagatttgaggaggcagagattgaggactaagaaatcattggaaatttgaggcagcggcgatatgataaagttctggtgaagaatctaagattcaaaaattttgaggatgtgaattacagaactgtccagaagtggttgattttttgggggccaagcatcagggggctcgcttataaaaatcatatgttctaatttttttttttttttttttttgagatggagtctcgctccatcgcccaggctggatcgcagtggctggatctcggctcactgcaagctccgcctcccaagttcaagcaattcttgtctcagcctcctgagtagctgggactacaggcacctgccaccacgctcggctaatttttgcatttttagtagagacagggtttcaccttgttggtaagactggtctcgaacccctgacctcaggtgatccacccgcctcggcctcccaaagtgctgggatgacaggcgtgagcgactgcccctggcccatatgttctaatattctaggttacaacgctctacgctgcaatctctccaccgttacagtttaaaaactataagtccctaccaccctcgcctactgtgcgtgcgcggcgcgcggcgcttcgggccttgtagtcttggacagacccccgaggcccatggtgccgtgcggcgggtcgttgcgcctgcgcggtgcgagcggcgggcagcgcagactgcgaggctcttttgttcggctgaggggagggccgttggccggggcctgcggtacgccgcttcagtgagggacgccactgcggccacccggcttgctgccttcctgggcgccactcccccaggcgacccgacgcgacgcgccagcagcgcagcaccgattcctctcgggctcttgggcgctgctctgaggtgaggagcccgctggaggcgg

SEQ ID NO: 18415 - DNA, 2300 bp, Homo sapien
tctcccgactagctggaattacaatcacacaccaccagatggtctcaatctcttgagagttcaagaccaggctgggcaatatagtgagacctcatctatacaaataataataaaaaattagtcgggcatggtggcacacacctgtggtcccagctacttaggaggcttgggtggcaggatcacttgagcccaggaggttgaggctgtcttaatattaagacatgtgaggctaggcacggtggctcatgcctgtaatcccagcactttgggaagccaaggcgggtggatcatgaggtcaggagttcaagaccagcctgaccaatatggtgaaaccccatctctactaaaaatacaaaaattagctgggcatggtggcgcgtgcctgtaatcccagctagtcagtaggcagtttcttgagactttcctgatgagatcagtgatgaatttaataaatgtgatttttttttacattgaataaatgcatcaacattggctgatctgcataactctgtaccagtattttctaaatggcttgactccctatcacacttaacctttaagaaatgactccatctccaaggtggtgtgtacttaaaaataaataaataaacacttccagtctcggcaacatagggagactctatgttgtataaaattttaaaaacttaaaaaattatctgtataaaaattttaaaaattaaccgagtatggtggcacacgcctgcggtcccagcagctccaagggctgaggagggaggatggcttgagccctggaggttgaggctgcagtgagctgtgatcctgccactgcactccagcctgggcaacagagcaggaccctgtctcaaaaaagcaaagaaaagttaccatttgttgaatttgggtagtatcaaagaagagtattcagaattgtttgagaaggctaaaaatactcttccttttctcaactacatagctatataaggctgaattttcttaatgtaccaaaacaacagagcacaacagagaaaggggaagcacataggagaacccagctatcttcctttttatttatttattttttacaatggagtctcccaggctggagtgtaatggcgcgatcttgtctcactgcaacctccgattcctgggttcaagcaatccccctgtgtcagtctcctgaatagctgggattacaggtgcccatgaccacgcccagctaatttttgtagttttagtggagacggggtttcaccatgttggccaggctggtctcgaactcctgacctcaggtaatccacccgcctccgcctcccaaagtggtggaagtacaggcgtgaggcactgtgcccggcccctttcttttctttcctctcttttcttccttttagctctctctctttttttcagacagggtcttgctctgcagtgatcagggctcactgcagcctcgaacccctgggttcaagccatcctcctgtctcagcctcccgagtagctgggactacaggcgcgtgtcaccatgcccggctaatttttaaaatattttgcagaggcgagggtctccctaagttggtagggcgtgtctcaagcctggcctcaagcgatcctcccgcctcggcctccctaatagtattgggattacaggcgtgagccaccgcgctaggcttgctgaaattatctttaaataagttgttaaaagaccaccaacacattgaacggctttctcttgctccctagctgcatgatattgcttcgagtttgtttcggtgtgagcaatctgagtcgccggaccctctcgagtctgactttcactctgacaatcggtccgtggctttacgaatctgaatcggagtccccttgatagctccgctggggaacagcaaactacgaggttcaaatggtggctctcgggacttagtgaggatccagggatgtgggcttcctaaagccccgaacctcccacactgcagactatccctcgcatagcgagaacaagagtaacaacccccttacacccctctgctcccgggacccactggctgcccgtcgctgacgccccctggccgctgattggcttcccctgacagtgggcggaacgcggccccggattggatatccattcgccgtccctcacccggcacctgcgtgcactctccggcgtcccaagtgagtggaggggggatcccgactccagtccggggccttggccagcggagccgcgctattcggaagcgggaatcccactcagagcccgggcctgtaggggcggggcgtcccgggcacccgggattggggcgtctcccgtcgtgcaccggggc

SEQ ID NO: 18416 - DNA, 2300 bp, Homo sapien
cagcaaacaatcgggtactcaccagagctactggtgctggtacaggtgaagaaagtaaaggaaacttcagatgtggttgaaagggcccagaaaatgtagttaacactaagttatgtaactagctatggtcactgactctagccttatttggatgaagtacagatccatctcccagatcagagaactaaagttaggaacttcctgctgcttctccagaggcagaactgagctttttcttttgaggagtggtatctgtggggaggaatctaatggagaagagtggttgctagaaattactacttggtgtctaggtttttgtatttgttccagtgtttatttgtttgttttttgagacagggtcttgctctgtcgcccaggctggagtgcagtggtgtgatcttggctcattgcagactccgcctcctgggttccagcaattctcatgcctcagtctcccgagtagctgggagtacaggcctgtgccaccatgcccagctaatttttgtatttttagtagagacgaagttttgccttgttggccaggctgttcttgaactcctggcctcaagtgttctgcccgcctcagcttcccaaagtgttggattacaggcgtgagccactgggccagcccagtgtttttaaggacagttacaactgaaactttctttttttttttttgagacggagtctcactctgttgccaggatggagtgcagtggtgcgatctcggctcactgcaacctccacctcctgggttcaactgattctcctgcctcagtctcccgagtagctgggactacaggcacgcgccaccatgcccagctaatttttgtatttttagtaaagaaggggtttcaccatgttggccaggatggtctcaatctcttgacctcgtatttcgcccgcctcggcctcccaaagtgctgggattacagacgtgagccaccgcacccggcccatctggaggttttttgttttttgtgtttttttttttgacaacggagtcttgcactgtcgcctgggctggagtgcagtggcgcgatctcggctcactgcaacctccgcctcccgggttcaagtgattctcctgcttcagtctcccaagtaggtgggattacaggcgcctgccaccacgcccgctaattttttttatttttagtagagacggagtttcattacgttggccaggctggtgtctggaggtttttaaaaagccagttcatagctatttgtttctgagtggtattggccccaaaggaaagaagaatttcttcatgaaggtagtgcagggccctatacaaacttcctgagaccaagggtatgatgatcatttcgttcctaaattatggtcctgaatttgacaaacctttttcaaggcacaaaagatgtatgagctccactgagtggatgactgtgatttccttgtcatcgtctttcccgttgttagttttgtttaaagacacttcagaatatttaactctctgctcctgtgctggcagtttatccaatgcctgcaaagagaagagaaaaaaaaaacttaaggaggttcattgttcacagcaaataggtctgctctttttggtctcagacatttgactgatatctggaatgttatatatgggttgttatggaattggaatttcccacctttcagttcaggaccccttggaggtggtggctgcatcagataaaaatcagattgtcagcaagaataccatttaagatggtactgaaatcacaaaaccttaggtttgctcaatattgtgtagcccaattttgtcatggaccatgcagcttcgtttctgcatgcagtgtttgtctgtggagatacttctggtatattggagagaattgaaaaagtggtttgctttgctaatttcatggtgtaaatgagttccccttcttttgaaatgttagccttgtgttagcaaaacataaaatagaaggaaactcattacacagtgttctaatggtaaggcagaactaataagagaatgtgtttaaaattaattgtgggactgtaaaaatgagtgggtatgtgaatgagtacgggatgggggaggagagggagggcttagagatattagagatagtcttgttttcccaggagccagcctggatcatttgttggcagtacatattggctgaagtcagttttcatttcaaggtaaattggaaagggaaattaaaccttattgtttctctcttaagagagaagggggtgcaggcggcagccagggtggatgctgttggaatagttgtagaagtaacaagattagtgctgtattttaacagaaggt

SEQ ID NO: 18417 - DNA, 2300 bp, Homo sapien
gtgaatttgtcatgatcactcatttcttaatgttgtcattggtcaatcgtttagtcattgatgttaacaactattctgatgtgctaacatttgtaaaaaaaaccaaaaaaacaaaaacacatcgctttttttctggctgattcaaaatctgattttaaaagtcatagttacaactatttataaatatgccttcatgagttttgctaatttaaaatgagataaacacaataagcaacaataaaaagaaaaaatacatattttaagataccaagaaaaaatactacatcacaaaattatactttaaatctagtcttcccaacagtatttacaagattattaaataattaccttatggggaagttctgtcagaacacctctcatatttggatgagtattatagactttgaacctgttcataaagcaatagcaagcttcttcagaaagtcactgaattttgggcatggggagatatggtaagttatactgcaggtcttgaccatttcatgctgctgctttaaaggcagaattactcttatgctgttgaatttatcatacacaattactgatactgcaactcataaggaagttaagcaaagtttcagaacaaataaatgaggtaacaatttttcaaatctaaaggattttgaagaggattgtcactgcaaactataaactactgtaagattcttggtctagaacaatctcttgtggattatttagacaatttttaaaaaagcacactggggcaagttcatttttctaacttgaaaatatacgtcgtaaaacttaattaaaggctcaaacttaagaaagacacattcataaaaaatctacatttgagttagattgtgaaatctatgtagttttcaatataatatattaatatctgtaatccttaagctgtaatttttacaaatatgttttccaagagctgcataaattaacttctttatgtattgtatatgttataaataactagaaggaattacgtacttttatattcaataaataaatacatttaaagctcagatactttcactaaaatagatccacaaagaagcttggaatgttcttctgtggtcttcagaactatgtgtggtgagcaattatcaggaataatacatgtgtctgtttttgaattcagtaagccttctaaacattattttaaaactactccacagagatgataaaaggtgtattaatcacctaaatgcctataaattgagatttaaggtcagagatattcccttagtttacttaagatattccttggatatcccttagatatttccctagttgtcccacacgggcttgcttgatcacacatcatatcctggtacatacgaggttctgagttagcactgtggaattggtgtacaaggcttacaagtcagcttttaaaacgtaataatgatagcatctataatactattctagtgattctatgcttttctttttgttaaaatcatcccttattttaggaataagctaagtaaagagggaacatggagtcagactgaaatctacttcagggctcacctttgtcggatgaacagtgaacgctctgacattgacattcacagcagcattgctgccgggtattgctataatttgctctctatgattgttcctttaaacaaaaagctctgcgctcagcatgcaaagaagttagaagtgcgggaaggagggggaaccacacatataagaggagagagaggaaaaaactgcagatcaatcatttataattaacaaaaatccgattggtgctttaaatagagatcaatgtgttccaggctgcctggattgtggggatgtattcaccttctggtaactctccaagcaagctgtcacacctacagaatcaccatttgttttcttaacaaagcttcagggggcgccaggctctcattgaaatttcattaatctaatggagtaaagtcctatagaaaaaaatcaaattctcgttggacgagatgctacctgggaaagataacctctgtttgaactctcagactcggatctctctgctattagtctgaggaaacagacagcaacaacgctgattacagccaccggcctcaacaatttttttttctaactagcaatttcgagtgcaagtgccacagtgtcagctaaagaaacacaactgcgggttttctgcagagcaaaatggttctgaaatgtcactgaatagctcacaaaggacgccaatctacgacaacagagacataagcatataggagaaagggtccacacatcctcctttcaaaggtatgttgtttacatgcatgtaatttgtg

SEQ ID NO: 18418 - DNA, 2300 bp, Homo sapien
ctcactgcaacctccgccccccgggttcatgtgattctcctgcctcagccacccgagtagctgggattacaggcgtgcaccaccatgcccagctaatttttgtattattagtagagacggggtttcactatattggtcaggctgacctcaaactcctgacctcgtgatccgcctgccttggcctcccaaagtgctgggattataggcgtgagccactgtgcccagccacccattactatactttctcagggcaggaaggaggatgagcaggagccagataccccagagaggctcatgccagcctctgtcccctcaccccaatttactgcagcttgtaggtgggtcatgtgacactgaaaccaatgcaccactgcttttcagatggcaggatgcactgtactccttaaaggatcacaccctcatctttgaggctgtatctctggatgggaaacagtacaaggaggcaggcacttttatcacactcatccttctcgatggtttcttcttactgctcttgccccgtctgctagattgagtccatcattattccccttatggctgttgtaaaaaccattttacccacttccccctgtgtcttttcccaccactcctaatcttttctacatattctgtaggttgagtctgagaatagaaatgccattttttacaaagaaggaaaaaggcagaggtggagatgtgtgaggccacataccaccccggagctctggttaggtcattcccaatctcaaaaattgtcaatggctccccagtgccctctcaattaagttcaacattcctattctgactttcaagtcccttcacagtagagctgcagtttatcttgacaaccatagtctttctacaacatccagtaaaagagggctactaactattcctcaagctggtgagggctcttccatctttctttactctggtccttccacctggaaagtcctctgccccttcaaagtctggtgtgtttttcagagcccatctcaaacaccacatgcacctttaaacactcacatgcacactggcacttctttttattttctttcttttttaagagacagggtcttgctctgttgcccaggctggggtacactggggtgatcatagttggctgtaacctcagattcctgggctcaagtgatcctcctgcttcagcctcccaaagtgctgtgattacaggtgtgagccacaatgcctggcctcttccctccttttctggtattcagctcccttcttttatcaaccatagcactttatacttttttcatggcagttgacctattgtacttaaaaaacctctttattttgagaattatagattcacagagagtttcagaaataatagaggaactctgtctacctttacccagtttcccccaagggtaacatctggcactattacagtaccatgtcacaaccaggacactgacaccaactgtcccttgaatgagaccgtgtgattttgtccttcactttcctcccttccgcagctcctggagggaaagggctctgttctcctctccctcagctttctccctgtgttaccccttcctttcctcagggcctttccatcctgagggagaacagcacagtttggtttcctgtgtcccttgctgccacgctgccgcgattctcccaaatgttggtgtccttatattgcttattgggaattaatcatttcctttcaacattgtggcttcccaaagagcgaagttttgccctcttttctggggatggagatgtgaactggaccggcaattgaggggtgctatgcttgacggggatctcttccttggattctgcctccctgcaccctacttcaggcaccccgtggtctttcaaatctgccaccgtgaggtcaactgttcggtgcttaggatggagtgtccaaagccgtgggtcctttgagccttgtgaagtcttttgttttggtgggtgctggaggggcgcacctttggcctcgcacggtgcggtgcttccggcacccccaatccttctaccgtggggctccggcgtgagcgccacgtgcacccacgccccgcgccccgttccggtccccgcctgccgcccgcgccacttcctgacgcgcccggggacccacggccccgccccgcggccgggctgggcgggcggcgaccgcggctgaggtacaggtgcctcgcggtgcagccgggtcgccttccagcccgtccgcctcccgaccagggcccgcgccccgtcccgcctctctcccgcccagccaaatgcaggccgccgccctccctgaggagatccgttggctcctggaa

SEQ ID NO: 18419 - DNA, 2300 bp, Homo sapien
tctgttgccaccatcctggtccaagccaccatcatcttctaccttgcaaccctctggttttacgccccaccaacccattttccaccctaaaaccagtgatgtcatttttaaaaatctgcccatgcctctttcctaattaaaattttagtagcttcccaatatttcacttcctcacaatggctaacaagcgtctaccatcgccaccaccataacctcctgcttatctttctagccttgctgcctgcatggaccctttactctccatcatcttcagtaacagacttcctgcagtttttcaatgagtcatacccactcccacttccgtttgctcacatgtgctgttccttctgtctacaacactcttccccttccccttcacccagctaactcctactcatgcttcaagtctcaacttcattttgtctggttaaccaaccttggctccccagactgggttatatttccctctcctacattcctgtagcatttagcacctgctattcaaaactcacatcccatctgtaattattaaaattattaaaagtaatggcaaaaacagcaattacttttgcaccaacctaatacttgtctacctgccacctgtcttctcctcctgagggttcagatcttacctatcttatttcctaatgtattcccagcaactgctatgcttggtgtatagtaggtcctcaataaaggattactgagtgagtgctacaaggtaagtctgtttgtttgtttgtttgtttgtttgtttgtttgagacagagtcttgctctgtcacccaggctggagtgcaatggtgcgatctcggctcactgtaacctctgcctcctgggttcaagcaattctcctgcctcagacttccgaatagctgagattacaggtgcgtgccaccacacctggctaatttttgtatttttagtagagacagggtttctccatgttggccaggcttgtctcgaactcctgacctcaagtgatccactcaccttggcctcccaaaatgttgggattacaggcgtgagccaccatgcctggcctgttgggttttttaaaaataattttattttgaaataatttcaaacttacagaaaagttatcatagtatctagaactcaagtataccattcacttggaatcatcaattattaacttcgattattaattattaaatttaataatcatcaattattaaatttactttatttttcataataaataaaatgttaattatagaaaagtaattagtactagattaatttacatttttttctgaatttgagagtaaattacagtcatcacgctccttttccctaaaaacttcaacggtattttctaagaatgaggatattcccttaaaaataacacctagtacgaggccgggcgcagtgactcacgcctgtaatcccagcactttggaaggctaaggcgggtggatcactgaggtcaggggttcgagaccagcttggccaacgtggtgaaaccccatctctactaaaaatacaaaatttagctgggcgtggtggcatgcgtctgtaatcccagtaacaggggctgaggcaggagaatcgcttgaaccaggaggcggaggttgcaatgagcccagatcgtgccactgcactccagcctgggcaatagggtgagactccgtctcaaaaaaacccacaaacacccagtatggttatcaaaatgaggaaagttagcaaagggcacatgaactttaattcaaatatgtgttatcattttcagagaagtagaaagtgctaggcaaacgtggcagtctgggattaggtgcatgcattcataaggtaacctctctctctctccttcccctctctctgcccttgttcaagggctttctctaaaactaaagctgtggttgccaaggcagagccaagctggttgtgtctggtgttccctcaagcccccacttgcactagtaacttctctgcaccacgcccatttgtcgctgcctatgcagtcctctatcggtaggctggaaggctcctgagcaggttagctttctttcacaaagtcccagcgacaggaggaagcccagtccaccggaagtgaaggttggagggaaaggtgaaggacaggaagtgggaagatgactcctgggacccataatcatgcatgagcagttcagagcttcccagaagggaagaagacaagctgtaggggcagtaagatttgcacaccttgggtcctgggaccatcctgctcagctgagtagaataccaaacgagggtgtttctgagctgcacttcacctcagccaggcaatcgacaggagaa

SEQ ID NO: 18420 - DNA, 2300 bp, Homo sapien
tggtcccagctactcaggaggctgaggtgagaggattgcttgaacctgggaggcagaggttgcagtgagctgagatcatgccaccgcactccaatctggatgacagagtaagaccctatctcaaaaaacaaaaacaaaacaaaaccctccccctcaaaaaaacagagttgggctaggcccacaattattagagaagagaaaggcagtgtgatgctggtggtatagagcagaaagcaggagaggcagctacggtaaggccaagcaaaacaagagggaatgggagacaaagatggaggggcaagacacagactgcaggggacaactttggggtcccttgcagaggaaggagtattcgccctgccctttttggggtgtggaaacctgagaagttttgagggtcctccttaaacctgtcccacctgcttccctttcctctcctgagctccgttgtttacagagatcactccctgaactcttgccctcctggacttgccctagcttcggccccaggcctccggccaggcagacaccctgacaggttacaaatgagcgtgggtgttggattgccccaagctcttgccctcaagttgtccggaggaggagagtcaatgggctctacctaagggcttctcttctagtcccatctgggtttggagtctgagagagtgaagaagacacatcctgtgtccctccgcaacagccacacagaacaaaaaggggcgagactccactcctcactctggagtcttagaattcagagcctcagggcctccaccccgattctcccactctctgaccaaactccctttatcaatcctagaaaaattactgaaatctggaggaatctttaagatttaactggtattaaatttatgcatttgaggtttggaaattttttttttttggaaggagatggagggtggtgaaggagagacaggtaggagggaaccaggagaatgcaggtctccactagttttaaacacttcaagaagagaataaaaaattcccctcctcttcaccccgctgtaaacatcacctggctgtgctcattgtggctctctagagagatatagggagttatttaagtctgagtgagtgagccagctacagctatggatggctagagagaggataaatacatctagagagatgagaggtagggaacgaatataaatatggagaaagatggacgaacagagagatggattgagacagagagaatataaagagaggctgagggagagaaatggatgtgtgaatgaggagagaacatttatgcaaagagagagagagggaagatggggcatttctcatccttttctccacatttctgtagtcctgccttgctccctgaaatgccaatttcccacccctggcttcatgaattcttcctctagattctagatcctgccccacacccttaggtgtttttgcaccaccttcccccacctccccaccacacagtcatccatttggcccaagataacatacctcacccggctgtcctagcccaccaccctaagacaaattggaagaaaggaacatggtttgggagttctgggcaaagtatggaagctggattccccacctccaggtccacagacttagggggaaggtttctctgaggggtgggaagagtgaggggcagctggcttgaatttgtccaaatctaataacccaggagcctattgaaggccttgggggttgggagggaaggaaagtcttgaatattctcctaactttttccccctctccctctggtcccttctttccaaaagtctttgaagaaagatgtttttgacgcttccatgtcgctctcagatggatgggctgcgggtgattgaagtgtctttgtcatgctaatgcttggggggtgatggatgggcgctggggctgccaaactctggcccgcttagcccattggcctgggagagatcacatgtgccccctcacccccactccctacccccttcctagggaagcgcttgcccaggcgagcgggtcaggccatggattcgagccccagcgctgtgacatactgccgaaaggttgtagggcaagagggtgtctcccccaaacgggccgaccctcctgcggccttgacgcatggactataataggatgaactccttcttagagtacccactctgtaaccggggacccagcgcctacagcgcccacagcgccccaacctcctttcccccaagctcggctcaggcggttgacagctatgcaagcgagggccgctacggtggggggctgtccagccctgcgtttcagcagaactccggctatcccgc

SEQ ID NO: 18421 - DNA, 2300 bp, Homo sapien
tgcccgagttgcctgagataagctctggatccttcagccagctacagaagctgttgctaaactttcagaggtgttcaagggggtggccagagggagaacccactctcaggcctccctgcatgacttccagacagctactatttggattattctatgcccacccccatccacacctctaaatggcaaaaattgttttctttggagcctagttgcacactactgtcgctggccactttgcccaggtcagagcagctctctctgttctgagccctccagagcatgcctcctcggtccctgcagcccccacctccaactcccctttctccatcctcctctcccccaccctcatgcttctactcagacttctctgtccttctttttaagtactcacgcagatgttacactgacagaaagtttctagttccagctccgggctcagttgccatttctctgctaaccagccttctcctcctggctgggcagcagagagagaggagggggaggggaggccaaagccatgggagttctccaggcaaactttccacccaacttagcgctttccctctgtccccatttcccatctgtttcccagctctcccagaatcacccttctcttttgcacccccacccccacccccaggcctttttaagggatgtgaaattttggctgttcgctctgctttcccaaagagccaaattctttgatgcaatcggagggagctgtcagggggctaagattgatcgcctcatctcctctccatccgtctgacccacttatttaaaaatcttcccccagatcgacttttcattttctgctttgaggcctagtttcccaccaattgcttggggctcagagtcttgtgccctctccccatagtaaattacaacactctaaacttcagactatcttggtctcctcaaaataaaataaattttaaaaacattttcccccagcagccagaaatggaatatcatctcagtggtcattatttccacccctaccatcttcagggaattcttccttgtcagggattcttttttttttttttttcttttttcttttttaactagcacaatggcaaaaatgggagggaaagtctctttgtcctaggggaaaatctccccaccacactcatgcacacacataacgctgatctgaactttgagagtgctctaagttaaaccaatggctacctcagttcttgttcatgtccctggatatggatacagatacaagcttgaggcttgagtgggtacatgcacatcttagactctgcctgtttttgggggatgtcacagagaagcatggaagcctgaaagtgaggaaagcaggggtacataaggggcagaggcagtgctgcaaacactgggcagagaagagaacccagaccatacagcgatggaggccagaggcccaaaaatgccccttatgctccatctcactcctatgtgtctgcctgggagttcctgtccatttcccaagatttaactgttgtttttggagggtaacagggatagtggtgtgatgattgtaaatctctttcttattttcaccttaatactgacctttttcaaagagtggaagcctctttcgactccctcttcctccaacgcggagatcctcactcatcttttcctggggaaggggagaagggaaggggatgctgctggccacgtaaagaaggccttaatttactctattaaaatacttggaaaagaggaaggtttctcccttagagtctcttcttttccaggcttctgaaaccttctaaccttcgaaggggatgaggaaaaggttcctctagcttttctggagaaacggaggcattggggagagagcatgtgaggcactggtgtaggaatgggggctcatggtgtcctggtcgtggtcctctggtgtttttgaatcaattaaaccaaataatgctctctgttttccaccaggcccagacgagcgattggcggaggccggtcccgtgaccacgaattccctgtaatttcgctggagtcctgggtttaatagagagagtccccatacgcttgtatttatcagcaatatacaattataaaggcccaaaattaaaaaaaagagagaccgaaatctccccctcccaaaatcgctccattacataaatcggggggggtgcaggaggggggtcccttccgatcctccctcctgacgccccccccagcagccccctcccccaccattgaaagccatgaattttgaatttgagagggagattgggtttataaacagccagccgtcgctcgccgagtgtctgacttccttccccgct

SEQ ID NO: 18422 - DNA, 2300 bp, Homo sapien
tacgaataaacgcagaagagggggaggggaagctttatttatagaaatgacaatagagggccacggggaggcccccccagaagcaagattcaaatctcttgctttctttcttaaaaaaaagaaaaagaaaaagcaagaagaaggaagaaagaaaaagacagaaagagaaataggaggaggctgcagctcctcgttttcagctttggcgaagatggatccacgtttcatctttaatcacgccaggtccaggcccatctgtcttgtttcctctgccgaggagaagacgggcctcggtggcgaccattacctcgacacccgctaacaaatgaggcccggctcggccgcctccgcctctgctactgccgctgctggaagacagcctggatttcctttctttgtcccccactcccgatacccagcgaaagcaccctctgactgccagatagtgcagtgttttggtcacggtaacacacacacactctccctcatctttcgtgcccattcactgagggccagaatgactgctcacccacttccaccgtggggttgggggtgggcaacagaggaggggagcaagtagggaagggggtggccttgacaactcaggagtgagcaggaaaattgagtccaaggaaaaagagagactcagagacccgggagggccttcctctgaaaggccaagccaagccatgcttggcagggtgaggggccagttgagttctgggagctgggcactactctgccagtccagagttgtacagcagaagcctctctcctagactgaaaatgaatgtgaaactaggaaataaaatgtgcccctcccagtctgggaggaggatgttgcagagccctctcccatagtttattatgttgcatcgtttattattattattgataatattattattactatttttttgtgtcatgtgagtcctctctccttttctctttctgacattccaaaaccaggccccttcctacctctggggctgcttgagtctagaacccttcgtatgtgtgaatatctgtgtgctgtacagagtgacaatagaaataaatgtttggtttcttgtgaccagcacagcgtgtttttgttgaaacattggcgtaaagatatggacaaatgccacccagtgtatattttaagcaccctactgggttcagccccacattgtgtgtggttgaagatttttttcaaagagtctgatgggaatttttatctcagaggactccaaattgtggtggctggtttgttttccttttagggtgggtgtgttttgttttggggcttttaattttttcccttcagtccaaaaatggattgaaaggactgggaaggctgattccagtccctaatgggggaaaatgtttcattgtaggacacaagaggcttaagtacggcaaagcctttcatatcgtgatttatttgtcataagcaaataaaatgcggttaagctgtctccttttagacagaaggctctttggttattaaagttccgagagaggattccatgaggctggcctctttcctcgcagcataagaaggtatcgctttcctctgaggtgtttaaggctttaatgagtataattttttgcacagatgtttctgggtgtttgcaggttttcagagtatttttatattacaaagaagctagccagtgccatagctcaaactctgacaagcaaatagataatcaagaagacaaatggcctcttttgtgaagccttgctccagtattaattttcattttctttctcatagaaagtatcgaaagtatgactggggaccaaatagctttctgtctctgaggtcccagtcacccctagaatggagtgggggtaggggaaaggggtgcaggtgaccctcagaagctctgtcaggctcagattgcttttgtgcagcactgcttggaagttctaaggtctgggggctccagcctcagggtctctggtctattggtcatccagggtgcagccaccacatctccaaaaagctcggggctcgggagagcatatgcaattaaaagtcgttttttcagtcccatctcctttcagaaaataaaaagaaccaatcccacccgcgcgttttattgttatttattttgcattcctccagcttgcagctccggtagttggaggctgggtagggcagggggaaccgacaggccggtgtccccagccgcaaaagagctgctgaactgtccgtttaaatgctgctgggagactcgtaaaaaaatcatcgtggacctggaggatgagaggggcgagctttatttcggtcggattgcggtgtggtggtt

SEQ ID NO: 18423 - DNA, 2300 bp, Homo sapien
ttttattacaccaccttcacacccagccgcctcttcctcctcccttcgctgagaggcgctttggaaaatatctagatattcgtttgatcacaaactaaaggcttggaggggcacggaggagccgattggggttttgttttttctaaaaaaaaaaaaaaaaaaaaagtcctggggggaggggaggggcgcgaaggcacccagaaaggcctgaatctgacttcgtggcagcctcagaatgacccttcctccttttgtgcttagctaatgtttacatctcataattcatgcgccaccgagagttgcgcggcggcggcggaggcaaggttctcgtccctttgcgaactggctacttgaaattctaatagaagaggagaattgaaaaccttgtaatcccaagaacagactcgcactgcctttttctgttcccagagctcaaaactagaacaaaacgaaataaaaccaaagcactcaaaccacaccccaaacgaagaaggcgcggaaagtaggagaactggaaaatttctgggccaagaagatctgtctgtcttctgtatataccctgtagatccgaatttgtgtaaggaattttgtggtcacaaattcgtatctaggggaatatgtagttgacataaacactccgctcttatttttccagaagaaaaaaatatatatatatgtatatgtagtatttttctgaatgaggacagtctggtgactggccacacgaagactccttcctctttattcctctatcttttcctccttcaactggttagagatggagaaatcatctacctgaactctccccacgcctgcccctgggagccttggtcccttttcacatctctttaagaggttaatgttattgttgttgaagttttaaatttatcttctcgtcccaaacgcacccattttctattctgggctcagggaggctttattggaaattgcgaaaaaaaatgacttgtcttcagtgtgcgaagaaggcaaaggaaatttgtttaacaaacggatgctgaggccgcctttccgtttcagttcagaacaagatgacctggaaatactcgattaccaaggagtgttattgtctgtgtgggtcacctctatggctgtatccccagtatcaaagggatgtgagatttctattcgccgcggaggcggcgacaattagaacgtctcggacccatggttagtattgctcgggtggttatggaattagcaaattgctaatcaattttgctctcaaaagttgcaggtttttttaccccagcgctctgtctatagtgtgggaaaccaagtcgtttctccaggcttgggccgtgtgggttaaagggaggagtggataggagaagggggacagacggactgacggacacagtctagctaaccgtgcagctaaatgagatttggaaggcgaagtctccccgaattagtgcatgaatttcctatcgatccgcccgcggttccattcatctctgacaagtccctctgcgcacccgccctctagctctggacgcctcctctctcacccctacccttccccatccagctgcagagaaaagccccaagctctgtgctctggcccccgtatgggttcccctttcgagacggagcccccaacccgccagtaacctaactccccatagagacgcagggtgctagcgctccctcccgccgaggggaggagactggggcctttggaaggtacagaatgctgggcagaggtgaggcagaacaggagggctacaccgggagccccaacttcttaagggatctagggtttgcgctctgcctagcgccccaacaggccctccagtcgcaacctgcgcgcgctctctctctcgctctctctctgatcccggagagagcgaggcaaggagggggtcgccccgcaggagccctatgtaaatcctggtgttgggtgggtgggtggggagggggaagggaagaaggggaaataaacctctttggctggagtggggtccgggtgagcagatttccttatccgggaatcgcaggcggggcggccattggctcggaggatcacgtgggcgcctaactttgttcacttgacagtaagtaggagggctttcggaaacaggaaaacgagtcaggggtcggaataaattttagtatattttgtgggcaattcccagaaattaatggctatgagttcttttttgatcaactcaaactatgtcgaccccaagttccctccatgcgaggaatattcacagagcgattacctacccagcgaccactcgcccgggtactacgccggcggccagaggcgagagagc

SEQ ID NO: 18424 - DNA, 2300 bp, Homo sapien
ggccttactatctggggttctagcttccagaagggctttcagaaagggaagtatattagagtgaggccaggggcacaataggaatggggttcccctggagacccaggtcagactctcccttgcagagctctttgtctgcatgtctgtcaactccgttgccttgtagagtggaagactgtggaagctgtgcctccagcacttctttatattttcagtggtgctggggatcctttgggagatgacctgtgtctcctttctaagggatacaaatgccctcatcattcttgggatgatatgtcttcaaaccagggtgactctgctcttaaagcctgttaaggatttcctgtaagtcaggcttgggcagtggatagagagctcagggaatagaaagtggcttcaggagaaagaggacagggggagaactccaatgtcccttaatgagaaaaagggagtcttatgaccccatccttgtcccaaagatcagaagcccctcgaggtgccacatatccaatcccagaaactacctatggcagttggtgagctgaatcaagggatggcaggctggtgaaagtaggagtgacagggtagttagccccacgggtgttaaattggaggggggtcaatttggtggggaagaagcctctgacttttagaagggtgacttttccctagaaaataacagaacccctggggatcaaatcctgaagtctctctggtttatggttctacaaaacaaaggggactttgagggtgtgcccagaaaagaagagggaaaaagagaggaaaaaagagcacctttcctattttctcttccagctcctgaatctatttcctcccgacagttgagggatttgtattcttgagctgattttatttgaggagggcttgccagagttctacttaaacacctaacacctctaggcaagagaagaagctcttcccttcccccactcctggttcaggaattaggttttgaattgggggaattgccctctctgtctgctccctagtctgacttcaggatcctacttcgagccaaggagaaagattagcttgagaccaacaggctgaaggtggaggcaaaagcagcgctgtgctccccatcccagagaagcctgatgaagccaaagataaccggagggacctctttttatgggcttcaaagatcggaaagccagagatcaccccagggcaaggtagcccacagcagccgcctacccggtgctttttctcagctcagatgtatccagataaaagtgcccagcggtgcacccccacacacctccgacaaatgaatgtcataaagtttctttccggaggatggggggatagttgtctgaagatatccagcagtgaagtggcccccaccaatggccccttctttcagcaatatacacccctccttcctggtccctaaatttccgctggcactgagggagcatggatcccccacacaaacccttttccccacaaagtcagacactcctgttggtaaaaatcaggcacccccgaccgatgaggccttaagaaactgagagcactcatttcaggcacccagtcccttagaactgggtgcataaaacaggctaaatttcccctacatcaccccacagccccaggtggaaacaagttttcttcccccagtcccaggccccagaattgcaaggggtaaaagcgaaagctgaaagcgacttactgcgggaatgctggcctgggccgccgctgccttctgggctggtccggctgctccaggctgggagagtgctcacctacctctgcccccttccccaccacagcgagcagttaaagtgtcacttaacattctggagaatgtgaaatatactgcgcggtgtcaactccccaaaaccataaaactaactttatggacctcacgtgactttctcgagccagtgaggggtatctgtctgacttctcggcgatttttacgatctaacttcgagataaaacccctatccatttgacatctaaatgtcatagcgacttttgggatagtttgctatcgacaaagggagacaaagtcaaggggtgaagggaaaggagggccaagtagagcctccacgaccctcggcttcctcctcaccagctccccctccctccaagtccagtaagaagttgggccaagctggaagggattgaccgggtaagtgtccagacttgactcttgtgctcagggtggaggctgacttggatggaggtagactgggccctagccctgggccaggctgaaagggaaccaggggtctttctgaaaggaccctaactcctaatcaagagggaag

SEQ ID NO: 18425 - DNA, 2300 bp, Homo sapien
tcccccgtgcacggttcaatggtagattcgctgtcccctcagcgggggccttgaagactccctgatcccagacctgtcgtctctcccaccccctccccaaagccactggaaggagcacatactacctagaagtaagaagaggagcctcagaagaaaacaaagttctattttattaattttctatgtgttgtgtttgtagtcttgtcttagctctggacgtgaaatacttcgatgatgatgatgatgatgatgatgataataataataataataacaacaacaacaacaataataaagatgtgaaaactcgacgctcggtcacctccaatcctcccctgccattttttcctctctcctcaacccccagcctctccatctttcctgagccagaattcttcagcaaaggcgagagccctggcccgccgaagcgagccctgttcgactgggaagttacagctgagataaaggctggagcgatcagtcctgcccaggccccagcgctgcgtttccctggtgctgaggctcacagccgcttctccccgtgcagacttgggggatggagaggtgctgtgtccctctcattctctagcctttcctcgtgtatacacagcactaagggagccactgaggcccctaaagctctctggcggagacggagccatagtctgggggcctctgcagcgcttttctgtcctcaccttcgcagcgacccctggtctttggcccgtccacatggccaggttttttcgccagccttggccctccgctcctggcctgtggctctggagactgaaaaatggggccactgggtatctctcaccctgcagctgaaggctccaggtgccccttcccacctcaagtagcagatcagcctcaagtaggagatcagcctcaagtaggggaatgtaaagccaccagccaggcacaggccgaaggccacaactttcccttgctccttggagaccccagggcaggaggccaggtgatggggcttttagtgtcatcctctcaacccagaatggctcattctctctctgcttgcaccggcacccagaaggcaagctgcggtcactgttttcctttattcctccgccctctcgcttcctttcttatttttaaagaaaatagtcccctcctaataggagaccagctgcggcggtctctggccgcccagcgtgctcagcaaagcatgcgggtccttggaaccccttttccgggaaggcggctgccaccaggcaaattctcaaactgcctagctgcgagtgagggacctgtagtggggcctccgaatgcaatagccgaggaggaggggaagggatcccgctttacaaactctcagacacatgttactactcaaactaagcagcagacgcggtggccgctgcagtcttttcggcaactaggccgcttagccccagctgtgctcggtttctggggtccctgtcctgctctgtcactccccacgcctgggctaaggaccaccaaggaggtccggaaggggatttcgaacttccaagtggcccaggagaagtgaacgcttctccttctttttcaagcctcccgcccagccctgccggctcggcctgggcgctgtggaccggtaacagcagttccaccaggatgcaggccggactaagctcctggggaaaacccgttgcaataattgtttttcacacacaacttccaacccttcccccatttccgcctccaattcggagacttgcaaagcccaagaaagggaaaagcaactctatctttgatcttctcatccaaagttaaaataataacgacaatgatgatgtagggagaaagaaccaaatagagaggctaaccccacccacaagaaagtgggtaaaaagcccaacccctgctctaaaaggctcaaccctgtggctgagccttggccgggtttctttctctcccggcgactgcagggagcctgcagggagccagcagggaggcagccgcccgccgccatggcggtctcacgcccgcgctcccgtcggtcgccgggaggtggcgcgctctgctcagaggccaaagccaaccttctctctgtttctcccccttctccttttttccccctctctcggaggctcgcattgaatcggccctaacgattctcggatcgtcattatttgtaaccatagagcatgaattacctcttgaggtcatcagcgagaatttacgactggtcaacaaaagcacgtgattccctaacgccccccaccccccttccaaccccccccccatatttggccgcatacatagcaaaacgaagtacagtgcatcgctataat

SEQ ID NO: 18426 - DNA, 2300 bp, Homo sapien
gaaataattgccttatctttagagtcacagcccccaaattaacctcacctctgcaggttgcttgtctggagatggagccactacaggcgggcctgggcgcctggagtcgggcatgaaagaaaatagcgcctcatcgctcttatctaagcccagaggtatttatgagcgtttattcgtctgatccgtttgtttgggaaaaagagcaggcgggcagggcaggccagagaccgactcctttctggagccagatccctacgaatctgtctgtggttcggtccaccgccctctgtctgtctccttgggggaatatgtaaatacacagcgggctcagccatccgccagtctggggtgtctctccctgcctcaatgaggaagtgtgtgttcagagagatggatagaagtgtgtaccaattcttgagtacataacagagggattgtacagataccccacaggcaggatttataattgtaattttctatgctgtgagtctgcagtcctgtgggcaagctaacacattccagctcccaggaaaatgtttcctaagttgtgttcagttcgggagtaaaattcttgataggtaacctcaggagggatatttgcgtgtgtgtgtgtgtgtgtgtgtgtgtgtggtgtggtgtggtgtgtgtgggagggtgctgagacattgtccaggcttccaatttcctctaagctataaagccctctccctcagctctttgaggtgatgagcaccttctcccaccacccccaactttggctggggtggggtgggatgaaaatatttcaactcaattctcgtcctggactctgtttctctgggtttggggaacataaataaatgttcccaggggtactgagtgatcactcccataggttgagggaggctgtttagatgagacactttgccctaaaatcggcccctccaaatcaaagtacaaagacttcattttcattatgcaaaggagcggcatcctctttgatctttaggggagtgagcagtagtgctgaacccactctcccggtttcctacccgcaggtccaggggacaacctgagggccctgaagtgtttcaataccatgtaccagcttgacttctctacatgtcctttggattgcccaaaagcaaaatctcagaggggccaaggaccttctagggctggctccctcagggcctcctatagagcagctccttgagtcgggccttatagccaccagaaagtcacctcgccgcaggaaagctataaagagctgctccagaggcgccgaaagagggtgagggctgcagccacagtgtttgtccccagcaccaccaggccccttaacctcgtcagctcctctagccctcggccagactctggcaacaccttggtttgcctggcaccgcaggcaatttcctggaaccccacccccacccaggaacggggaccacagcacctttaaaggaactgccagagcttcctcctacggcttgaaagcccaagctaatcagtaacccgtgagacaggggccaatattcaaacgctgcagcagaggcgcatagcctagccctggccaccccctcttgggaaggaggtcgagttaagccggtgtggagggtccaacaggaacggaaattacgacggtgtggttccttaaggatttggccccagtcccactaccaaatttttcccaaatcatatttaggtagacttcgcttgaaaagatcgagaatggaggaggggatcggcactcacttgcagacatcaacagtttccagaaaattcggttcaattccttcaccacggacccaccaaccaaggagctggcaaaacccactaaccaaccaggagaacacagacccggtttgtcttttgacaaccgagtggaactgacggggccggcgcctgccctgcgggtcccctcccttggctgagaagaaaaccaaataaaccttgaacagccttggcttcggatgtctcaagcggcctcatcctctcccgcgccttggtggggtgggggtggggatggcggtgggggtgtcggctctgatccctccaccctttgattcagggcccctgcccgctggaagcagaattagacctttttatatatgccctagaggaagccgcttcccttgccagccgccaggtttggggctaggatgggcggggacgggggcagtgggaaattggggatgatgggtggaggagagacttctgttctctaactcacaccggggaaccaagatctagctgagagcgtcggtgtgggcccgaaatcccccgaatcccgtggaccctgcgaggccggggctccaggc

SEQ ID NO: 18427 - DNA, 2300 bp, Homo sapien
aagtagtgaaccccgatattgcactcatgcattccctttacacccttttacacccattgacatacatgatgcacacagtcacatgtgtttacaggctgacatcaaacatacacactgtcacagtcacaaagagacactcatacccatatgttaacaaacatacaggcattcacgtaataccagcttcacgcccagaacataggcattcatgttcacacacgctcacaagtaaacacacattcacactcacagacacattgataccaacgtacattcacacattggcttataaacacagattcacatttgcccccaagtaaacgcactcagaagcccacatgcttagtcacacaagctcacaaaacaacaaaacaaaaacctcacagtttcacaaacccgcgtcctcattcaggcctggaaaccaagctgcgggatctggatctgggctgcagcccaggcacaaagacggagctgaaatccaagctgctaggccccacatgaaggaagagcggaaggaaagggaaaatgaacacccaaattcactctggcttcttgggtggcgttgcgtagaggccaggcctgggagtagaggcctcttagtcggcgcagagcagcctccaactagggcgctcacggcttcctgctcgcacggcaaacattttcgccaagagctattcctatattttatttcgatttattttactttctttgtcttaatttatctcgttctaaattgatacagacgacccaaataaaactttaaaatagggggtggggaagggaatgagtccgggagcaagatcctaagaggtgcgagtttaccaggccggtgtggccgcatcccggccgctctcggagcctgaccacgccacgcccggggcttcctccgagcctctcttcccgctctctgcgccgccgccggcagcctggaaccttctccgctgcacagagagagaggggggaaaatgttgggggaggttatttcgtttccagaattcgggcattggtaggtcaacttgaaatacggggttatttcaggggacctgaaaaacctgggctgaatttttattttattttttgcttccaaacatccgctgattgcaggaccaaaacttggaggatggtgtctatgcggctagacccgctgaattgatttttagcatttattcgattataaactctggattgtttaaatttaaacagactttggatagaaagagggaagagggttggttttaggataatctgttgaatttgaatttgtatgtaaaatgcttttaaacctgcagtttcccccattaatgaccacgtaacgccctggagagcgcatggagctgtcataggaaacctggacttgcctgcatttgggcgggagaagccaggatccggctttaccctcccccagtttctgggttccggaggcgagaatcaggttgtcagactatctgccttggcccccatccaggccacttttcctcctggggcaaaaactaagccctagggaatctaaggcccccacgcctgcaatgctgcaagcctcacaggtgggggtcctgctgtctacagggctaggaatgagggggccagttcagagggggagaggggacactgaagctttcattttgcccttatgcaggtggcaactctagacaccgtttcctgctcctgcctcaccccaaaattgtctcagaacagtccctatgcagaggatttggggtagacctttactagaagagggagcagagctcctgtggagagtggggaggttcggaaaagaacccccttcccagctgtaccgttatggcttttgcactctgatttcctgcccccccaaatctcaccccttctcagattggggtttccccaaaaagagagaaggagaagaaaagaagatggcgactgagaaaagggttgctggtggagcagccatgaagaaatgcaataaattccttgttgttttatgaaaatttacaactttgtgatagaagtttatgagtggttgaatccagcgattggccggcgccggtcatgtggccgggcgatcgtgaacatgaactttttatcatttccctggtggttataatgcagcattcttttggacaccacacctaggtcggagcactgtcgtccttcagggctccagcctcttgatatttttgtacttcagtatcagctcgatagagcaaaagagagagaggacgagagaggggggtgaggagaaaagagagagagcgcgagagggagagggagagaaggaggggtgggaattacacaaagagagaaccaaaaataattttgat

SEQ ID NO: 18428 - DNA, 2300 bp, Homo sapien
gagctctggccccgctagcggggccaggagccgggcctcccaccgcagcgtcccccgccgcgccagtccccgctagtggtagtatctcgtaatagcttctgtgtgtgagctaccgtggatctccttcccttctcttgggggccggggggaaagaaaaggatttaagcaaaggctccctcgccctgtgagggcgagcggcaaaggcccggctgagccccccatgcccctcccctccccgtgtaaaaagcctccttgtgcaattgtcttttttttcctttgaacgtgcttctttgtaatgaccaaggtaccgatttctgctaagttctcccaacaacatgaaactgcctattcacgccgtaattctttctgtctcccttctctctctctctctcgctcgctcgctctcgctctcgctctctctcgctgcgtcctcatttcccctcccaatcctctctcccctctgcaaccccccagctcgctggctttctctctggcttctctcttttcctcctccacccaccccctttggtttgacaattttgtcttaagtgtttctcaaaagaggttactttagttagcatgcgcgctgtgggcaattgttacaagtgttcttaggtttactgtgaagagaatgtattctgtatccgtgaattgctttatgggggggagggagggctaattatatattttgttgttcctctatactttgttctgttgtctgcgcctgaaaagggcggaagagttacaataaagtttacaagcgagaacccgagactggcccggccagcgctcctcatttgctcccgggtgccttgcagagccggtggggagcctgtcaccgggctcctgcgcctgctgaggctaggctgcagagaggagggggcgggggctggaggcaggtggtgcgagtccctcggcccaggggcgctgggggtgagggaggcggctgagcctgattggaggagagaaaaacgagggaggggagccaagagaaaccccctcctctcgcgttccgaggctgcccggccagggaggccagggcgcccaggccacgctggagacctgcggctgggctggtggctgtgtcccccgccacctccctctttgttttgctgtgtgtcctcccaagatgtgtgtcgggaggtggggtggggggcaggcataaaggtggagtgcaggcctgctgagcatactttttttccctcggactgttgttgttgggggagcaggaggagaagggagaccgctcttccctgcctctccctctcagggacttggccaccttcgctctgttctgaggccatggctctctgccttccttccttcgctgcctctgcttctctggtagtcacgctccactgaggcatccgcctccgggaaccgggagagcagcgcgcccgggccaacctccacccttcctttctctccccaccctcccaaccccctttttcttttactttcaaacctttttttttctttttctttctttctttctttttttttttgccaccagaaacggcagcgtccaaggcccgtgggctggatcctgtgccctaggagcacctaggaagacttgctccatctccgcccgcatatctggggcaccaagagagacagagtcgtgagccaggctcgcctcattcctcgtcttgggagaaccggaccaacttccccaaaaggccttgccgtgcagaattggcctggtttaataaagaacagacctgccccaagcacccacccacccagttgcgtgcattcaatccctgcgtttgtctctcgctcggtaacgggctgaagaggatgggtggagggtgacacggatcgccccgaggttatttattttcccttccactcaatctcttcctccccaaatctcgcctgcaagcggcctccagcccgcgggagtcggcagcggcccttgagcccccagccccaatccacagggctcggctttcccattcattattgatcatattttataaatccaacgccacacaattttttccacattaccgggagccgtggggagacggcccggccattggcggaggggacgtcacgtgggcggggtcacgtggtccggagaggaaaaagggggtcctttttggtgtaaatctggactctaattctgtaatatatcaaggaatctcgtaaaaccgacactaaaacgtccctgcctacaaatcatccggccaaattatgagttcattgtattatgcgaatactttattttctaaatatccagcctcaagttcggttttcgctaccggagccttcccagaacaaacttcttgtgcgtt

SEQ ID NO: 18429 - DNA, 2300 bp, Homo sapien
tcccttgccaatctactgctacaggaggctactggttctgaccctcagactggggccttctaaagcctggccaccaccatcgtgaagccgggtaggcagggaacgcagtggccacagagtgtggcacccagtcagcttgttccagctttccgtgttcagacctctggttcccaggtctgcagggagagccaggtttaactacaggctccccaaggcgaaaggagagaaaatgggagactcagcaaccttgctttatctgaattccacacccaagtcagtttaggtggtgacagtggctcaaaaggtcttggggacactgaggactaatagatgccctcccaacacatactctgcaggcactgcctagggtggctgagagcataggacagcggacacgaaggccaggtgccagggcctgatacccaaccttctttccttttgatgcagtgatgggctcagtggtcccctctcacccttaggcactgcagaaggtgtgggggtcggcctgggaaggttgggagctattaataattgggcttggctactgggtcccaaggcctgggtgcaagtgtcgggtagcccattggggcttcatccctctgatggcatcaggccctctcccttcatgcaaagtctgccctcaaaagtgctgatgggctgaagggccttcaggagacccccttttcagcaagcagagagtgcacaaacctgcagaatcggcagtggcagctcgaactttgctctgtgcttcaaccactgctcattaaccagaaagtttcttcttccctcccgttccctcctcaagatctcccagatccctgtttcacagaaaatttttgcttatttgtttaatgagaggaagttttgtgactggccagggcagggcagagagggcagggcagagaagggaccttttgggggctccagagaaggggtgggggcaggtgcttgccaggacggaaggaggtgaaaatctcagaaaagtcaccgtttgtgccaaaaaaaaatccccataatcattctcatttcggcttcgtcacccccaccgtgctgcaatcgggcggcgggggcgatcgaagctgcagttttatagctgtagaggaaagaactcgtaaaatgctaacagcttttatgcgctgcggcataaacaacaacagactccggctttattgcgttttatagtttcttaaagagtttacagccgttttttggggggccggttatccagccaattccctccacacgatagttaaacctttatcaataataaggaaattgatcattaaagctttaaatatgactacctcgtttgtttgaaaatacgtttaggagaggaagctgtatgatttgataacttgtattaaaataccaattacatttataggaccttttaaaactcggcgcaattaaaccgtgttcttttacatttttccgaagcgaccctgacatttagaaagactccaattgcctcgttaaaatcgcgaaattaacagcgtgcctacgcctggcgcgttgtgtatgtgtgtgtgcgtgtttttttccgtgactcccccacatcagtctttgggggtggtctgcgaaggtatttgatttgttgtgaggcgagagatatctcattaatgtaggtagttaaacagatttaatccgtattcattctctctcaccccctctccctctccccctctctctccccctctccccctctctctccctgggtgtttttttcttcccctcctttttttttttccgctctctcctcactccctggcgctctctcgctctagctctctctctcgctcgctctctctcgctctcaccctcgctctgcgttctgtccgggaggagtacgaagaagccaataggatgcggggtctctaatggatgcaaatgatcatgaaaagacagtgcaaaatatgaaacaactcatttgcagggaagtaaatcaccgaaaactgtttatgaactggcatcccttcttcgaaatgtaaagcgaggacctctttaagtggtggtatatttttgtttggggggtggggggtggggggagggcgagcgagccgcggctgccatgcaagcttagacttttggaggcttctctgtccttttctattcctggaaaccacaaaaagtgtgtcggcttcgagatcttcttcgccttttctttcttttctttttttccctcctctctttccctctcctttcctggcgagggtgactaggagccggcgaatccgcgtttttttctctctctccctccctttccccctccccaccccctccccaacagcccccaactatag

SEQ ID NO: 18430 - DNA, 2300 bp, Homo sapien
agaacaggtgctttgccttaactgtgattcattcgctcagtgcccagctttttcgctggtgagtccggggagctccctcgactttcccaagcgtccaacctctgcttggaagaatttgcatcggatttttgtttccccacttgggtcctatggaaaaggcagaccttcatgctgtttggttacggatctgccgggctgtcaccctcggagagcaggggtgggaaaggagggggccagatgggcgccggcattgatctttaaaaaatcattttgaaatcgccataatgtgaagaaatatggcgcttcaccctcgtatttcacgtgtaatgacacgagatggcttcatttggaaagacaagcgggtgggagtgtgtgcctgtgtgggaggtgatccgcagccttctacaaggcagaggggtaggtggccaaaaagatacggactcaagttagagtggcccctcttttgctaaaaggaccggactgagggcagcctgccttattaggactcagagtcagagagttgccgagaaatccaccccaatctacccctgagcctaaccagaggagaactgggtctgtccaggggtcacacctccccaagtgccaggagaggcgactgcaaccagggcagaagctgaggagcaggggctgggagaggagcgaggaagccagtcggtgggccccgggggagtccctgtgcagggccacagaatagatatatataaaaagggctatttggaagctccaatgaaggggtctgcagggggtaaggcagtgaggggaagagactgaccatgggctcgctgtccacactggcccctatatcggtgtttggaaatctccagagcaggagcctcaggtgagaggagtagtacaggagggctgaaaactcagcccaggctccttcctctttggatggaaggggagataacttgggaccccttcccttgctgactggggatcctttcccaggcctctgctctggtcacacctcaggaaagtggccttaaccctttctcctatttagctccctcatcagggcaaatttaggggcctgggtggttattcagtggagaaaaggagaaatggcttccctcacccccaccccccacgtcaccaccaccatcttaaatccatccttctggccagagtcagagaaaggcccaataaatgtaaaggcgctctggttccttgtattaaactctttcctaggctcacgtttccgggacctgatggatccctttaacctcaagtagtttctaatttcaggacagatagtggattcttggacactcagtcgttttattcacctctctcctcctccctcagctactgaggggcccagggaagctcgcagtcatgtaaatctctacaaagagtgcaaggagagccccctccaaagcggacaacgtcctaaaatccccaacttttcccctcatcattttacttcatctcctgtggattgctgctgctgttgttgtttaataaacatcttttgtcaaggggaaagagaagaggaaatgagggcctgcggggtggaggtgtgtgtggggggacaggagcacctcctcttccagtatcctctcgggcctctatggcttctccccgggctggggctctctccctccctccgcccttgctctccctccctccccgacccgcctggggagagggctctacagcctgcgtccctcccaaggcagcccgccgcttccctccgcctctcctccgcccccgccgccccatgttgagaactgccccccttcctgcagcgggagggggggaccgggcggccggtagctggggctgaggttacgtggccgccggagccctgacgtgatagcacattgcatcagcataaaacaatccatcctcgatatggagtgcggtgcggacggatgacagcgagagcgcagccccctcgcccgattgatttatgtcggagctgacgctttatcaggcagtcggaaaaactttgaccaatcattttgcaaggagagctgagacgggctgctccactgtactttgttggctgagaagttgagcagggggtgggggtgggagggtggggggctgggggggtcgcgtccgaaagccctcacaccggtccgggtgccacctctccctgcttgggcgccgccgcgcgagcgcttcccttccccctgcaagcgcccggataatgtctgagaatgtccatttctgggacgcttagcagctattatgtcgactcgatcataagtcacgagagtgaggacgcgcctccagccaagtttccttctggccagtacgcgagctcgcgg

SEQ ID NO: 18431 - DNA, 2300 bp, Homo sapien
agaaagaggggctcttgggggtcttggttagcttctttgctatttcccctccttactcttttcttctcccctgtctccctttttcttttttatttatttttagagctagagtctcgctacattgcccaggctagactcaactcctgggctcaagcgatcctcttgcctcagcttcatgagtagctgggactactgcaggcagctcccctttattttctgtattgcatctggctccgctagtgttgaagtgagagagatcaaggagaaatacagggcaagaaaagatcctgtgtctgttatagttttaatcaggtgttggagctctccagatgtagccaaaggccaactcttttctatggggcccatttgtggatttttcagttcctcccatttctggttattatttggaatcagaataccaataattgaaaagaaatagcatttcaagcaagggaatatctgttctggcttggaaaaaatctatttcatacacattttcatttttagaaagaatattgttgtttagaaggagtatttaaaagtttatatttagaatgctgtcgaaagttccaaattatttgttaaatatttagaagattttatagaaaaggagcatttcaaataaaactcaagtattaaagaagaatatcaattaggcaataataccaattaagcataaaaaaagagaataccagttaggcaacccactctcctgttgggctgtgaactggccatgcccctttttgcctacattttttgctcatgccattcactggctgaaatgccttccccttcctctagccaaatcctgcttttcctttgaggcccaagtagcacctcctcatgaaagcctcccatgactaccccaactcacttctctttttcctctcgcatttaggtattgactgctgcctcatgaaggctggtcctgtctctatagtgaatattgtgcacctcagggtagaatggagagcagaagacttcaaatcaggcagtctgggttcagaccccaattctagtgctaaatagctacgtgactttaggccgattgtgtgtgacttccctgagccccagtctctttgcctgcaaaatgagaaaaattataacaatgtcatcggttgttctgaggattctgagaggaattagtaggagagagaactaagaagctgcgggcctctacagagccattcaactggcatttcggaagatgttgcccatcagagtcagaccttcttagcatcttccggctgggcccaaacttcccaagaccatttggacaaggtcatctctatcccaccatggcctcctcccagaggaggagaagaatcatgctgttacagcagaaccgaagatttgggcaagggagctaatgattatgttctgcgtcaggtcagagatgggctgggaaagccactccaaagccaagacaagcagtttcctggaaaaagaaggctgcgcggagcccagagtggcctggatcctgcctcatttcctggaccagctccttaggtggttactggattgccaataaagcagagcttattaaagtcaacgagctcaggcttcatcgccgccatggtatccaagcaccagtctgtctgggatttcatttgccagatggacaaaggagaggttgttccaatacatatcctgagtggtgggggtggggagagaaggggaagaatgctctctagagaattctctttgtcctctgaagtaaatagagatcatgtcttccccagccacactcagtgatctgaatctcttggactgtggatttttcctttacctgctgtgaagccttgaaaagtatgaattagcttgataatgatcctctaaagatgttcaagagttaaagacgtgtttaagttcttcaggcaatccaatatgactacgggtttccaaaaatttgaaggaaactgaaaatcatagttcccaaaccagatattttccggtgtccagatgttcactggcatgcaaaccaaatgtctggattatgagctccttttttcatttctttttatcagcttacatccagatgttggatccaactggtcagaggcctggggcagagacagaaatcaaatctagggtgttcatctagagtctcctgctcctccattcctgcttcctcctcacgctgcccccacatcctccccaactcaccttcatgctacatctcggcaaatacagctcatatccaggcacggtgcagcccttgacagctgggtccgcaaaggcagatcgggtatatctttaaagaaaagttatcttaaccattgagaagccttccttcctca

SEQ ID NO: 18432 - DNA, 2300 bp, Homo sapien
ttaggtgagtcctgagtgtttttgtggattactgtgcccaccccaagaccaatgacttggcaatatcagtggttggctgaagatgtgagcatgtggtccccagcctgcttctgtactggacccagagcccctgtgcgcacacatgcctgctgtggcattgatcccacacttggcaaggcagagcttctgagagggtgcaggaaagggaataaggaagccaggggcccagagaaaaaggtgcaattattattattattattatttgtcacagagtctcactctgtcacataggctggagtgcaatggcataatctcagctcactgcaacctccacctcccaggttcgagcaattcttgtgcttcagcctcttgagtagctggaattacaggtgtgagccaccatgcccagctaattgttgtatttttagtagagacagttttcactatgttggccaggctgatctcaaactcttggcctcaagttatctgcccacttcagcctcccaaagtgctgggattacagccatgagccactatgcctggcccgtttttatttttttaaggcccagagcttttgccttaaggatgagttagtttaaaaaagaaaaattgttataatcacagttaactttcacccagtttccttttttaaaaaaattttattgtataaatagagacagcgtcttgctacattgcccaggctggtctggaactcctgtgctcaaggaatcttcctgcctcggcctcccgaaattccagaattacaggctgagccatcactcctggtctcgcccagtagatgtttcaaagtagatgttttctaaaatattttacaatatttacaaattttaaataataataacgttatcaatattaattttgcttatgccaggactccatcccattggagacaaacattaagtcttatggcagaccttacagcgggtgctagttcccactcccaagcctctcccccgcctaggtcctgcaggtcccgcgtgctgcgaaacattttctttgtccctttctgcccagggcggctgccggtctctccaggaaccgcgagtaggtgctcccgccaggtggtatcggtgaaagcctgctgctcacccttcccttgtttcccaaaacttctgaaggctcccaaattcctgggagaccctctcccagggcctcctgatgcagctaccatactgagcgatccgtcgataacgcccttggcccaccgatcagtttaccttattagagagaaaagcactcttggaggtagtaagatgggccggtccttgatctgagaaatgggcgcacaacatcgctgttctctctgcaaaggtggggaccagaatccagcttgcctgaccttgcaagcaagcatcggcctaaaggtttcagcctcccagtggcgctctgtttgcacgccttaggctaggagaggaaggacgggagcacagcactgggtgcccctctccctgtagagtctggggcggggctcagtaagaaggcctgcggttggtggctccccacctcatagctgcaagtaggggcgaaagctggagtgtctcctcccagcagcctcctcgcctccccgcaaacctccgaatctccctggacctcctggttgctgtggcccttcctcccctgattggcttcctccctctttcccaaggccagagaagtcctctcttcccctcaccttcctccctcttcccataaaacttttaggaaaatgggggcgggggcggtggagaccaccagcctggaacttcaagttcaatggcaaagtccctgaccctccccccaggctgggcgccagcattattctaggggcgattaaactcttttgctgccccctgtgcacctcccagttcgggggcagtttaggggaggagagaaggtaatggtggaattctttccctcactctcccccgaccacttcgtcccctccccctcatcccctctacacagaactaactggtagggagagaggaagaaaggctggcatcggttcctcattggatgttttaaatctgtctcaggcccaggccagtgcctggggggaggggcggggtgtcctgcttttgggctagaggcccggggccgctcccgagctttctcccctcttccctggagagcgactgttcgggagggtgagaatggtataaatttcaaaaacaacgaaaccttcttttgccccctccgcagcagtcgcctccgggctttattgcaagtttacggtaacgagttcatctatttaattcgcggttgcagctcggggatttctattagacaggacgggttgg

SEQ ID NO: 18433 - DNA, 2300 bp, Homo sapien
gcctggggcctcgtgggtactgagctgcgtgtgggggtccaggacccgatgtcgcctgccattcggccagggcatcggcagatgtattggtccagcccccgagagacccaggaagaaggcaaggaggttcggtacgagccatctcgaatggaagaagaaggcggtcggtctgcgggagccaggccgcagagccatccgccttctgtccatgtcttctttatcttcctcgccataataattagtggtgtggacccccccacacacactttttttcggatttacttgtatggaacctgtgcaaaaaatatttaatttcgttttgtattaaacgctttcattgggaatcccttcccaattttagtctcccacctatccctggacgaccacattgaaatctctcacttatttgtgtttaaatcacaacaaaatctacaaacctatattcgcctgcagatatttatttttacataagggctatgttaagctacaggaggaaatgttttgcttaccattcggacaaacgtgtgaacacaatgtcacaataggtgaatccagacaatgagctcacagacgaataaacgcagaggcacacacatatactccggaaaataagcagggcgccttttcactaacaaggcgcaattgtaccctgagctgccctccagaccgttcccctccctcagagccaaactcccgcagcgaatctctcagcaagctacgaaatgggatcacagggtcgcgtctacgcgggctccaggcccgaaataatttctaactccaaagcaagtggattttattaggcctccagaagccgaataagggagtagtggcgcaatgcgtagaaactacctccggaagctctttttgaatctcggttccagcacccgcaacgcagagcgcgaacctgaggctccatctttcgggttttactccggctggctagcgcttccgggaaccctgcgaggccgccgccagccgagaatccgccccgccttccctgcaggcgatccctactccaaatagtagttcccgggccggaagctggaaagccctcgaagcaggaaaaagcctcatccaggccccccagttctcgggagcagctccagctttccttccccaacctagagcaaacttctcttccctgcagctcccctcccccccttcattaaagttatattgaaggtgctaagtgctgcactctaattgggtttccttcaggggagaccctgtgccccccggccccaacccgtcctgtctaatagaaatccccgagctgcaaccgcgaattaaatagatgaactcgttaccgtaaacttgcaataaagcccggaggcgactgctgcggagggggcaaaagaaggtttcgttgtttttgaaatttataccattctcaccctcccgaacagtcgctctccagggaagaggggagaaagctcgggagcggccccgggcctctagcccaaaagcaggacaccccgcccctccccccaggcactggcctgggcctgagacagatttaaaacatccaatgaggaaccgatgccagcctttcttcctctctccctaccagttagttctgtgtagaggggatgagggggaggggacgaagtggtcgggggagagtgagggaaagaattccaccattaccttctctcctcccctaaactgcccccgaactgggaggtgcacagggggcagcaaaagagtttaatcgcccctagaataatgctggcgcccagcctggggggagggtcagggactttgccattgaacttgaagttccaggctggtggtctccaccgcccccgcccccattttcctaaaagttttatgggaagagggaggaaggtgaggggaagagaggacttctctggccttgggaaagagggaggaagccaatcaggggaggaagggccacagcaaccaggaggtccagggagattcggaggtttgcggggaggcgaggaggctgctgggaggagacactccagctttcgcccctacttgcagctatgaggtggggagccaccaaccgcaggccttcttactgagccccgccccagactctacagggagaggggcacccagtgctgtgctcccgtccttcctctcctagcctaaggcgtgcaaacagagcgccactgggaggctgaaacctttaggccgatgcttgcttgcaaggtcaggcaagctggattctggtccccacctttgcagagagaacagcgatgttgtgcgcccatttctcagatcaaggaccggcccatcttactacctccaagagtgcttttctctctaat

SEQ ID NO: 18434 - DNA, 2300 bp, Homo sapien
ggtcatagggcatgactatgactattattattttttaaatttagggatctattaatgcctctactgtacaaggatgaataaatgtgcatgtgtgggtgtttgcctagtggaaactaaaactgtggacatgccctacatatctatcatctaccaagtaaaaattggtgaaaaattcttagtctttaggtaaaagtctggatatttctgcagttcataattagacaagcaagaaactctggtgagaaactggaaagcactgaagagacatctcctcccttttcttccatattgttttcaaatgcgatctagtgaagatttcgtgcttggtgtcttcaattatagcaatgctcattaggagtgatgtacactactgcctgtgggccctttcccacaaagtggctcaagttcaaggtcaggttggtgagaggctatgattgagtctgcccagagtttagggtaagccattccatataattgtcaagaccctcgtgtagaatggaaacattcctgtcttctccagaaaaactgggagttctagaaaaagcagacagaaggatttgatttgggaggggtagtaaaggaagcggaaaacctctaaagacagatttgtgaaacaaaccgtttgattcttctgaattgcactgcacattaggccccaacagaggggcctcaagcaattctgccagtggctggggtttccccttccattcccttttccttgtaaggaagtttaaagcttgcaggaggcagataggggtcttgggctttctgggtactcagcttgtgtgggagtatgccagtatcagggacagtttcctgggccccttgcagaccatagggagaggactgcagggcagggagactggcatctccacacaggcgtctgtattcttggggtccagaactcccgcagctggtttctggcagtcagccaggcttggcttcctcagacttctttagatcccaaaaaagggggaaagtgcctctcttctttctcttttctgactgacacttcaggattttacaagattttgtcccatccgctctgtcagcttctctctttccctctttgtgttgctgtccctgagtctcatctctccctctccccgtccctccctcaagtcctgtgggtctccgtccctccgtatgtctttacttaaagggaaatccagacccttccacaggccactctagaggctccatttccccttcaggtccggaagtggagtgtcctgggttccatccagatcgcatgtcttctacgtctacgttcgtgtctcccgcctcttccctcagcctcacccgaatcagggcctccagagcattctgggcagtagcgagtccctgggtaaggggcgtccagggcacctccctggggcccggagcagctcattccaggacatctgggacaggaagggtaccgggaatgaactggggtgctagtacccaggacccaaagccaggggctgccagaaatacctattaacccccatttcccagcctcctcttacacaggcgcattcccgggttctcctctgaggccgggagcggcctcccagccccacccccgactccccttcccccccaggagatggacactttatagagagagctttttattctctcgttaaacctgtcaaagcgcaggagacagaaagctagggagggagaggaggagaaggaggtggggcccggctcctcgtcccctcttcctccgcccaccacgcctcccctccccccggacgtgtaaatgagactctgcaaactggaaagcagcgaaaggacacctccttccttttctctcttgttgtttttaagtggaatgagagagagaggagtggagagggaaaagaagagagagagggagaagagagagaggagagaaagagcgagagagcgagagagagagacagagacagagagagagagagagagagagagagagagaaagagagagagagagagagagaataagctggggtaaagtattttcgcagtttctgcctttaggattttattagcttctctcccccaggccgcagccaatcagcgcgcgtgcccgggcccctgcgtctcttgcgtcaagacggccgtgctgagcgaatgcaggcgacttgcgagctgggagcgatttaaaacgctttggattcccccggcctgggtggggagagcgagctgggtgccccctagattccccgcccccgcacctcatgagccgaccctcggctccatggagcccggcaattatgccaccttggatggagccaaggatatcgaaggcttgctgggagcgggagggg

SEQ ID NO: 18435 - DNA, 2300 bp, Homo sapien
tgacccccgagttggtgcccttacccactaagccatgctgcccgtgccatccacttcatggacagggcactgtctttttttttttttttcttgagacggaatcttgctcttgtcaccccagactggagtgcaatggcgcgatcccggctcactgcaaaagtttcgactcccggattcaagcgattctcttgcctcagcctctcaagtagctgggattacaggcgcccaccaccatgcttggccaattttttgtatttttacaaccctcatggtcaacatcagccatcgcccataactattctttgcccagtgcacatttgtcttttgtccctagttgtactttgctccttgagggttacaatggtgccctggcctttggggttcttcccatagtgctgggcagagttcatctttcctcctctccctcccatcttgtttctcctttcctcttcctcctctccatcttttgagacaatcttcttctcatactgactgtctcatctgtcccaaagttggcgtttgaggtcaactgccctccctgtcaataccccactggcgcacaaactcaggagtagtgctgcggtcacagtgaaggagaagacaggaaacctgaaaacctggcaggattctggggcagacaccaagccatcttcatctttcagtgtgctcagcacatggctggtattaaattgaattgacttaccactgggcattatgaaattacacaatgaagtatattcattgtgatgagcctgagtcatcaagaaaaggttatgttatatgttgccagggaggtgtataatctatttcaggaaaatttatttcccaattaggcaaattaaatacattttctccacttgaaaaaaattggcttaaagcgatctggaaaatccatttatgtgcaacactgttttctgacaatggcaggtggaggaggtggcctctatattgagtatcctttgcttatctgtctttatataaatgcatccttggttgtttcacatgtgtgttgactccctgaatggtcctgaggcttcccatgacagaggtgacagtttctagtgtcccctccttgcatgaggctttgcatgcaccaaaggcccttatcaaatgctcattgtctggctgaccctgcttcctccttcttgaccccttgggctgggatctagtgagcttttgaaactgcctggatgagccgtgtctcttgtctttttcattctttctgctgttcactcccctgcacctcctccttccacactgccacttccactttggctgtctgtgcacatttgtgtgcatgtgaggtggcaaatgtctgtccccaccactgcctcttggatttgtgacatccatcctctctctgtaatgcccagctcagagctggctgagtacccactcaggtatttcctcatgaactattccacatgaggtaaacatctctgagttcatctgtgatcaggtgaccagctgtctccgtttgcccacgactgaggggtttcctggaattcaggacttgcaattctaaaactgggacagtccagtttgcctggcacagttggtaaccttatctgtggacatgcccttgggtgccttttccttgtgggcagccctaaaacaagttttctgtgtcattagtgtccctagaatcccctcagatggctgaggtgggacccaggcatcagtgttcttaaaaggctgcccacatgcttctaatgaacaccaaaggctgaggaatcattgctgccaaagtaaaaccatggtgtcagggggttttcttgactcatcccttcccctgctgatagatgttttctgggtcacagtgaaagtgaaagtgtcctgaccatgtcctatgtgactgcatctgcacccaccctggggctctggagacttggagggtgtggtcctgggattcctgggacctcatctggcaccgacacagcccaggtgtcaccctggttcctgggcgttcatcctcgctggctctggagccttgtctccgccaggagtttctggtttccagcatgccatggcctcgggtgaccagaagccagctacactgcctcctggcctgtggttcccttccaggaagctctccaccttcagtgcatacttggaggaccacagctacaacgtggagcagatatggagggatattgaggacgtcatcatcaagaccctcatctcggcccaccccatcatcaggcataactaccacacctgcttccccaaccacacactcaacagcgcctgctttgagatcctgggctttgacattttgttggaccacaaactcaaaccct

SEQ ID NO: 18436 - DNA, 2300 bp, Homo sapien
tggtcttgaactcctgacctcgtgatctgcctgcctcagcctcccagagtgctgggattacaggcatgagccaccacgcccagcagaattggagtttcttaggctcgaggctgcaggacaccccttcttacttcctgtattttgccacactaaataagccctaaaacttccctttctttccatcccttcaagccccaggggccatgggagggcacagagaggaagcagggggcctgcccttccgagctgacccgacagatgtgtgtctttttccccaggatgatatctgcatgcacctgactaattattccattaataagcacagttcaaatttcagtcgagatgcacactctggcagtaagaggtaaggaagaggcttcatttttctttcctttccctaccaacctcagaactgctttctgggattctacccaaaccctgttagtccccatcagtgtttccatcttgggtcacatggtctgagaatatactcctttgcctcgcaacccagaacaaattccttcatctctgccctcttggctgttaatcattaaaagaaggccccatcgtaaaccctgggaggctgggaggaggagagataaacatgagctgtttccccagcagaatatatacacacaccaaaacatacccttattacagttggcccttctgatatttccaaatcaacagatatttattgatcgctagtctgccacgtgagaaggacttgccaggcagtcattgcttggcccatgttcccctggacgttgctccattagagattctcaaatgatgtgtcacagtgccctgacatgtggctagccggcttgaagattcctcagaaggggggaaattgagagcagttcatgagagtatcttcacgagaggcttttccattcctgttattgtctaatcgggtctcatttgagttttaagaaaacgggggactgaagaatgtgaacttgaccaggtgaaggaggaaagggaaaaggagcaagtatttctgaggcttcatgtgtgttggggtctgtgcttggtgctttctgtgcattttttattgctgaatttttcttttcttttcttttttttttttttcttttgagactgagtcttgctctgtcgccaggctggagtgcagtggtgcgatcttggctcactgcaacctctgcctcccgggttaaagcaattctcctgcctcagcctcccaagtagctgagactataggcatgtgccaccacactccgctaagttttgtatttttagtagagacagggtttcagcatattggccaggatggtcatgatctcttcacctcgtgatcttcccacctcagcctcccaaagtgctgggattacaggcgtgagccaccgcgcccggcctattcttgaatttttcacagcaacactatggcaaaggcattactatctgccctctgtaggtggagaactgtgagttaggtgccatctccatcttacagatgaggaaactgagtctcagaggttgcgtgagttgccccaggtcccgcagctgtgactgctagactgggtggagaagcgaggtctgttagaccccagagctcattctctttccgctgcaccaggcttcaaaggacctctgaacaggcaattagtttggcttcagaccatcagagaggcatgtgacagttcatgaccccctcagtggcagcattccaaaaagcacacagaaaatcgctaagttaaggctgcttaaaggggatgtggaaggctggtgggaggcagtctcccccttttccagaagatgtcagccacctgtgctgcctgaagctctgcgacttcctcctctcctccccacctgggctgtgggcatcagctgggcctcttgcattgctgcgttctgagcgtggcactctgggaggtctagtttgtagtcccggctccgacacttgccaactaggcttggacaagttacttcatctctctgagcctgcacttcttggtctggaggatgaacgtgatgagactccctgccctgccctgccacctcacagggtctctgtgaggttcaaatgacttgtgatggcaacacagacagtgtgcgtggttactgtcatttttccttagtctaagggcacagaatggaaaggttctcattttcctcctccaatgagaattggcaccccaacagcaggccctgggccctcggctgtgatggaggggtgtctcggggtagcagaactaaggtgaggttgcaaggcttcaagtgttgttctgcctcttccatttcccctgtcctcttcctctgttcatctccctctcacc

SEQ ID NO: 18437 - DNA, 2300 bp, Homo sapien
ctccaaactgagaaaaaacgctgtgtgtgaagtgcagagcaaacaaccttacggggattttactgttgttttactatttatctatttagtcaggtgggtgccttaggaacaaaacagcagtgaaaacaacagggttggacctggatttttccacacactcttgcctctgacagcttctaggacatggtccaaattttttgacaattaggaccctccatcattctgcttcagtttttcatgcccaggccgagtaagtccctcagtgtttaccttgtggatttgtctgtttagggtttgccaggcacaaatcactgatattctctgctttcctggctgtcactcgggttgaagcttgctttgctctacagtgagggcagctccactgttcaccgtgttcaccctgtgtttgctcctgacatcagccctgaaaggacagtagtgccaggctctggcctataagctcccgttgcaacatctcataaataaccagttgtcagggattttagtggaaactctctgaaagccgtaaatctttgctgctctctcctgtatcctctccctcatttccatcacaatatcactcctgagggaccggagaccaaacaggagctaggcagagcagattggtaggacgctggggaaagacaacagtgggatgggggaggggaccaggctgggacagttggtcttagggaagcatctgctgggtgaccagttaatgatggtcacttggccccttagggcctgtcggggaggggcaccacagcacggggccacctgcggggggaaaagggaagagtgctgactggatggcagagaggtttctgaaagagcagcagatgggccactggttccactttgggccttctgttcactccggggtgactgtaagcaccacgtagtaggcttccagggtcggcttgaggctaagctacacccttgcctctggtgttctgcctgtgcacatcagcaggtgaaggggatctgggttgggaggaacttaggttaccaactcaggcccaaatgaacaatgtttatttatttatttgagacagagtttccctctgttgcccaggctggagtgcagtggcgcgatctcagcttaatgcaacctctgcctcctgtgttcaagcgatcctcccgcctcagcctcccgatagctgggaccacaggtacgcgcaccgcgctcggttaatttttgtatttttagtagagaggaggtttcgccatgttgtccagctggtgttgaacttctgagctcaagcgatccacccacctaggcctcccaaagtgctgggattacaggcgtgagccaccgcgcccgaccatcttcaatgatttgaatccagtcactactacagattctccacctgagaccaaatggttgctctgagaagcccagacccctaaccccttaagtctcactgactcttcagtcggtctaggcggccctctcttactgatcagttcactggaggccatgacccccacactctggaggtgaggtcagggttcaatacgcctgagcggtcatcacaggtttgcaacacccattttcctgttgaagaagctaagcctcacagaggtaacgtggcctgcccaaggtgacacaggcactaatatgcctgagatgctgatttaagtctccaaccagtgttttcccacagtgcctcctgcttcaggtttgccctctcccgaaggcctaaattcaaggtgcccccctccctcaccgcagccccgcgcagctggacctctggagccagacgttctggccgcgcccgcgcacggcgcccgacggcaccggcgcggatgggctgggactgcggcttggctcgctgggcaagggtagggctgcgggagcgagcggcggtccagcccctggcgcccgggtgcgcggtgcgcgcgtcctccgcgtctcccgggacaaccgtgggcgcgcccctcccctagcgcctgggcggttaattggattcgggagggagggggcatggcagctactgcaggggccaatcgaaggcctagaaggccccgtatgcaaatatgagggccgggcggacccaaagttagggcgagcgcgggttggggttggggctgtctggcagccaatgggagcgttactccttcatccttcgaggagggggccggcaggtgtggttgcaagctggactagcagcccagcggggcgagacgggggagtaggaattgcgggtaagagcgccccaaagcccggtgctggctccagaccgcagcctcctggtgcctgtcccctgaaaacctggctagacacgtctccttaaacc

SEQ ID NO: 18438 - DNA, 2300 bp, Homo sapien
ggatactgagggcacttgtccctgcagaccgagtttaaaatggaagatattattttggtaactcagaaggtgatttgaactttagacggatgacccacttcctggcttactcatcatttcccaccatccgttcatctcagttgaatgccaccagtcttgtgaggaagcagattaggaatgctcattcccgctgggtgtggtggctcatgcctgtaatcccagcactttggaaggctgaggctggtggatcacaaggtcaggaattcaagaccagcctggccaatatggtgaaaccccgtctttactgaaaatacaaaaattagccgggcgtggtggcgggcgcctgtagtcccagctactcaggaggctgaggcaggagaatcatttgaacccgggaggtggaggttgcagtgagcccagatcatgccactgcactccagcctaggcgacagggcaagactctgtctcgacaaaaaaaaaaaaaaaaaaaggaatgctcattcccctgcctgagatggcacagaaaaatttctttccacatttaaacagtggaagaaggggcacttccaaatttaatctttcatagacagcatatacagcatttaacatcttctggatgttaaagaaaaaaatattctgaaacttgttaaaatggcaaggaagaatttattcaggaccaaaggggagattatgctgcactctgaatacaataatgacaagtgggatttatagccaacaagcagagtgaggggtcactgcatggaaaattactaaaaggagattcttgttaaaccaacttaacaggactcttgttgaaggcaggccagggttattagatattaaggatgggggattttctttaaattgacttagcagaattcttttcttactgagtttattctttttttttttttttttttttttttttgagacagggtctcgctctgtctcccagactggagtgcagtggtgtgatcatggcttatggcagcctccacctcccaggctcaagtgatcctaccacctcagcctcctgagtagctgggactacaggggcccaccgccacacccggctaatttttttattttttgtggagacagggtctccctatcttgtccaggatgatctgaaatttctgggctcaagagatctcccacctcggccacccaaaatgttgggattacaggcgtgagctactgtgcctggccatgagtttattctcttttttctttttgagacggagttcaaggccagcctggccaacatggtgaaaccccgtctctactaaaaatacaaaaaaatgagccgggcatggtggcgggtgcctgtaatcccagctactggggaggctgaggcacgagaatagcttgaactcaggaggcagaggttgcactgagccgagatcgccccgctgcacaccagcctgggcaacagagtgagaccttgtctcaaaaaaaataaagactcttcgtgaagtagtgttaagtggacccaggagaaaaatgaagatgacctcttaatggcccttcaaatgtataaagctttctcattcagggaagaaagacataaagatgtagcccaggcgcgatgactcaggtctgtaatcccaacactttgggaggccgaggcagctggacctcttgagcccaggagttcaagaccagcctaggcaacatggcaaaaccccatctctactaaaaatacaaaaattagcctggcgtggtggcgggcgccgtatgggcaccgtggttgtcccagctactcaggaggctgaagtgggaggatcacctgagcccgggaggtcggggctgcagtaagccgtgttcgcaccatggcactctagcctggacgacagaaaaagaaaaaagaaataaaggtataaaagaaaaaaaagaaaagtaaacagcttcttccaggggatgaagtaggtttatttcggtgagattgctgctcaggacttaggagagccatcaaaggcagaagaccgctcctggggcccggtcacctgaacactacaagtcccagcaagcgccgcgcgggggcggggcttgctgaccgttgtgacgtgtgggcggggcaggcgggacgggctctcccttgggtgcttagccccgcccccgtcccactctgccctgttgctgtcgcgccgctgctggttgctgtccctggtgagtgcctcaagtggaaaggggcagttaggccctcggggtgcccacattcagacttgcagtcctgagaaggggccacgggggtagaggtgtggcaagtttcggttctcaccgcagttcaccctctgggg

SEQ ID NO: 18439 - DNA, 2300 bp, Homo sapien
ctcagcctcccaaagtgttgagattacaggtgtaagccacagtgcccggccttttttctttgctttgctttgcttttttttttttttttttttttttaaacggagtttcactcttcttgcccaggctagagtgcagtggcatgatcttggctcactgagacctccgctcccaggttcaagcaattttcctgcctcagcctcccaagtagctgggattgcaggcatgtgccaccacgcccagctaattttgtatttttagtaaagatggggtttctccatcttggtcaagctggtctcgaattcctaacctcaggtgatccacctgcctcagcttcccaaagtgctgggattacaggtgtgagccaccatgcctggctttttttgcttgtttgttttaatagagacagtctcactatattgcccaggctggacttgaactcctggctcaagcaatcctctcacctcagcctcctgaacagctaggactacaggcatgcactaccctagtttcctatttcgttgttgttgttgttgtcattgttattgttttgaggcaggggcttgctctgttgcccaggctggggtgcagtggcacaatcttggctcgctgcagcctagacctcccaggctcaagccatcttcccatctcagcttcccgagtagctgggactgcaggtgagcaccaccacgcccagctaatttttgtagttttctgtagagatggggttttgccatgttgcccaggttggtcatgaactcctggactcaaaagatccacccgcctctgccttccaaagtgctgggattacaggtgtgagccactgtgcccagccacaactttcctattcttgatcacattttatctgtactataacctagaaaggtgaaacacagtgtattatccccatttatagctagggatccaaacttgtttgctgtcttccaaatgtgggttgcatttttctgtttctttgttgttactcatgctgtttccttcacctagaatgccctcactcaaaaactcacttgtcgaaatcctaatcctctttgagggctaatctaagattcttctcattccttgaagttttctttattttcctaaccagttgcatctctccctgttttgaacccgagagcattttgcacttcttattcgattcatttggcagtcatttgtatactcctctatcctctctattggattgggaccctttttaaggttgtaccaggaaaaaaaaacccacaactacaacagtaataactatataactaactataactaacgtctcttaaaccctttatgcagactctgtgctaagtactttgtcattcaacatgcatcaactttgtgtgaagtgcctacaatggcagacactgatttaagggctggacatcttacattatttcacttatgcctcacaaaaaactaaatggggtagatgttatttttagccccaatttacagataaggaaacaggcacagagccagcagattatataaattgcccaatgccacaaatttaataggtggtgaagctggaatttgaacgccaccattctaatttagaacccatgcttgtcactactgcatgtcaaataattttctctcattcccatccccaggtcctagcagagtatcttatgtatggaaggtcctgataattataggataaatgggattgaatatagaagatgaaatccagagagatggactttcctaaagtcatagggcttgttgggatgaaaaatctagaatttaacagttcccagctcaggctattttatctaggctgccttgcttatttaagtcatttagagaaaggggaactaaagtagctataagcctctgttcatgtgagggttgtggtgcctgtggtgaagaagttaaagatattgtcagaaaattctcgtagcataggaagttgtgactgagatggctcgaagtgaaacagaaagcaagttgtgtaatctcagtatttgtcaggattttgcttttcctgacttgctttgcacagaatgttccctggatgaaagcccagaaatcaccaacatttcagacaatgctttctgagccttactctgttccacatttcataacaggacccctaccatggaggagaccatcaaagatccccccacatcagctgtcttgctggatcactgtcatttctctcaggtcatctttaacagtgtggagaagttctacatccctggaggggacgtcacatgtcattataccttcacccagcatttcatccctcgtcgaaaggattggattggcatctttagagtaagtggtt

SEQ ID NO: 18440 - DNA, 2300 bp, Homo sapien
ctcaatataaaatcttcttcaaggccaggcgcagtggctcatgcctgcaatcccagcactttagaaggccaaggcgagcagatcacttgaggtcaggaattcaagaccagcctgaccaacatggtgaaaccccttctctactaaaaatacaaaaattagccgggcatggtggtgcgcgcctgtaatcccagctacttgggaggctgaggcaggagaattgcttgaaccggggaggcaaaggttgcagtgagcagagaccgcaccaccgcactacagtgtgtgaaacagagtgagactccgtctcaaaaaataataataataaaaataaaatattcttcaaaaacatggccgggcgcgctggctcacgcctgtaatcccaacactttgggaggctgaggcgggcggatcacgaggtcaggagatcgagaccatcccggctaacacggtgaaaccccgtctctactaaaaatacaaaaaattagccgggcgtggtggcgggcgcctatagtcccagctactccggaggctgaggcaggagaatggcgtgaacccgggaggcggagcttgcagtgagccgagatagcgccgctgcactccagcttggcaacagagcgagactccgtctcaaaaaaaacacatgattttatttcctgttttatttctgcttatttcatcaagtgaaaatatcataacttatttcaccttttactgtcagtggaacatttacttgtttccaatttcgacaaactctgcaaatgcacatctttttaaaagaatctgcatttctgattcttcaaaataaattcctagaagtgatattactggatgaaaagtggatggagagcttaaaggctcttagttactcaagaattactgggtcaaagaggatggcccattcacagcctttgaataaaaataaatattgccaaactgctttcaaggaaggttttctaattcatcctctcaccagcaatataggagagcgtgtggctcacattaataaaaagaactctgctgttttgagcagtactaagcggagcgtttaaacttatatttctttgattaggaaggctgacattcgttcctgcaattcatatttcttccttactgaattgcctgttcctatcctttgctcgtttttctatagggatattatttcattctttcagtgttgtttttacaaaataaacaatttttttgtttgttttttcccccgagacggaatcctgctcagttgcccaggctggagtgcagtggcgcgatctcggctccctgcaacctcggcctcccgggttcaagcgattctcctgcctcagcctcccaagtagctgggattacaggcacgcgccaccaccatgcccggctaatttttgtattcttagtagagacggggtttcaccatgctggtcaggctgatctcgaactcctgacctcaggtgatccgcccgcctcggcctcccaaagtgctgggattacaggcgtgagccactgcacccggcccaacaaatgttttagaaagccatctggatgatagtccatgactgctgaacaccggctgaggtccacaaaactgcgctcaccgcttggggactttccagccggcctttactctccatggaaagcggtctttccacaaacctccacggtgggaattactgcaaaggcatcggctctcccggcctagaatatctcgcgggatctcagctgtccttgggccccccccctcagcgcaactaccaatcccaacatgcaacgcgccccgtggcccaagcgcccgaatgaaggctcggggccaaagtcatgtgtctgactgcgtcacacgtcccgtcatctctcccacgcctttttcttcagcgtacaccttggtcgccatcttgtgcgcgaggttatggaacctctgagtcccgccaactctatggtcgagcgtttcagggatcggccaatcgtaatccagatctcgtaggaaagccccgcctctatccgcatggaggcgggaattgccacgaagctcctgtggagggagaggaagcagctgcggaaagccaataagagtggggaatcgatgacgtcaaccaatggggacgcggggatattacggccaatgagaatggagaaggtccaggacacgtgggtgggggaagctgagcgctgagaccaagggctaaagctgggaggtgagtctgtcaccttgagccgggcgagcgctgtgggccaagcaggggttgcagggtagtaggagtgcaggtgacttggggccgggagccagcaataggcagggttgtgggctgggcagtgtggag

SEQ ID NO: 18441 - DNA, 2300 bp, Homo sapien
ttttatttcctgttttatttctgcttatttcatcaagtgaaaatatcataacttatttcaccttttactgtcagtggaacatttacttgtttccaatttcgacaaactctgcaaatgcacatctttttaaaagaatctgcatttctgattcttcaaaataaattcctagaagtgatattactggatgaaaagtggatggagagcttaaaggctcttagttactcaagaattactgggtcaaagaggatggcccattcacagcctttgaataaaaataaatattgccaaactgctttcaaggaaggttttctaattcatcctctcaccagcaatataggagagcgtgtggctcacattaataaaaagaactctgctgttttgagcagtactaagcggagcgtttaaacttatatttctttgattaggaaggctgacattcgttcctgcaattcatatttcttccttactgaattgcctgttcctatcctttgctcgtttttctatagggatattatttcattctttcagtgttgtttttacaaaataaacaatttttttgtttgttttttcccccgagacggaatcctgctcagttgcccaggctggagtgcagtggcgcgatctcggctccctgcaacctcggcctcccgggttcaagcgattctcctgcctcagcctcccaagtagctgggattacaggcacgcgccaccaccatgcccggctaatttttgtattcttagtagagacggggtttcaccatgctggtcaggctgatctcgaactcctgacctcaggtgatccgcccgcctcggcctcccaaagtgctgggattacaggcgtgagccactgcacccggcccaacaaatgttttagaaagccatctggatgatagtccatgactgctgaacaccggctgaggtccacaaaactgcgctcaccgcttggggactttccagccggcctttactctccatggaaagcggtctttccacaaacctccacggtgggaattactgcaaaggcatcggctctcccggcctagaatatctcgcgggatctcagctgtccttgggccccccccctcagcgcaactaccaatcccaacatgcaacgcgccccgtggcccaagcgcccgaatgaaggctcggggccaaagtcatgtgtctgactgcgtcacacgtcccgtcatctctcccacgcctttttcttcagcgtacaccttggtcgccatcttgtgcgcgaggttatggaacctctgagtcccgccaactctatggtcgagcgtttcagggatcggccaatcgtaatccagatctcgtaggaaagccccgcctctatccgcatggaggcgggaattgccacgaagctcctgtggagggagaggaagcagctgcggaaagccaataagagtggggaatcgatgacgtcaaccaatggggacgcggggatattacggccaatgagaatggagaaggtccaggacacgtgggtgggggaagctgagcgctgagaccaagggctaaagctgggaggtgagtctgtcaccttgagccgggcgagcgctgtgggccaagcaggggttgcagggtagtaggagtgcaggtgacttggggccgggagccagcaataggcagggttgtgggctgggcagtgtggaggggtatttccccccagtgctgggagaggctatggcaatctagatatggccttatcaatgaatgttaattaccaacggtaatgaacgattgactgcctcggctggggcgggtcggggactgctgtgtaagatgggcaggatcctgcgcgacacctgcccagtatccgcctccagtcttcccgagagaccattccctttcgcaacatttccttcctggggcttgggcacatttccttgacttccgatctccatgactttgctttgaagacccactgctctgtccctctgacctctaatgccctcctcagctggggcacggtgcaaggaagagcgtggtctagggaggacggacgggggtgaaggggacgaccaaaggtcgtcattataagcaaacaaccagggtctcagtgggattattattactattttttccccctctgcagactgaaaaaatgcagaccgccggggcattattcatttctccagctctggtaaggtgccgcgccgcagtgctctgtagtaccaggtgtatggtgtggacgccatcagtgtttaatgaatgaacccaggggagcttggcgtcctgatgatgtaggctctttgaggtggctgtaggatgtgatgaaggtaacccctgtttat

SEQ ID NO: 18442 - DNA, 2300 bp, Homo sapien
ctactggggaggctgaggcaggagaattgtttgaacccaggaggcggagattgcagtgagccacgattgcgccattgcactccagcctgcgtgacaagagcaagattccctctttaaaaacaaaaaacaaaaaacaaaaaaactctaaagccagactcttttttttgagacggagtctcactcttttacccaggatggagtgcagtgactcagtctcggctcactgcaacttctccttcccgggttcaagtgattcttctgtctcagcctcctgagtagttgggactacaggcgcctgccaacacacccggctaatttttgtatttttagtagagacggggtttcaccatattggtcaagctggtctcgaactccttacctcaggtgatccacccacctcggcctcccaaattgttgggattacagacgtgagccaccgtgcccggcccagacttcttttttaaaaaaccaaacttggtggcaaaacatccaaagtgaggctattcatttgacttggtacgaatgttcatacactttgatgcagaaatgtcaataggtttggctacccggcgctgccccactccttgcttggtgtgtcattccaaagtctgaaatacatctggccccactggtttccagttaatattgatcctatatttttgctagggaaaaaagtttttgtttttgttttgagacggagtcttgctctgtcgcccaggctggagtgcagtggcacgatctccgcccactgcaagctccgcctcccgggttcacgccattctcctgcctcagccttccgagtagctgggactacaggcgcccgccaccacgcccggctaattttttgtatttttagtagagacggggtttcacagtgttagccaggatggtcttgatctcctgacctagtgatccgcccgcctcagcctcccaaagtgctgggattacaggcatgagccaccgcgcccggcaaggaaaaacagttttttaggaaggcccctgtcattcttagtccataggaatttttttttttttttttgagacggagtctggctctgtcgcccaggctggagtgcagtggcgtgatctcaactcactgcaaactccgcctcccgggttcaagtgatccacctgcctaagcctcctgagtagctgggactacaggtgcacgccaccacgcccggctaatttttgtatttttaatagaggcggggtttcaccatgttaggctggtctcgaactcctaacctcgtgattcgcccacctcggcctcccaaagtgctgggattacaggcgtgagccaccgagcctggcagattatttttcactttaaacattttaggaaagacccaaagaatcctcagggtttacactcacagtacctcgattcctgtatattccaagatttgtgggaagaaaaagtactaagcttggagtcaggaggcctgatgtttcttcctttcaccaagcttctctagttctgtttcattatccccatggcaacaactagcaacagtgactggcatttagtaggcccttcataaatatatgttgaataaactctaaaagaggtagcttttcattccaagttgagttctctcttggtcctgttgcaggcaagggcaatggtaccctgccctaggtgcacaagtgtgcaggagggatcaatcgcagagcctttccgagagaaggggcccaaagcgagtcaacttctctactgagcttcccatgaggatgctggatccccaatcctaaccatgcagacgtctgagggtcgccgccattaacgggaatgatatggcccttcctcccccactccctcctctcttctcccctttcaacacttgaattgggctctccgctacttccgcacagcgcaggacccacacgagcccagaaccatcacggcctgctagttcccacccctcccgtcctggaggaccgtaggtggacgctcttgcagagcgcctctcgctggttggggcgggggtgggcggagccagcaccgtctgggctgtggaagcggagggggtggggacactctggcccggttctcggtggtgcgggagcgggcgggagcagcggccgctctggtcggcggacgtgctgccgagtagtcccggaagcgaagcagcgatggcggagagtccgactgaggaggcggcaacggcgggcgccggggcggcgggccccggggcgagcagcgttgctggtgttgttggcgttagcggcagcggcggcgggttcgggccgcctttcctgccggatgtgtgggcggcggcggcggcagcgggcggggc

SEQ ID NO: 18443 - DNA, 2300 bp, Homo sapien
ccgctgcccacggggccgcgctgcttagccactgggaccccacgctcagctccgactgggacggcgagcgcaccgcgccgcagtgtctactccggatcaagcggtgagccggggtttttcctcccccagccccgagctccggggctcgaccttccccgccccccaccctctcccactacaactcaccccccacccactgcgctgccctcgcggcggcccacctccacggcccaaatcttgccagctccgggcgtcgggatccaactcccttctccccccaccctcagacccgcaagcaccaacccccgcctcgtgtgcccagatccgaccccgcccctcgacaacctcccgtgagccctccgtctccattccggccaccctcccccacacctcccacctccgggtggaaacccgaccctttagcgcttcagtaacgccccctcccgccttcggcgccgcccctatttccccttccccaccccaaccttgctagatgctgcccgcaggccccacccatcggtcccctctcttctcctctggagccccgttcctaacacagacgaactcagcttcctttgccatgcctctgactcgagccaacctttctttttatcctccgtttttctcagattccctccacacagtcttttcccaggtctagatcgcttccctcgccccaatctttccttgaaccccttttccagtgtcccaaagctgtccactcttacgcctcttccagaaacacaggctacctccccccaattccccagtgccactctggattgtaatatcccactcaggagcttctttcttgtaatttccctccccccaccccccaccctccccgggtcgtctgttttacttctatgaagcaaatatactcatcaaatataggaacaaaggcctaagtcctttctgtgcttatttcttgggtgactgatcttagatcctatcatttagtagatgatgttttccagaagcacatagaatagtacctatcgcataagaaaagggcagtgctctttagctattaatcctgaaacctgtttgacttctccccatgcccccatcacaagcatcttcgtttagttcttattccccatgttccacgtcctttcagatgtctctgtgtctacttttcaaggttgtaataaaaattaatataatgtgtgtaaagtacctggcacagtgcctgacacaggaggtcaactgtggagggattgccacctctaactgaaactcagcactcaactcttttcctcctccagccatttcagtcatccaattctgacatacctttgagtttggccaatgctttcctctgctttgtcgcctatttgccctttttatgtccctacccaccctagcaagtccctaggcttttcgccacctagaatgttctttagccccttgctctcaactgatccattccagttggtgagatatgagtcagaaatcttatctcctatggaagtccacatgtcatcttccagatgggagattcttagcaatttctgaggatccctccccagcctgaagagatctctaccctgagacacccctgggcaagaaggccaccatgatagtcttactctctgctggctggcttgcttcatacaatccccttaccaataaaggtccactgtatagtttatagaattagttttttagtggagttgatgatgcctttccagttactaaaaaatcttcatttagcattcagtcgtagtacctgggaatcatggaggtggggagtgaatgaattgccatgtgggaggaagtgagagtaagtggaaagtggcttttccaggctgacatttgatgccattgggatctctgatttttttcctctctccctcccctccccctgaggaaacaatgcccttttgataataatttgctctctgcctgcctgacaagtactcagctgagatttctcagccaacaagacagtacaaacacttgcggtaccaagcaccactttctcaaaccctggcctcattgaggtgataacaactgtcctgctcaagggattccccctttccccctcttcctcactccttcccccacctcctcttggtgttatacagggatatcatgtccatttataaggagcctcctccaggaatgttcgttgtacctgatactgttgacatgactaaggtatgtaacttgatgggggtttggggggttttgggaaattgggggccataaggttgcaaaagcctaaaagagattattcagctcacctctccgattacacagatgaagaaatcaagaccccaggagagtaagtggct

SEQ ID NO: 18444 - DNA, 2300 bp, Homo sapien
gcctcagcctcccgagtagctgggactacaggcgcccgccaccacgcccggctaattttttgtatttttagtagagacggggtttcactgtgttagccaggatggtctcgatctcctgacctcgtgatccacccgcctcagcctcccaaagtgctgggattacaggtgtctgccaccgcgcctggccgcctggctaatttttgtatttttagtagtgatggggtttcacgttgttggccaggctggttttgaactcctggcctcaagtgatctgcctgcctcagcttcccaaagtgctgggattacaggtgtgagacaccacggctggccagggctgtatatagtcgtgagattatttgaggccaaggagagtagtgtaggtgcctagaaaggctggggaaggaggtggtagtgagatgatggaatataaattgatctagttctccagcctctatgtgcgagtccagtttgagaaaagataaaaggctgtttttgatgtaacttccaaagagtcagcctactatgagatcttgaagacctagaatattcaaagaaaagtaacgaggctgggtgcaatagcttacacctgtaatcctagccctttgggaggctgaggtgggaggatcgcttgaggacaggagttcgagaccagtctgggcagtgtagtgagaccttgtctctacaaaaaataaaattagttgggtgttgaggcatgcactcattgttctaggctgcagtgagctatgattgcaccactgcactccagcctgggatatagagcaagacgtcatctctactttttttttttgttttttgaaatggactcttgctctgttgtctaggctggagcgcagtggtacaatctcggctcactgcaacctccgcctcctgggttcaaatgattcttctgcctcagcctcctgagtagctgggattacaggtacctgccactggcgccctgctagttcttgtatttttagtggagatggggtttcaccatgttggctaggctggtctcgaactctcggcctcccaaaatgctgggattacaggcgtgagccaccgcgcccagccaagacctcatctcctaaaaaaaaaaaaaaggaaagtgataacaaaagattactagccatactcattgcagatttcatgaagagagggtgagcatttgaagcatttcagtttgctattctttgggggttggagaatgcattccaatctacctaaaagtgccctttccctggctgtttgggtgataacattttttgagctttggcagaggttttaaactctgtatgtgggctggatatgtgatctacacactgttttgtaggttttctttttctctgatttcaattagaatcagaaaacttggcagtattgggtttgaattgccacttggcaataatagtcagctgggttgccccctttaaaatagataagcattctctagtttgccacaggtgacactacccccattgcctcttcagctcactcattcacatttcctgatgggcatctgcaggtgtatctttgaccgctgtctggatgttggaatgagtggttcgctgagcagacagcctgactcctgtgtatctcccatgattgtccaagcatcacttattgctccttgaccctgtctttttactgacgtagttgagtgttgtgcagccttttattttagaggcagggtctcgctctgtcacccaggctggagtacagtggtgcacaatcacagctcactgcagccttgaactcctgggctcaagtgatcctcctgcctcagcctcccaaggattataggcgattgccaccatgccctgctaattttttatttttagtaaagataaggtcttgctgtgttgcccaggctggtctctaacccctgggctcaagcagtcttctcaatgtgggcatcccaaaagtgttgcgattatgggtatgagccattgcgcctggcagttgtgcagtcttctaaattttctgtcagtatcctgcccagggcagagctgaaactgtgttgttaggtctgattctgccaagggtcgttaagcaactcttccttacctcagagatgacctgatcagagccatcaagaaactaaaggcacttggcactggcttcggcatcatccctgtgggcggcacttacctcattcagtctgttccagctgagctcaatatggatcacaccgtggtgctgcagctggcagaggtactggtgcaccttcgagtgtgtgtgtgtgcaagggacagtctgtgaggcaagtctggagcagttctcagctcgtgctccccatt

SEQ ID NO: 18445 - DNA, 2300 bp, Homo sapien
tagtagagaaggggtttctccatgttggtcagcctggtcttgaactcccgacctcaggtgatccatccgcctcggcctcccaaattgctgggattacaggcatgagccacgacgcccagctgagttttcttttctttgctttttttttttttttttttgagatggagtttccttctgttgcccaggctggagtgtaatggtgtggtcttggctcactgcaacctcggcctcccgggttgaagtgattctcctgcctcagcctctcaagtagctgggattacaggtgtgagccaacacatctgtctacttttgcattttttttagtagatagagggttttaccatgttggccaggctggtctcgaactcctgacctcaagtgatccacctgggtcagcctcccaaagtgctgggattacaggcgtgagccaccgcgcccgtgctactttcattttcaataaatcccttaattccttccttgctttgtttgtgcgttttgtccagttgtttgtgcaaaaccccaagaacctggaacaccctccaccgttaacatattttggcgagccagccaggaggaaaatgtaagcccaaagtttgggatttattttccccctttttccttttcctttctactccataaaggggaatctctccctctctctgtcttcctttccaacccaggaccgttggtgggcagcgcccaaacatggaagcaactgcaggtttttggccatggccagtgaaactaaggggtttccatgtggagaagcctaactaccacctcctggttcgcttaaggaacctgggtctttttcgtttttttcctttttttttttttttgagatggagtcactctgtcaccgaggttggagtgcattggcaagatctctgctcactgcaacctctacctcccaggttcaaggaattctctgctacagcctcccgagcagctaggattacaggcaccagccaccacgcccggctaattttttgtatttttagtagagacggagtttcaccatcttggccgggttggtcttgaactcctgacctcgtgatccacccgcctcggcctcccaaagtactgggattacaggtgtgagctaccgcgcccggctacagatgactgattttatctcaaacaatgaataacaatcataaatgatatttatttgtgtgccaggcattgcactatataatttactgcttttttttttttttttttttttttgagacggagtctcgctcttgttgcccatgctggagtgcaatggcgcgatcctggttaactgcaacctccgcctcctgggttcaagcgattcttctgcttcagcctcccgagtacctgggattagatgcgcaccaccacgccctgctaatttttttgtatttgtagtagagacggggtttcgtcttgttgaccaggctggtctcgaactcctaacttcaggtgatccgcccgcctcagcctcccgaagtgctgggattacaggcttgagccaccgcgtcaggccatgagtaggtattattctatttcactacagcggatagtgaaacataaagacattaaaataatttgtcttaagttcctggaccatatgtagtggaactgagctttgtagccaggcaatctgtcttcagagttcaacttaacttcaaggcgcttggtagtcagaatcctttgtatgtgattccaacaggttaactcctttagggcagagggctgttttatgctcaatatggaaccttggatggccaacacagcgtgtggcacgtaggaggtggtccaggggcatttgatgacctccaggcagtggagaggcagtcgaggaagaccagggccccaggcgcctacgtgggtggaatgcacaaggttggccttggctgccggggctccatgtcccagcactagccaaggagggcctcagccgcgcttgaatactcgtgctttcctcgccgcgaggctttgcgaatcttggccactagctaaaggcggggtcgccgggccggtaggaactggagacactcagcctcgcggcaggaaatgcggctcgtggcttccggcgcgtgcagatgacgcgcggctcgggcttccgccttggggagccggcggcggagtccgggacgtggagacccggggtcccggcagccgggcggcccgcgggcccagggtggggatgcaccgccgcggggtgggagctggcgccatcgccaagaagaaacttgcagaggtgagcaggaagaaggccgacccacaacctgcccctgacccgtgcgagactgaattgtcccggagcagtg

SEQ ID NO: 18446 - DNA, 2300 bp, Homo sapien
caggaggcagaggtaagtgaccctgctagtccaggtacctctcatcccacacgcacacttaatttcatgctggatctgctcctaggctagggtgttcacctggaaaggaaggtggcctttattaggacctggagctgataggcagagcatgagcttggctgtttatggtcccaagtacccatggcggcggcagaggaggagcctggaaagaacgccttggaggtctgccaaaaatgcaatctgtgccctgccccttctagactgagagcccctgtggacagagccatgtgctaagtacttggagaaaggcaaagggagtatcccaaggagtctccagtctgagggggagacacagcccttagcctcagaaagcctcagtgtgctgggggaacatcgcctccagctctcctcctcctctcagagagctcccaggcagatcagggacagaaagcccctgccttggagtggctcctgtataatagagaggcacagcataactccagggtcttcactctgatagaagagacaggatgacatacttctcttgtacaggacagtaggacatatgaggagaggggctcctaaatctctatagataaagttgtaactaccccaccctcctgtgagcccctgaggtacaaacatgtctctttctcctgctttatcctgcccctgagcaggaagacagcttgaatgtatgttctcagtttatccagctgtccctaggaaaccccgatccttcatattccctcaacattgagcccttgggacacctctctagataatgtgatgggggcattgccacatcaccaaagccataggccactgtccagagctgggattcagatgactgtggacctactctctcccacccagaagtagcctgttgccttgtgggagtgtccccctgccagttagtgccaccctaccccaagtctgtcttcactacaagtacccttttttatttttatttttattttttgagacagagtcttgttttgtcacccaggctggagtgcagtggcacgatcttggctcactacaacctctgcctccaggtctgggttcaagcgattctcctgcctcagcctcccaagtagctgggactacaggcacgtgccaccatgcctggctaatttttgtttgttttttttttttttgtttgtttgtttgttttgagatggagtctcgctccgtcgcccaggctggcaggcagtggcgccatctcggctcactgcaacctccgcctgccgggttcacgccattctcctgcctcagcctcccgagtagctgggactacaggcacctgccaacatgcccggctaattttttgtgtttttagtacagacggggtttcactgtgttagccaggatggtctcgatctcgtgacctcgtgatccacccgcctcggcctcccaaagtgctgggattacaggcgtgagtcactgcgcccggccccctttcttttttcttttctttttttcttttttgagagagtctctctttgttgcccatgctggagtgcagtgaactcgatcttggctcactgtaacttctgcctcccaggttcaagtgattctcttgcctcaacctcccaagtagctgggattacagccgtgcacgaccatgcccagctaatttttgtatttttagtagagactgggtttcaccatgttggccaggctggtctcgaacccctgacctcaggtgatccgcccgtgtcgtcctcccaagcgctgggattacagacgtgattcatcgcgcctggcctacaagtatcccttctaactgagggcaactgtaaaggaagtagggcatagaagaatagtagtgggccctgtgcccagaagggaggaggaggaagaaaaaagggggtacttagggtaccctacccacaggcaggccccagacagcagctggagatagccaaatgttaatcaccaattagcacagttcaggtggaaagggcaactctattatgtgtaaaatggacttaatgtggcaggagctgtgggcttaatttcttgagataagatgcttttaggctaatcagcaggtctatgcctaatataaaggagctggggcatgatttcttcagcaggctcagaaggtccagaaatcaggggaaggagacccctatctgtccttcttctggaagagctggaaaggaagtctggtaagagaagtggagacagggatggatgagatgacccgagagcagatggatcttggcaaccctgagatgctcagcagccctggcatcttagttttctcttcctctatatgagatgtgagaaga

SEQ ID NO: 18447 - DNA, 2300 bp, Homo sapien
atcacaaaaacaaaaatccgacaaacacgtggctgggtagaacaaaacgctcattggggagggtgggctctaaggtggtggaggatatagagaaaccgagttggaagccctcccccgcccctaagtcccagccccatttcttttcagcgcgccgggaaaacggggagggggacaaaggtgctgcgtgctgtctttcaactcccgactttttgaatggcatacaatcgtccggccgcagagcggtgagccaaagtcggagtcagctcagactctgcaaacgaaaaataataacaataaaaaaaattcaaggcattcatatcggtgtagtcaacacgtgttgcggagtcggcccgggccgcaggcgactgagacaatggggtcggggactggggaaggggagtgacccccttcctcacctgccctcccagcacgcgtgcccccgctagaattatcctccctcccacagagtccggagtaacaccccagttttcgccctgttcaaggggattccagaatttctgggggtcgacccctcctttttccccgttccctgggcgagggggttccagggtctccgggccgcgctctcggccacccctggcgccatcccagcctccgccgctagaaactcgttggcctcgctcgccgctccgccgtggagccggggcttgcccgtggaccgcgcgtcccgctctccgccgcgtatccgggactccgaaacgcgcggcgagcagccccctcccccaccgcccagacggggtgcgaccgcccacgtgtcgccccttgcccagtcgggtccttccctcgggctccgggagccggaggatccggaatgagttggtcaaagccgagggaagggacccaggcggatccgcttccccctccccaggaacggcgggaggaggaggggagtggccgccgccccctcccctaagctcccgcccctcgcttccccgtgcgcggagcggaaattaccccctccccccgcgggtctgacctggggacgtgggcggggcttcccgcttagccccccgccctccgtccctctcccgccttcccgccaggatcggaatcctgcaccccaaacaaagttccgagacccgaacctagggcctagagagctgccagcagtgtcccgggtggtgcaggctctggaaactccacctgtctgtccccgactctgggagggaaaaggggaccattcaaatctccacccggtcactccctccctaagacctcccccttcagttcgctccggttagccctagctatcactcctcttccttgtctcccaccgttcctgtctcctggagtcatctccggccagttccgcgtgttcccctcaggaccccgaaacgttatcatttaacagccggaccccgggtgcgaaccaccctttctcccgtggggatctcaaaacattatttcctgcggcttcctcgttctccactgggataccccgttcccagctttccagtcccgcgctcgcagggtcccccggtcctgcatccccggaggcgggggagtttcgtggggctggcgtggggaaggcggagaccccccccatttaaacatctagggaaaaggttcctttctttttaaatcaccagctcgtgcgaccctctcctgaagaccccagagtcttcggcttctctttgtctgtctcggccgtcccccgcctgtcagtcgctagcagttaaccggggaggggtgagcaaccccgccccccaaaacgaatgaaaaataaccgtacattttaccctttaagacatgtgagatctgggctggaccatcctcccccagtttgggctggggtagggggatgggtgggggcggggcgcttccctaggggccaggttcttgcaaagggggaaggggcctgtagagcttcagggacgctgccgcaccgccccagtttaccccgggggtgagttgagttccccaccctcaggcgggagattatcgggtttggccggagggccgaggggccctgtggcgtcgggggtctttccctgcagggtgggtgggggctgtcaccacgtggcttctcctttttttttttttttttttttccgctccattttttttcaagtcgattttatttagaggcggcgccagggcggccgcggagaaacgtgacacaccagccctctcggaggggtttcggaccgaagggaagaagctgcgccgtgtcgtccgtctccctgcgcgccgcgggcacttctcctgggctctccccgaactctcccgcgacctctgcgcgccctcaggccgccttccccgccctgggctcgggacaa

SEQ ID NO: 18448 - DNA, 2300 bp, Homo sapien
aggctagcagaaccctatactttctattggactggaagcccatttctctgatggttccagtggaaagcctttgtgaacaataaatcccaactaagtgttagggaacactgtatttatttacttttcctttgaagtctttgatgccatttagactggaaagttgtgaaaaatggaggtggaggtagtgggcaggtgactatctccttttctttagtgtgttccaagctgtaacttactagagtgctttggccaagagagcatctggtatgattggcatggattggaatgacctgtagactctcactctgtccccagagccatcatgaagctgaatggccaccagttggagaaccatgccctgaaggtctcctacatccccgatgagcagatagcacagggacctgagaatgggcgccgagggggctttggctctcggggtcagccccgccagggctcacctgtggcagcgggggccccagccaagcagcagcaagtggacatcccccttcggctcctggtgcccacccagtatgtgggtgccattattggcaaggagggggccaccatccgcaacatcacaaaacagacccagtccaagtgagtcttggctcttggggaatggaggttgggtgctagggaacagtggttggtacctaaagaggcctcctggaagcatgctggagacatcaacatttaccttttaggaaatgttgcctggagcattcaggggtccctgcttccaataccagcctcctgggaaagggagggcagatagggagggagaatgggtctggggtgctaggccacacactcgtattagcaagagagattctataatttctcatgtgaagtttcataaaaaaagtctccaagcaaacctcattttgatgagtcagcaactcagtgctctgtgatttcatgatcacttagtgtggtaacagggctggccaacctgtccaaaattaggaccttcataattgtgtcccatctcccattctgccactgccaccttctttctttaatatttttttttttttttttttgagacagagttttgctctgttgcccaggctggagtgcagtggtgcgatctcagctcactgcaacctctgcctcccgggttcaagcaattctcctgcctcagcctcccgagtagctgggattacaggcgcgtgccaccatgcccagctaatttttgtatttttagtagagacagggtttcaccatgttgatcaggctggttacgaactcctgacctcgtgatccggccgcctcagcctcccaaagtgctgggattaaaggcgtgagctaccacacccggccttttctctaatctttatatctgatcagtgtactcagtggcaaagaacaggtcatattatgtccttatcatagtaaatcttgttatttactttgagtttggggcactgtgtcttctctttatatttgtttcaagggggacatacggaattcaagcggaaatgcagctttggagctgtgggctggtaattcccacccctgcatttgtgtcataggctgtgttcttgtccccaaccactgcttgcttatttatttatttttattttattttttgaggcagagtctcactgcgtcacccaggctggagtgtagtggtgtgatctcagctcactgcagcctcctcccaggttcaagcaattcttgtgcctcagcctccttagtagctgggattacaggtgtgcaccaccacacccagctaaattttttgtatttttagtagaggcggggtttcaccatgctggccaggctggtctcaaactcctggcctcaagtaacccacccgcctcggcctccaaaagtgctggaattacaggcgtgagctcccgtgcctggccaccaaccacctgtggattgagacactgctggtctgagacagaatccacagtaacagacgggtcatatttctccagtcctttcattgcccttcccaaagttgtacttgattgtccttgtttcaagaagagcaggttctatgcctttgactgaggaggggtagtggggtggggagcctgaagtactggtatcactggggacaactaaccagccttgtccttgtggcccccaggatagacgtgcataggaaggagaacgcaggtgcagctgaaaaagccatcagtgtgcactccacccctgagggctgctcctccgcttgtaagatgatcttggagattatgcataaagaggctaaggacaccaaaacgtaagtctccagcttttcttggatcttcagggtctgctagtccagttgagcctccccaact

SEQ ID NO: 18449 - DNA, 2300 bp, Homo sapien
aacacttattcattgtaagttttcttcttattgttgcagaaaccatagtttctgcctgtagcccctatgtattccttctagggtacatatgctttttgcccaagatatatgctctgggttgaggggttgtagtatagagatctacctgccttgtggtgtccaggaccacacttctaagttcccttaataaatcacccaataccaacaaactggatttgtctacctcctcctttggtttctcatcttcttcagcatttgggggtctctttgtgtatacaaccctttcacagaacagctggtgatacagggggtttgagggagccagcactggctttagagacacaactcctaggtgaaaatcctagccccattactggccacataagcttgaatgagtcatgaaagatctcataggctcagtcttcacatctgagaagtgcctgacagtgttattacaagagctgaatgaaggacgggaatgaatatggaagctctttgtaagcaaggaggtgttatacaaatgtctttttttacccccctacatgcacgtagtcggtacaacacttttctgattggtcttgtcaaagaggatctcttttccagtctggagctagaaaatagttatctacatttgttacattaaaactcccttctgagagactccctttctctgctggctgccaaggagctcagacctgaacttgggactcacctgcatcaaagttgtagatcacgctggcatttccttctactcttttccaagactcactttcccagactccgaaaaaaaaaaaaaaaaaaaaaaaaagcactggccatttttctttttttccctttttttgagatggagtcactctctgtcacctagactggagtgcagtgccatgatcccggctcactgcaacctctgccacctgggttcaagagattctcgtgttctcgtgccttagcctcccaagtagctgggattacaggtgtgtgcaatcaccccgggctaatttttgtatttttagtagagatggggtttcactatgttgcccaggctggtctcaaactcctggcctcaagtgatccacttgcctcagtttcccaaagtgctgggattacacacatgagacaccgcacccggccccattttgcatgcattttgcacgccatatttaaagattcttgccggtcgtggtggctcacacccgtaatcctagcactttgggaggccgagacaggacgattgcttgagcttaggagttcaaggccagcctgggcaacagagtgagacctcctctctacaaattattattattattttttaattagccaggtgcggtcgtgggtgcctgtagtcctagctactcggatggctgaggtgggagaatcatttgagcgctggaggtcgaggctatgagctatgattacactattgcactccaggctgggtgacagtttcaaaaaataaattcttgtatttgtggcagctgggtcattagaatacaatataatcatgcgtgagaggagccatgggaaacactgagcctggcttatgaaaaaggtcctgcaaatctaatttcatctgaagttcaacagactctttcttccaggcacacaggcgttatgtggccgcacgggtccctgcccgttagaaggattcagccacaccccagctttccagttcctggggtcttttgccaggacagtaggtgtggagtgcgtggtgaagtggagggtggaggtgggaccaaggccgaatttagggacccccagcatgagctgcgggtgggtcaaggccgcgaggttggagggcacggggacacagcatagcgaggaaggaacggtagggaccgtggtgatagactaggggtggacgcggggattgtgtttttctttaagcgggagagagaagcccgatcaccggcagcggaggagaaaagtccagggtagagatgggggcgctggtgtgggggcggtcaggagagaagggcgggggccgtcccaagcgtcctgcacctgccctactcgccgagaatttgcccgggtcggtgccagggcggggcagtcggcggcctggctgctaggctccgtgacatccggcagtctgagggcggcgggattcgggatgacttcgggcgggtgagtgtccccggggcagagcagagcgagaggtgaaacttcgggagcagggagcgccgcgggtcctttctggcgtctgcagagcgggcaggtgctggggacgcagacgccggagccagggagcgggcggttggagtcttaagtccaaccggttccccgcataggtggctgca

SEQ ID NO: 18450 - DNA, 2300 bp, Homo sapien
taaatcacccaataccaacaaactggatttgtctacctcctcctttggtttctcatcttcttcagcatttgggggtctctttgtgtatacaaccctttcacagaacagctggtgatacagggggtttgagggagccagcactggctttagagacacaactcctaggtgaaaatcctagccccattactggccacataagcttgaatgagtcatgaaagatctcataggctcagtcttcacatctgagaagtgcctgacagtgttattacaagagctgaatgaaggacgggaatgaatatggaagctctttgtaagcaaggaggtgttatacaaatgtctttttttacccccctacatgcacgtagtcggtacaacacttttctgattggtcttgtcaaagaggatctcttttccagtctggagctagaaaatagttatctacatttgttacattaaaactcccttctgagagactccctttctctgctggctgccaaggagctcagacctgaacttgggactcacctgcatcaaagttgtagatcacgctggcatttccttctactcttttccaagactcactttcccagactccgaaaaaaaaaaaaaaaaaaaaaaaaagcactggccatttttctttttttccctttttttgagatggagtcactctctgtcacctagactggagtgcagtgccatgatcccggctcactgcaacctctgccacctgggttcaagagattctcgtgttctcgtgccttagcctcccaagtagctgggattacaggtgtgtgcaatcaccccgggctaatttttgtatttttagtagagatggggtttcactatgttgcccaggctggtctcaaactcctggcctcaagtgatccacttgcctcagtttcccaaagtgctgggattacacacatgagacaccgcacccggccccattttgcatgcattttgcacgccatatttaaagattcttgccggtcgtggtggctcacacccgtaatcctagcactttgggaggccgagacaggacgattgcttgagcttaggagttcaaggccagcctgggcaacagagtgagacctcctctctacaaattattattattattttttaattagccaggtgcggtcgtgggtgcctgtagtcctagctactcggatggctgaggtgggagaatcatttgagcgctggaggtcgaggctatgagctatgattacactattgcactccaggctgggtgacagtttcaaaaaataaattcttgtatttgtggcagctgggtcattagaatacaatataatcatgcgtgagaggagccatgggaaacactgagcctggcttatgaaaaaggtcctgcaaatctaatttcatctgaagttcaacagactctttcttccaggcacacaggcgttatgtggccgcacgggtccctgcccgttagaaggattcagccacaccccagctttccagttcctggggtcttttgccaggacagtaggtgtggagtgcgtggtgaagtggagggtggaggtgggaccaaggccgaatttagggacccccagcatgagctgcgggtgggtcaaggccgcgaggttggagggcacggggacacagcatagcgaggaaggaacggtagggaccgtggtgatagactaggggtggacgcggggattgtgtttttctttaagcgggagagagaagcccgatcaccggcagcggaggagaaaagtccagggtagagatgggggcgctggtgtgggggcggtcaggagagaagggcgggggccgtcccaagcgtcctgcacctgccctactcgccgagaatttgcccgggtcggtgccagggcggggcagtcggcggcctggctgctaggctccgtgacatccggcagtctgagggcggcgggattcgggatgacttcgggcgggtgagtgtccccggggcagagcagagcgagaggtgaaacttcgggagcagggagcgccgcgggtcctttctggcgtctgcagagcgggcaggtgctggggacgcagacgccggagccagggagcgggcggttggagtcttaagtccaaccggttccccgcataggtggctgcagaggcgaggtgacggcgcgtgcggaacgaactctgcacccccaggaatggggagcgctggcttttccgtgggaaaattccacgtggaagtggcctctcgcggccgggaatgtgtctcggggacgcccgagtgtgggaatcggctcgggagtgcgggcttcggggctctctgcttggaactcagaggc

SEQ ID NO: 18451 - DNA, 2300 bp, Homo sapien
tgcactccagcctgggtaacagagaacaactgtttcaaaaaataaaaaaagatcccaggcactgtggctcatgcctgtaatcccagcactttgggaggctgagacaggcagatcacctgaggttgagggttcgagactagcctcgccaacatggtgaaaccccatctctactaaaaatacaaaaattaggcaggcgtggtggcgggcacctgtaatcccagctactcagcgggctgaggcaggagaatcacttgaacccagaagacggaggttgcagtgagccgagatcacaccactgcactccagcttaggcgacaagagtgagactccatctcaaaaaaaaaaaaaagagagagagagagacaagggggtctggagcttaccagactccaactctgatctgctgcttccttactgctttctcagtgtggccttagggaagtcactcaacctctttgagtattagtttccccagctgcaaatgggtattaaaaaaacctaccacatgcaattattgtgggtactaagaaaataatgtctataaaatattataatatactacctggcacataatgaacacttaatacacttattattatcactaataatgctattgttattattatcactgcagggttatcaggaaggccttcctggtgcctagccccagtgatactaagagtagatcccagcccagtgcaacctcagcccctctcacctgccacagaagagcacactctccaagtcacttgtcctggactcaggtaagatagtgtttgagcctcctagttcttcatcagctgaaaatcttcagataaagcagatggcctggaaaccaaaatctctgatgcctaagctgatcataggctcaaagttctaagcccatcacccgcttgagccttcaagccctcactacagcagagcagagagacagacattctccccacaaaaacaaacgcgaaaacagaagccaccttttcaccaccttgccttgcgttagcctcacacttttggtgacctcactagcttagagcccgcagcgcttctatttctccacctccaccctgcagccccacttaccccgcttcgcctgctttctcctccttcccttcccacctctgagcatgctctgaggctgtccttcctcctgaggcaagtcctagaccggcccctaacctccttaaccaagatgctttgtgttgcccattggatccccacagtttcaccttacgaagttctcctagctcactcttcatccactcattcaataaaaatgtccttgctcaccaagctgtgccacttagtacttggggcgtggccacctctaatgcctctgttcaagcttctttgctgccatgcctccctctgagccctgaatgtgggttcctgagcacagaacccacatcctggtttttttcttgctgtccccccaggaccacccaagggctatgccatttaacagacattgagctcctgctctggttgacacccatccaatgacaagggacccgctggaggagcaaaagttaagggaccaatatggtcaatgggaggtcctcttattctcctgtctctaggatgacaggcttggtggtgggaggggcagagaggaggcccgccgtccatcctaacttccgtgctccaggacccagtccaactctcagctgggagctctaagaatttgaaatcagaacaggatcctggaggttgtctggtacaactgtcctgttaatgcgtgaaccacagcccatacctcctaggcaggctcagtgctctgtccaccgctgcttcctaaaaccgcaagttgatctgaaatttgaacctggtgcttctcaaatccaagtccttcctgttgtctaatctgagtccctcacattacgcttggtcaatttcatcttgtcctgccttcatctgcacagagcgtgtagggcagatcttcatcacacacaacccttcgcaggcttgctaacacccctctggcaacctctctggtcatgtcttcccggtgtccaaccctgacccctcttgctgccgcatcggctgttttctatttttgctgtgctgctgccccacagtcctctggtatgacggatctccatatcctatccaccctccactcccctgtcccttggtgactcatccctgagcttcccaaggaagcccccaccctctgccctttcctcccgccttccatgagtggaaaatccacctccgccccctatagcaggccagcccccttcctccccagtctccgaccccatcccccagccgaccagtttcctctccaggaccagggagca

SEQ ID NO: 18452 - DNA, 2300 bp, Homo sapien
gaatccaggaatctatgttctcagccccaggacaaccacacaatttaaaacctgttctacaatgccacctccctatctgttgctagaagcctgctcccagcagttatgtgggccatccccctgcctctgcatgagatcccctctctttagcccagcctactctgccttatccccactctccctttcccaaactcagggaaagagcccctttcccttgtccatctcaggttcactgtgctgtttgggaagttcttctgaagcctcacccagagccggcctggaaatagaatgatcgccagcatctgtgtgaggacggaggctttgggtctctggattgacccgtgggaactcagaaggatgaacctgaggtgacacctgagaacaggatggaatcgcactgtctgtcccaggcatctctgaggctctgagagacagaaggggcacagtgggggcttgggtagtatggggtcagggttaagtattggggtctgggatgaagccgaagcctggaatgggaggatttctcagccaaggcccaggacaagcactgtcaggatgggtcccagggccccacttggggcagggctcagggtcccccctccgggggctggggtgtcaggcttccgcccgctctacctacctgcacatagttgtcctcgcagtagtcagcgacccgcagcagggcactgtggttgcccctcagagcctcccggccagtggggatctcaaactcctgcagctgctgtagctccgccatcacccccagcctctgtctggctccccagggagcccgctcgttttgagtctcaccctgcccttgattggttgctctgccttccctccctcttattgcttttggtttcctctgcgtgagacccaaacctgcttgcaaagggcaggcatgctcattccgggacaagaggaagtcagtcctgctccccgagcctgtgtctctctgtcccctgcccagaggaagggggaagccaggggcccatttgggggcccagcccccaatcccacccagcagaggaagccaaggtcggggcagctgtgattgctccctggtcctggagaggaaactggtcggctgggggatggggtcggagactggggaggaagggggctggcctgctatagggggcggaggtggattttccactcatggaaggcgggaggaaagggcagagggtgggggcttccttgggaagctcagggatgagtcaccaagggacaggggagtggagggtggataggatatggagatccgtcataccagaggactgtggggcagcagcacagcaaaaatagaaaacagccgatgcggcagcaagaggggtcagggttggacaccgggaagacatgaccagagaggttgccagaggggtgttagcaagcctgcgaagggttgtgtgtgatgaagatctgccctacacgctctgtgcagatgaaggcaggacaagatgaaattgaccaagcgtaatgtgagggactcagattagacaacaggaaggacttggatttgagaagcaccaggttcaaatttcagatcaacttgcggttttaggaagcagcggtggacagagcactgagcctgcctaggaggtatgggctgtggttcacgcattaacaggacagttgtaccagacaacctccaggatcctgttctgatttcaaattcttagagctcccagctgagagttggactgggtcctggagcacggaagttaggatggacggcgggcctcctctctgcccctcccaccaccaagcctgtcatcctagagacaggagaataagaggacctcccattgaccatattggtcccttaacttttgctcctccagcgggtcccttgtcattggatgggtgtcaaccagagcaggagctcaatgtctgttaaatggcatagcccttgggtggtcctggggggacagcaagaaaaaaaccaggatgtgggttctgtgctcaggaacccacattcagggctcagagggaggcatggcagcaaagaagcttgaacagaggcattagaggtggccacgccccaagtactaagtggcacagcttggtgagcaaggacatttttattgaatgagtggatgaagagtgagctaggagaacttcgtaaggtgaaactgtggggatccaatgggcaacacaaagcatcttggttaaggaggttaggggccggtctaggacttgcctcaggaggaaggacagcctcagagcatgctcagaggtgggaagggaaggaggagaaagcaggcgaagcggggtaagtggggctgcagggtggaggt

SEQ ID NO: 18453 - DNA, 2300 bp, Homo sapien
aaaaaaaaaagaggagggggaggggatggataggctggacacagtggctcacacctgtaatcccaacatcccaacattttggtaggccaaggagtgttgaacacctgaggtcaggagttcaagaccagcctggccaacatggtaaaaccccgtctctactaaaaacacaaaaattagctgggcatgggagcaggtgcccgtaatcccagctacttgggagactgaggcaggagaatcgcttgaacccaagaggcagaggttgcagtgagccgagatcacgccactgcactccagcctgggagacacagcgagactctgtctcaaaaataaataaaataaaataacatggggataacactggaacaatctgttattgtgaagacaaagtgaaggaacacaaatggagcactaacctagagctaaacacagcaggggacttgtttcattcaacatctttttttttttttttttttttttttttgagatggagtgttgctctgtcgcccaggctggagtgcagcatgatcttggctcactgcaacctctgcctcccgggttcaagtgattctcctgcctcagcctcccgagtagctgggattaccagtgcatgccaccatgcctggctattttttttttttttctatttttagtagtgatggggtttcaccatgttggccaggctggtctcaaactcctgacctctaatgatccacccgcctcagcctcccaaagtgctgagattacaggcatgagccactgcacctggcctcactcaacaaacatctataaggcccactgtgcaccagccaggctgcctatgctaggggatgggggtacatcaataagacaaacatggtcctcatgttgcttacaggagaggagggatgacagacaatgagagggacagtatgataccccagccctaccagctgggtgaccccagacaagctcactcttttttgttgttgttttattttgttttgttttgagacagggtctcactctttcgcctaggctagagtgtggtggtgtgatcacagtttactgcagccttcacctcccaggctcaagctatcctcccacctcagcctcccgagtagagctgggactacaggtacatgccacaatgcctagctaatttcttaattttttgtagagatggggtctccctatgttgtccaggctggtctcgaactccggggctcaagcgatcctcccaccttggcctcccaaagtgcattctccccacctacacacccctttgtgacccaatggagtcaggtgtgtccgggtttgaacggctaggcaaataatttctcgagtgttgtgaacattcagccataaacgcagcgacctagctcgaatgcccggttcatagtatgttctcagtaaatactagtttcacgtctttcctctcgaaacactatcttctctccttctcttcactagcaggctttgagggccaaaaggaggagattagggtgggggagaaacacactcttaggaagcaggggagaaagtgcgttttttatttatagggccatctgcaaaaggggcaaactgtctgtcaccacccgctccaccaactttacgggcgggggtgggggtagggagtcattcctcccgccaacccccgcaatcctcagtaacctataatctggggaaaagggtcccgagggctgggtcatcccgtgcctcccactgggtttaggacgcgacagcggaatgggcaggaggtggaggtgcacttctgcaaatctcaagaaccgaagccctggaggcggcggatgagaaagtccacagccctagcaattttgggtgtgtaggcagggatttagcgtatgtccacagccgctctagtgagggtgcccccacccacgttcctcggaagggcagcgctccatccccaccctgctaccctttccccgagagcctaatcccaccttagctggcgctcccggagcctccggggcaggagggaggcgtggcctcgggcggcccgcccctttgatgtgcgccggcaccgctgcgattggacagtcgcttgtgacgttggggactgcggtgggctccgctgctgcagcagccgcagcgccggccgcggctccggctccggctccggctcccgggcatttaaaggggacgcggcggctgcccgggggggatgaggggcaagtggaggggacggctcagacgcacatcatcctcagtccctcgggactggagggactcgtgagccggagcccagaaatccgggggtggataagacaccgcgtcccctccaattcccgtaagcaccc

SEQ ID NO: 18454 - DNA, 2300 bp, Homo sapien
aagaccagcctggccaacatggtgaaatccaatctctactaaaaatacgaaaattagcatacaaaaattagctgggcgttgtggcaggcatctgtaatcccagctacttaggaggctgaggtaggagaattgcttcaacctgggaggcggaggttgcagtgagccgagatcacgccacttcactccagcctgggtgacacagcaagactccatcttggaaaaaaaaaaacaaacaaaccccacaaaaatcccagtgtattagagagcagtaagtgctttggagaaaattaaagcagggaaatggggtagacatgagagaggctttatttatttatttattgttttttttgagacagggtcttactttgtcacccaggctgaagtgcagtggctgaatcttggctcactgcaccctccacctcccaggcttaagccatcctctcctgcctcagctccccaaatatctgggactgcaggcacacgccaccatgcggagcgaattttttatttatttttatctttattttttgagatggaatcttactcagttgcccaggctggagtgcagtggtgcaatcttggctcactgcaacctctgcctcccaggttcaagtgattctcctgcctcagcctcctgagtagctggcaccacaggaattgcaatttgcatgcaggaatactgacatttcagaggtcttccaatagttattgggataaccggtaaacaatctaactccagcttagtggctgtagttgtaggttgttatttctggtttccctctttggagcaagcaacatacaaagtgtgtctccatagcacagcagaaaatgccaaaataaggacttgacctgtccatttggcttgtctttcctcctggtaacagacttgttgctcataagtgacccacggcctgaggacgccctcctcctatgcccttctccccctcaacccaaggatgcctgctttgtcctagagtgcatccttagagcctgctggggctccccgccagcagacccatggccatagctaccatattgaccaaatcaagatggacagacagtgcagcaagcctgaagttatacttagaggatgaagggacatctgggctttcctagaaaatggaaggcatggccgggcgtggtggctcacgcctgtaatcccagcactttgggaggctgaggtggtggatcacttgaggtcaggagttcaagaccagcctgaccaatatggtgaaatcctgtctctactaaaaatacaaaaattagccaggcgtggtggtgcatgcctgtaatcccagccactagggaggctgaggcaggagaattgcatgaacccaggagatggaggttgcagtgagccaagatcacaccactgcactccaacctgggtgacaaagcaagactccatctcaaaaaaaagaaaaaaaaagaaaatggaaggcatggccgggttctgtggctcacacctgtaagcccagcactttgggaggctgaggcgggcagatcacttggggtcaagaccagcctggctaacatggcgagaccccgtctctactaaaaatacaaaaattagccgggcggggtggcgcatgtctgtagtcccagctactcaggaggctgagtcaggagagtcacttgaacccaggaggcagaggttgcagtgagccgagattgtgtcactatactccagcctgagtgacagagggagactctgcctcaaaaaacaaacaaacaaaaaagaaaatggaaggcacaaagtagtcaaatacctctcaagacacccatacatcctggagggccagaggagtcattcatgtattcatttgcacattcttccaacaaatatatttggaaaacctactgtgtgccaggaccaggctagcgactaaaaaataacgataagaggaagcttcggccctgggagcacttatagctggcagcaagtagaccagtgcacagacaagggcgtggtgcttctggtgaactcaggagggacacccatcccagtccaaagggaggaccagggagggagtgtctgtgatgtcacaggagggttccatgagcaataacttataagctgagacctgcaggatgaacaggagttaggtgaagaggagaacgatgtccaggcaggggccggggaagctcgtgccaaggcactgaggtgagagaagtggtagaaaaggcagagcttggagggtcttttgagcttcatctgtaagggctgtggggaaacactgaaggtttggagtcagggagtgacacaatctcatttgcattttattttattttgattttga

SEQ ID NO: 18455 - DNA, 2300 bp, Homo sapien
agcactttgggaggccaaggtgggaggatcacttgaggccaggagttcgagaccagcctgggcaacatagtaagacctcgtctctttattaaaaaaataaggcaggaggatctcttgagcccaggaggtcgaggctgcggtgagctgtgatcacgtcaccgcactccagcttgggtgacagagtgagaccctgtctcaaaaacaaacacaaaaaacccaagttgtatgctcccgacactcccaacatacaatagtggacaggcaaaggataatagttatattctggtccaacaagggggaaaggtcactggtccaaagcaatttttaaatccagttgagcaaactccattaggtttcaaggcctggaaataatccttcatggcccttgactctatcctctgtgctcttgggtgcaactcctgagtcatctttactttttcatgaaacatagcacatgtttgccactaagtttttttttgttttttgttttttttctgagacagagtttcactcttgtcactcaggctagagtgcagtggcgcaatctcggctcaccgcaacctctgcctcccggttcaggcaattctcctaactcagcctcccaagtagctgggactataggcatctgccaccataccttactaattttttgtattttgggtagagacgacgtttcactatgttggccaggctgctggtctcgaactcctgacctcgtgatccatctatctcggcctcccaacgttctgggattacaggcgtgaactactgtgcctggcctgcagctaagttttatcaacctgctttctgccactaaaattttggggactcaaagactttcttttttttttttttttttttttttttgagacagagtttcactcttgttgcccaggctggagtgcaatggctcaccacaacctccgcctcctgggttcaagcgattctcctgcctcagcctcccaagtagctgggattacaggcatatgccaccatgcccggctaattttttttttttttttttttttgacagaatcttgctctgtcacccaggctggaatgcagtggcacgatctcggctcactgtagcctctgcctcctgggttcaagtgattctcctgcctcagcctcctgagtagctgggactacagacgtgtgccaccacgtccagctaatttttgtatttttagtagagatggggcttcaccatgttggccaggctggtctcaaactcctgacctagtgattcgcccactttggcctcccaaagtgctgggattacaggcgtgagccaccgcgttcagcctaattttgtatttttaatagagacagggtttctctgtgttggccaggctggtctcgaactcccaacctcaggtgatccacctacctcggcctcccaaagtgctgggattacaggcgtgagccactgcgcctggcctagactttcttttattttgtactctgtccctctcagtccaagctcacagtgtttctgctggtataaacttctctagaaccttgtgggctttgcatagattttgtagggattcactccatcagacaaatgctcttccacggatctttctaaaatagtcccttcttgatattcggcttctgctgagaagcctaagggataatacctcgtaagcttcctagagacaccctggtttaagtgagatctatgaagacagccttagtacaggttgaattgtgtcctgcccaccccctcctccaattgctaagtttaagtcctaaccacccacatcccaccttggaatgtaaccttatttggaaatggggtagttgcagaggtaattagttaagatggggtcaacctggagtcaggtgggcccctaatgcaatatgactggtgttcttataaaaaggggagatttggacacagacatgcacacagggagaatgccacatgaaagtgaagatcaaggatgatgcttctacaagcctaggaacactaaagattgccagcaaaccaaaccccagaatctagggaagaggcatgggacagattgtccaactccaacaagaaccaaccctgcagacaccttgatcttgtatttgtagcctttagaattgtgagacagttttttttttttttttttttttttttgagacagagtctcattctgtcacccaggctggagtgcagtggctcaatcttggctcactataacatctgcctcctgggttcaactgattctcgggcctcagcctcccaagtagctcggattataggtatccaccaccacacctggctaatttttttgtatttttagtag

SEQ ID NO: 18456 - DNA, 2300 bp, Homo sapien
aatggcgcgatctcagctcactgcaacctccgcctcccaggttcaagtggttctcatgcctcagcctcctgagtagctagaataataggtgcatgccaccacgcccagctaatttttttgtatttttagtagagacgggtttcaccatgttggccaggctggtctcaaactcctggcctcaagtgatctgcctgccttggcctcccaaactgctgggattacaggcatgagccactgcgcccggcctggagataactaacgcactgtttatgatatgaatccattcatgaaggcagagccctcatgacctaataaactcttattaggccccagtttccaacacttttgcattgggattattaagtttccaacatgtgaactttgggggacacattcaaaccatagcagtgctattttagggaaaagtagctgcatgtgtattgaaaatgtcagccaggtacagtggctcatacctgtaatcccattactttgggaggctgaggtgggaggactgcttgagcccaagagtttgagaccaacctggggaacatagggagaccttgtctctacaaaaatttaaaaattatccaggtgaggcagcacactcctgtagtcccagctactccacaggctgaggtgggaggcttatgtgagcgtggtaggaggaggcggcagtgagccgtgatcatgctactgcgctccagcctgagtgacagagtgagaccatgtctcaaataagaaaaaaaaaaaaagaaaaagaaaatgtttatgtgctattggggtcagccttagtgcaagaacattagttaagtgtgcttttaataatggaaggagttccaattaaggtaggatttggacaacttcagggaagtttggtttatgttgggaaagggaaccctgacctcggatttgctgtcttgggtcttttccatcccaggccttcaccttgccgggttcatttcctctccctgtaccctaaacactttcaattatggacactctcttgtctctgaactcggataaatgctaccttgttaactaatagtaccactgagtatattaatgattaatagctaattagtcataatactgtaatacaatggaggcttcctttaccgcagctgctgtaggtctcaaacacacacatccccttccctattcctggccacaggacaggcgaggctctaaatctgtttttctgagcaccctggcaatctcgaaactgttcagtttttagcggtcccattcatacggcgaatgaccactactgcttgcatgctgccgagctgatttctgccccccgtcactcccactgccctccaaggagaacaaggaggtcagcagtcgttaagtttttattcaaagtctctttttacttccaaatctcacgtcgacccacttttctgctttggcccgtttcttcactttaccttccccatcctaacccgcgcctattttgtggaatcccacagcagcgcctgctacaaccccctgcactcttcactttggcttcctttcggcaaccacgccccccgactcacggagagcgccgcgcatgcgcagctctcgtctttacctgggctcccggcagtgggcggagtgggagaaggcgggggcggcgcggggagccggcggttatctgggcggcggagcgctcacaatgtggcaggagacagaaaaggtgcgcccgggccggcccgagggctgcgcatgcgcgccgccgctcccagcggccgggatgctgagggggcgggcggagggaggtgtcgggatccccgttgggcgggggggccagcgagggaaggggccgcgggcgcgcgcgggcgcgcgcgtcctcgccgccgctcgcctccctccctgccccctccggcacacacatccacacacgcacaccccctcccctgccgcccgccccgcgctgcccgccccgccggccccgctcgccctcgcgcgctgggaagggagtcgcgagacgtcggagcggcggccacgtagcgctgcggcggcagcggcagcggccgaggccgggtctgaggagcggccctgaggacagacgttgggcagggggggaggggctggcccagccggcggttgtgactcgagcgccgcggctgcaggcccccgccgcagggatggaccgccgaggcggcggccggggcggcggaggcggaggcggccggcccgggtgagtaagggccccttcccccacgcactcgccaccgccgcggcggcgcccccggcagcccttcctctccgccgcccgcggggccggcccgggctccgggggccggcgtaaccct

SEQ ID NO: 18457 - DNA, 2300 bp, Homo sapien
caagcatctgtttttggaaggggacaaggacagagtcagctcttggacccctttgcttagaaagtttcaatcttttccctaaccttgtcccagactcaggtcatcttactccctgcaggattttgggtcacgggagtggggtgcttgttggagtctattttgtgttgctgtaacagaataccacagactgggtaatttaaaaagaatagaaatttatttcttacagttctggaggctgggaaatccaatatcaaggcgccctcatctggtgtgggtcttcttgctgcatcatcccctagcagaaggcaggagggcaagagagtacatgagagagcaacagagcaaaggggtccaaacttgattttataacaagcccacttttgagataactaacccactgtttattttttaattaattaattaatttattattattattttttgagacagagcctcactctgtcacccaagctggagtgcaatggcgcgatctcagctcactgcaacctccgcctcccaggttcaagtggttctcatgcctcagcctcctgagtagctagaataataggtgcatgccaccacgcccagctaatttttttgtatttttagtagagacgggtttcaccatgttggccaggctggtctcaaactcctggcctcaagtgatctgcctgccttggcctcccaaactgctgggattacaggcatgagccactgcgcccggcctggagataactaacgcactgtttatgatatgaatccattcatgaaggcagagccctcatgacctaataaactcttattaggccccagtttccaacacttttgcattgggattattaagtttccaacatgtgaactttgggggacacattcaaaccatagcagtgctattttagggaaaagtagctgcatgtgtattgaaaatgtcagccaggtacagtggctcatacctgtaatcccattactttgggaggctgaggtgggaggactgcttgagcccaagagtttgagaccaacctggggaacatagggagaccttgtctctacaaaaatttaaaaattatccaggtgaggcagcacactcctgtagtcccagctactccacaggctgaggtgggaggcttatgtgagcgtggtaggaggaggcggcagtgagccgtgatcatgctactgcgctccagcctgagtgacagagtgagaccatgtctcaaataagaaaaaaaaaaaaagaaaaagaaaatgtttatgtgctattggggtcagccttagtgcaagaacattagttaagtgtgcttttaataatggaaggagttccaattaaggtaggatttggacaacttcagggaagtttggtttatgttgggaaagggaaccctgacctcggatttgctgtcttgggtcttttccatcccaggccttcaccttgccgggttcatttcctctccctgtaccctaaacactttcaattatggacactctcttgtctctgaactcggataaatgctaccttgttaactaatagtaccactgagtatattaatgattaatagctaattagtcataatactgtaatacaatggaggcttcctttaccgcagctgctgtaggtctcaaacacacacatccccttccctattcctggccacaggacaggcgaggctctaaatctgtttttctgagcaccctggcaatctcgaaactgttcagtttttagcggtcccattcatacggcgaatgaccactactgcttgcatgctgccgagctgatttctgccccccgtcactcccactgccctccaaggagaacaaggaggtcagcagtcgttaagtttttattcaaagtctctttttacttccaaatctcacgtcgacccacttttctgctttggcccgtttcttcactttaccttccccatcctaacccgcgcctattttgtggaatcccacagcagcgcctgctacaaccccctgcactcttcactttggcttcctttcggcaaccacgccccccgactcacggagagcgccgcgcatgcgcagctctcgtctttacctgggctcccggcagtgggcggagtgggagaaggcgggggcggcgcggggagccggcggttatctgggcggcggagcgctcacaatgtggcaggagacagaaaaggtgcgcccgggccggcccgagggctgcgcatgcgcgccgccgctcccagcggccgggatgctgagggggcgggcggagggaggtgtcgggatccccgttgggcgggggggccagcgagggaaggggccgcgggcgcgcg

SEQ ID NO: 18458 - DNA, 2300 bp, Homo sapien
attacaggcgtgagccaccgcgcccggcccactttcatcactcttaatccacatagtactgaagtcttagccagagcaaccaggcaagagaaagaaataaaaggcatccaaattggaaaaaaggaagtcaggccagtgcgaatgtagtgagttatctcaatctcacagtaagttacagattgaactccttgttctactctttccccacttctcactactgcacttgagtagtcttaaaaaaaaaaaaaatcaaattgccccctttgaagatgacatgatacctagtatatagaaaaatctaaagatttcaccaaaaatctcttataactgatacattcagtaaagttgcaggataaaaaatcattatacaaaaactagcatttctgtacaccaataaggaattagctgaaagagaaatcaagaaagcaaccctactacctaggaaaaaatttaatcaaggaggaaaaagacctctacaataaaaactacaaaacactgatgaaagaaactgaagaggacacaaacaaatggaaagacatctcgtgttcatggattggtggattggaagaattaatattgttaaaaatgaccatactttttttttttttttttttttttttgagacaaggtctcgctctgtcacccaggctgcagtgcagtggcacagtcacagctcactgcaaccttgacctcccaggctcaagcaatcctcccaccttggctcccgaataggtggaactacaggtacatgccaccacatccaggtactttttatttttatttttgtagagacagggtttcaatttgttgcccaggctagtctcaaactcctaggctaaagcaatcctctgtccttggcctcccgaagtgctgggattacaggcgtgaccaccacgcccagccctcacgttcttattcctatgtgggggctaaaagagttgatcttatagaggtaaaaactagaatgagagctgagcgcggtggctcatgcctgtaatcccaccactttgggaggccgaggcgggtggatcacctaggtcgggagttcgagaccagcctgaccaacatggagaaaccccgtctctacaaaaataaaaaattagccgggtgtggtggtgcatgcctgtaatctcagctattctgggagggtgaggcaggagaatcgcttgaacccgggaggcggaggttgcggtgagccgagatcgcgccactgcactccagcctgggcaacaaaagcgaaactccatctcaaaaacaaacaacaaaacaaaacaaaaacaagaaaataaacacacacgcacacggaggtggggcggcggagtggcggcagggaggaggaggggagaggtaagaaacaaatgataaaacaaatgaagcaaattgttaacaataggtgaatctgagccaaagtttaacgtgcgttcttttgccctattcttgcaacttttccaaataaaacgtttctctaaaatcatgtctaggggacctggattccaagccgagccccttttctcactcggtgcatgaccctgaatgaattccttcctctcggttggtctcagtttttcagcacagatggttctctctgggtctggtaatcaacgtctcacaactctgaggacgtttgcagacagggctttggaaggaagacggcccttcgtttcccccaaagggtctcagcctgccggtgatttcaccacgacttcctccagagttccacctgtcctcttcatcagccatgaacttgcccctactaatttttgccaccagctggacgcccacctcctctttcccggagccctaaggctctccttgcggcagtcttagcctctgtacaggataggcacgtgcatttagccccagaaaactacagcccccaaaaggctttgcggcaacatcctcgcgttgatcaccaaagagaaaacgcttttctccgcgggcccgccgctgcatagccttttgggagttgtagttcatctgctaagagccgcagaaccagggtgaggttctaagccacccttcccagaactcacagcgctcttccacaccaataggaagcgtggatcttggaaagcgggcggggcagaggagctcatgcgcagtatgtgtggttggggaattcatgtggaggtcagagtggaagcaggtgagaatggagggggcggcaaaggctcgtttctgggcatctctgcagtcctcctctgctccatgatgtgcactttgggcgaggagagtgcgtgcgtgagtccgacttgtgagggaggggagaaggggctgagcccgggacgagccaggggttg

SEQ ID NO: 18459 - DNA, 2300 bp, Homo sapien
aatgttatgcagaggtgggttttactctaaggaagttctccaggtgtaatccacataaccctgccagtccttgagatcctttcagtgggtacttgaaggcaaaattatttttgtgatgatactaagtcattatttattctttacactttcattctctcctgactgcccagtagagtttttcagaggctgttatcacttatgatagcaaaacaaattgaatgaagaatccaagatcggcaaaaatgtcaaatgatgtcactcttctcactaaatagttttgtttgggaaactatcattatattttgtaataatatgtaaacacgtaatgggtttcttactgttattctttctttttcttttagatagtcttgctctgttgcccaggctggagtgcagtggcacaatcacagctcactgcaacctcaaccccctcatgctcaagcaatcctcccacctcagcttcccaagtagctgggacaggtgtgccaccatacctggctaatttattttttgtagagacagcgtctttctatgttgcctaggctggtcacaaactcctggagtcaagtgattctcctgcttcggcctcccaaagtgcttacaggattacaggtgtgagccactgtgcccaacccgttattcttaaatgggtaagtgggtaatatttaattttttgttttaatttgaaaaatatataattcatattctaaggctctttgcagtacttaacagctttaaaaaatatgaaggcatcctaagatcaaaaagtttaaatatctgtcatgtttgctgctgctgccaaccacccatgcataccatccaggggccttagaacaggcccaccctgcccagtaccatgctgttttggttactatagctctgtagtataatttgaagccaggtaatgtgattcctccagttttgttctttttgctcaggatagctttgaatattctgggtcttctgtggttccatataaactttaggatttttttttctatttctgtgaagaatgccattgatactttgatagggattacattgaatctgtagattgctttggttagtataggcattttaacaatattgattcttccaatgcatgaacatggaatagctttccatttttttgtgtcctcttcagtttctttcaccaatgttttatagttttcattgtagagatctttcacttctttggttacggtaattcctagctatttaatttttggccaggcgcagtggctcatacctataattccagaactttgagaggcctaggaggggggattgcttggctcaggaattcaagaccagcctgggcaacatggtgaaaccttgtctctacgaaaagtacaaaaattagctgggcatggtggtgtgcaccagtggtcccagctactcaggaggctgaggcgagaggatcagttgaactctggaggttgaggatgcagtgagccaagatcacgccactgcactccagcctgggtgacagagcaagaccctgtctcaaaaataaaaataaaaatacacaaatttctttgcggctagtgtaaaattgctttcttgatttctttttcagattgtttgctattgatatatagaaatgctactgagttttgtaggttgattttgtatcctgcaacttcaccgaatttgtttgttagttctaatagcttttggttttgggtggtcttttgaaataacccagtcagaccaaaactaaaaaaaagaagaagaagaagaaaaagaaagacatgggacaccataaggcaaccaaatattaaaactggggcattccagaaggcaaagagagaggcaaagtcatagaaaacctatttaacaaaataatagctggaacattcccccaagtcttacaaaagatatagacatccagatataagaagctcaaagatcctcaaatagattccacccaaaaggtcttctccaaggcacattacagtcaaaagttaaagacagagaattctacaaacagcaagagcaggccaggcatggtaagtcatacctataatcccagcactgtgggaggccaaggaagggggatcccttgagctcaagagtttaagaccgagatcgatctaagatggcgaccgtcgaaccggaaaccacccctactcctaatcccccgactacagaaaaggagaaaacggaatctaatcaggaggttgctaacccagaacactatattaaacatcccctacagaacagatgggcactctggttttttaaaaatgataaaagcaaaacttggcaagcaaacttgtggctgatctccaagtttg

SEQ ID NO: 18460 - DNA, 2300 bp, Homo sapien
aagagtgatttttggtggttggtatatacaagctgcaatctgcatggggacaggagccagaagtaagggaatacttggggttttggagccagaaagaagtgaggtcttgatcctgactgctcattttgtgatgctgggcaagtcacttacaggggaccaggttgctccctgatccacctggggaggtgaagggggtgctgccttagcccattgcgttatccctgtgaaccagagcttcagagtgagtgtgggataggggtggaggctggggacagggaagaatgcaggtattactatgccctacctatgccttagtttccgcatctgtaaagtgggaaaaataatgacacctatctcatggagttgtgagaattaaatgatggtgcatggagactgcttgacacagtgagttacacctagtatttgctcagaaaacagggaaggctttatggaggagctagaacttgagccagacttgaaggccaaataggaacttgtgagacaaacaaacaggaggaagctcttctgagcagaaaacaaacaaacaaacaaaaaaaaccagcatgcgtgaggcacagggataggacatgaaccttttggggaattgcagtgagattcaggaagctgaagcctaatgtggccaagaggcaggagaggtgcttggagagtaggcagaagctggatcaccaaggaccttttatgtcattctaaagatgcttttatcctgaagccaatagggagccactgaaggttgttgaaaaggggagtgactcaactagatttttatgttggaaacaaatctgttttccaggttggttccaaagagaaacagggactgagggaaaggatcccattccaattcaacctgttggggcagggaggagaaggtgtttcctttttttttttttttttttttttgatggagtctcgctctgtcacttagactggagtgcagtggtgcaatctcggctcactgcaacctccgcctcctgggttcaagtaattctcctgcctcagtcttctgagtagttgggattacaggtgcgtgccaccacacctggctaatttttatctttttagtagagacagagtttcgctgtgctggctgggctggtcttgaactcctggccttgggtgatccgcccacctcggcctcccaaggtgtttccaatgtccccagctgtgaacccagagatgatctctggaggaaggggtttcaggagaatcacagcaagtcaaaggaaaagacccaaatacctattatccatacgagaaaactgaggcccagagaatgtcacacagtagcggcagaggcaggaccagatcccaaatgtcctgacttgcagcccaatgctcactctaaagtaccctgacagccacaatcgttgaatgaatagccaagttgcagatggaagactaatacagaacaggcagtctcccacattgactctttggagggacagtgaagaaagactgctcgggctgggcgcggtggctcatgcctgtaatcccagcactttgggaggccgaggcaggtggatcacaaggtcgggagttcaagaccagcctgaccaacctggtgaaaccctgtctctactagaaatacaaaaattagctgggcatggtggcacgtgcctgtaatcctagctactccagaggctgaggcaggagaatcgcttgaacctgggaggtggaggttgcagtgagctgagatcacaccactgcactccagcctgggcaacagagtgagactctgtctcaaaaaaaaaaaagaaaaaagaaaaaaaagaaagactgctgttgtccagtgtttctggggacctggttgctccctgatccacctggggaggaaggaggagggggtgcggaattagcccattacattatcccatgaaatggagctgcagagtgagtgcaagataggggcagaggctgggggcaggagaggatgcagatgttattaagtcctacctataccctagggctggctgaacctaaactgtcctcagtgccatggaactgaacctgtgacaacacaatagactaaaaataaactgggcatttaccactttaaagccttagagccaagtctccccattcagttgcaatgccccagtgaggcagtagactgacctcacgtgacttttgggaatgaacactgagaccatcaaccctatcaatgagggttataaaaacaacaacgaagtaccacctgacaacttcaaattatttattgattcctgaaaaggaaaatgaaaggaagctggccaaagccacggagtgccagttgaataagttat

SEQ ID NO: 18461 - DNA, 2300 bp, Homo sapien
ataagcagctcaacgctgctgttagtactaatgttgccccttccttcctgccttttatgaattcagctgagaggaaggcaggtctagaaaagcagcgggaggaggagacatcttagaagcagtccctgtctggaaggaatgactcttcagtgatttctgaagaggtgctctttgcctggcctcttatgtccagccatgaaggtggtggctcaccagcattcatgctgaaaaccacaatgatgtctacctgtcctttccaggccagggctgtcccctggactttgtgggttacacaggaaagaaattcacaggacagatatttttttcccccatgaatgaatgaattagcttcagccgatcttggaagtcacctacagactgctagcgtgctctcttcatgagcactgttttttgtttgtttgtttgtttgttttttgagatggagtttttgctctgtggcccaggctggagtgcaatggcgctatttccgctcactgcaacctccgcctcctgggttcaagtgattcttctgtctcagcctcctaagtagctgggactacaggcgtgagccaccacgcgaagctaatttttgtatttttagtagagatgaggtttcactatgttggccaggctggtctcgaactctcgacctcaggtgatccacccgcttcggcctcccaaagtgctgggattacaggcatgtgcctggcccacaagcgctcttgatctcccttttgtttccataactggggagggtagtgagattttttttttttccaggaggaaactgaaatccaaacatggttaagatttgggtgttgggatagactttgcagacacccccatcaactctgtgctccagggtcttgatgtctgggaacgaagaaatggagggaacaggaaaggggtaagcatgggggtgggtggcatgcttttggggttgggaggcatattatttggacttggcaaggtttctagggcaagatgaatttggtcctagcacatggatgggtacacagatatgagtccatttcaccacttttctatttattcccttctacaaaactttcttgaaccctactgtataccaggaattcagagaagaaaccataatccctgcctgcagagctcataagcccatggagacactcacagtctggtgaagtctatattgttgaagatgcatctgtttgtttgttgatgggtgtcagtgtgtgtgtgcactcatgaatgtgtgtgtttgtgtgactgtatacatgtgagggcttatgcagacacgactgtatacatgcatgtgtgaatgtgtacatatgcgcgtttgaatgtccggatcacatatgtgcccgtgtgcatgcctggagaggtgcatgtgtgggacagtcaggtcggcaggagtgcatgagaacggtgtgggcacacgtaagtgcacgatcacacatacaagtgagcttgagagtgtgtattcctgtgcactgtgtgcacacctgtgaccccttcaaacccctcatttgagaatcaaatgatgtcggaatggactccaccttgaatgtcgatggccgaggtaagggcgcctgcgcccctcccctccccctaggcctctgcccagggatctcctgcactgggaaggggaggggtggggatggggtggaggtggggtgatggactgagatgaagggcagggagggcaagcgggcattcttactgatagggggcagttagggagcaaggctccagggagaaggtgaagccagaggcggaggaagatgggtaagagagtgaaccctgtggcgggccgcagccggagaggaacaggaaccgcagtggggacgccctggtccccgggcccacagcatccgggacggacgcgcagtagcgcgggccgggaactgggtaccagggcgggatgggtgagaggctctaagggacaaggcagggagaagcgcagcggggtgcggggaaccgcacgccctccctttgcctctgcttcccaccccgaggcggcagggcgggcgggcgcggttccgggggtgggcgggctgggcggggcggaggcggggccgcagcactggcttcacccagcctctcccgcccgcagccagagcgagccgagccgcggccagctccggcgggcagggggggcgctggagcgcagcgcagcgcagccccatcagtccgcaaagcggaccgagctggaagtcgagcgctgccgcgggaggcgggcgatgggggcaggtgccaccggccgcgccatggacgggccgcgcctgctgctgttgctgcttctgggggtgagtgttagc

SEQ ID NO: 18462 - DNA, 2300 bp, Homo sapien
gaaaggcatgtgccggccgggcgtggtggcttacgcctgtaatcccagcactttgggaggccgaggcaggcagatcacgaggtcaggagatcgagaccatcctgcctaacatggtgaaaccccatctctactaaaaatacaaaatattagccaggcgtggtggcgggcgcctgtagtctcagctactcaggaggctgaggcaggagaatcgcttgaacccaggaggcagaggttgcagtgagtcgagatcgtgccactgcactccagcctgggtggcagagtgacagtccgtctcaaaataaataaataaataaataaaataaaaataataaaaaatataaaggtatgtaaataggatctgaaccaggaggaggcaagcctctgaatacaatctgtgagctctcacgccactctgaatcctggctccacacttgtcctgggtcataattaggtaatgatgacagtacctgcatcataggattgctgtaagtattacacaagtaaataaggtatttatgtactttgggacccctcttttctgtcctccagggtctactttgtggccattggctgtgttccagtttgttgggctctggacagctgaggagatctgtctacagtggtcttgggtggtgtgggggctttgtgcaaatgcccctgccaagaaacctgttctccctgctgcagcctgaggtcctctctcttctcttaaaaactgcatttggagtaggggccagataattagtaaccatgcatttcctgtccttgttttatgttccctatgttgtaaaatcctagatctgcttcttaatagtatgttgcttagggtaaattacttaatttccctaaacctcagtttttctcacctaaaacattgggttgataatgtctattgcccaggattgctgggagaattaagtgaaataatttatgcaaatatgtctggtctacagtaggaatttaataaatgttagttatcaaagaagcatctcatcttaaggagaccccaggcaggaggggagagtttagccaagtagggaggggtgactaacattcaggctaattgctccaaaatcagatccaaaaggattaatttatagggatgacagataaatttccctgaaatttgtatgtgttacacttagtcatttcacatttgacagaatgatttcatctcatttttaagaacgcttgtaatctttttgttttggccatttcaaggcttacaaggaactaaggtggaaggatccttagatgaattgacttttaagaattttcattttttttaattagagaaaagagagaaacagcgaaacagttgaaagtatttgaaaccatacgaatgtttcagtataatcagccctggccattccaacagcttcagcaaagagctcttaagtgaatggggccgtggtcaccgccatgggatgggagagattttcaaacacctggagggccttttgaggtcgatgcaaacccaggggaggcactggcacatacccctcactccctttggataggggaggagttgggaggaaaggagctaattacccaagataatgtagcatagagacttgagagggggcagggcctctgcgtgtggagaaggggctcagatctaaatgtgtggggccaaaggcatagggcacgatttaatctctcagagccacgactccttccatgatctagaaggtagggggcgggagggagcctggcatatgtaggaaagagaacatcccaggccaagcatcctgggttccaacaaagacgccaccactgactcactgggggagcctggtctcgggcctgaaagtctagaaggttctgtttcctcaactgcgaagtgggaataactaaattcaccttgctaggaccttataaggattaaataattcaagagaaactaccagggaagtgcaaggcacttagtaggaactcagcacatgcgattattcccgcctccccacgcggtcccccagggaagaagcgaggcgcttgagccagactgggctggaacagtgcggtaggggcccgtcccccgcggagctgcctccccatccaccatccacccagctcagcccggccgctcacgcacgcccatttgctgccctcgttccatccctattaggcgcattagccagcccggcggctctggttacagacgtctgaatgacaaagtgcctccattaccggcgcggcccgccagccgacccgccgggacgcgctctggtttcagccctctctctctcaccgcggcccaggaagaaactcggaccgcgcacagccatcccagaccgagc

SEQ ID NO: 18463 - DNA, 2300 bp, Homo sapien
ccccagcttcctcagtgcatccatatgccttccttgttcaaggatctgttattccactcaccatactgagttacaattatcgattttcatgtctctgttccacacttgccgatgagatccttgagggcagggagggtgtcccattcatctctatctcaacccctggcctggcgcctggcacggcggacaggctcggccagtgggtgatggataaatgcggaggggaaacttgaacaaagtgagagccagaaatgaccaagaggggagtaagggcaagcctggcaggaggagcagccggagcaaatgtgtgggaagtggaggagcgagaacttccgtttactgcactcctacgactgcccaccagccattgtgcctgcgctttgtttgcacattttgtctcatttggttcttgcaagaacagatcaggaaacggacatcagagaaccaaagtaacctgcccaaggtcacacagccaggtctggaacagaatctgggactgtctggcctgaaaacctgtgctctttctgctgggccacacagctctcctagggacaggaccttctggaaaccagacaaggagtgggcccagctacgcccctgcctagctgagcgccggaaccagctgcccacactcaggccaacagcttctccctcccagccagaccagaggcttagaggccaaacaaagatttgcctgttcctgcctccccggctttgggggggtctttgactagacatgcacgccaccacccaccccaccccccaccaacaccaagaaagagctgttgcatcttggtatggcccagggtgcctggaaatgcagggggctctgtgatgctgtctgggttttgcagaatctgtctccctcatcgcacttggcccaggctgatattaagattcatctgcattccccgcgcacccgcctggcagatggtgggggaggaggctgggtgcgtgccggggttgcagccacgggaccaagctgggccttggagggccacagagcagagtgcccacccaccgtgctccttgggcccagcccaagctgggaccacttcaaatgatggggtgcctcctcaccttcatagcctccaagggatgccaggacttgacctttcatttttctacagactaaagggaccctggaattccaggagggagacctgaagatatggagtgggggtgatggaggatgggcccccatctttgggaatctcagatcagggtcgtgttcttcctccttgccctggaggtttgcagagaccccactgggacaggagccactctcggcctggtgacccctgtggcatagagagggtaagtagtgaataatgaagggacaggctccaggaaggccttgctcccctcactctccagcttctcaggacctgcccccggccccagaatctagcctggcccctaacagccttttcagcccaggggcccagccaaatacttcctgtcacagtggctggaccgagaaggtccagggattatctcagcccctccaagtaaagtagaagagggaaggagcagacatcataacaaaaggagtgcaggctagacacccagaaggacttccctcagcacaggttttggctcttagaatgggttttttaaaaaaaggatctttcttaattccaggactcctgagttgggggcagggcagccgattcttgctgcccgctcccggggaacgggcgccctgcaaaagaggtggaaacggtagggtccgtatcccctggccaccaccctctcccttcctctccaagagctactccgcccccgcgtgccgtcctctcctggctggagagccggcgtcctaggtccccgggctgcgggccggcaggggaggagttaactccggaggtaccggctgggctcactgtacctgccgccgccgccgccgccgccggtgggagggacgaggaagcgggagccgcctgggcgccaggagcgctctagtctggcggggcgcagcgcagcgcggggagcgggcggccggggctccgcgcggctgggggcgtccgccagggggcgcgccgcgacggggcgggtggagcagcctggtttggggaattagcaccaaggacgggcgcgcgcgcaggtccccagcacatctgggcgagagcggcgccgctggagccgaggggggcgccgagcgcagatctggagcagcagagccacggcgcagctggggcccttcgaggcgctcggggcgcacatctgggacctcgagcgggggccgtgccgcgcgcagctggaccaggggaggggggcggcggctgcacagctggacc

SEQ ID NO: 18464 - DNA, 2300 bp, Homo sapien
gtcactttgttgctcaggctggagcacagtggcgtgatcatggctgactgcagtcttgaactcctgagctcaagtgatgtgatcctcctaccctagcctcccaaagtactgggattacagacacaacgtcataataatttttttttaagacaaggtattactctgtcgcccactttggagtgcagtggcacaatcagttcactgtaaccttaaagtcctgggctcaagggatcctcctgcttcagcctcctgagtagctgggactacaggcaggtaccaccacacttggctaatttttttgtagaacggagtcttgctttgttgcccaggctggtttccaactcctgggctcaagcgatcctcccacctcagcctcccaaagtgttgggattacaggcatgagccactgtgcccagcccaagaataatttttaaaaatttttaaaatttgagctaaaggaaagaatcataacaactaatacccaacactaacattattactgtaacaccgagacaactttttttctctaagggccaaggtgatccgagcccttttctttcactcaactcaggaatcacttatggcccattggagctaaaatgtgaagctgacagggaactcaggtgtccaagacaacaaattgtcactgaattagcttccttccttccttcctttatttatttatttatttatttatttatttttattgagatggagtctcgctctgtcgcccaggctggagtgcagtggtgtgatcttggctcattgtaagctcagcctcccgggtccacgccattctcctgcctcagcctcctgagtagctgggactacaggcgcccgccaccacacccggctaattttttgtatttttagtagagacagggtttcaccgtgttagccaggatggtctcgatctcctgacctcgtgacccacccgcctcggcctcccaaagtgctgagattacaggcgtgagccaccgcgccggccccttttatttttatttattttattttattattttttttgagacgtagtcttgctctgccatccaggctggagtgcagtggcgcgatctctggtcatctccgtctcccaggttcaagcaattttcctgcctcagtctccggagtagctgggattacagacgcgtgccaccacgcctggctaattttttttttttttttttttttttttttgagacggagtctctgtcgcctaggctggagtgcagtggcgcgatctcggctcactgcaagctccgcctcccgggttcccgccattcttctgcctcagcctccggagtagctgggactacaggcgcccgccactgcgcccggctaattttttgtatttttagtagagacggggtttcaccgtggtctcgatctcctgacctcgtgatccacccgccttggcctcccaaagtgctgggattacaggcgtgagtcaccgcacccagccacgcccagctaatttttatatttttagtagagatagggtttcgccatgttggccaggctggtctcgaactcctgacttcaggtgatccgcccaccccagcctcccaaagtgctgggattacaggcgtcagccaccatgcgtggtcagcttccttttagttagatcacctatatctcctgccttcccctgaaaggatagtccttgtttttgtttacaagtgctaaattttaaaagttacctaaaagggtctctagcatcatcataaagtccaaaaaatattttactgacagggctggcttttaaaaaatgagttaatacatataagagtcgttggtactccataaactgcttgcagacctaaatcgctgttgtgaaatgcctttaactgttccgttgcccactccgacccttggcttgttacgcctctatttggtcctcgcacctcgcagcgggctcccgcgccctgcgcgcgaccccctccaagttcccgcctctttttactcaggcccctccttcctctcaaatccccgggccctgacttggccccgagacgcatgcgcactaggaaagataggcggagtcttgagggaggaggagcagggaaacccagggaggggaggggaggagaagggagtaatggggaggaggccgcgcggggtggggtctggcggtacgcgctggctgcgtcgacgtgctgacgccatgacgccccggctggtgtgtgtcggtgtgtatgtgtgtgtgtgagtgtgcgcgctccgagtgtgtgtgtatttgtgtatcggcggtcccgcaggtcccggatgttgcggacagtatgaggcaagcgcagggggac

SEQ ID NO: 18465 - DNA, 2300 bp, Homo sapien
gtaagacattgggagtgtatagaaccatagaacttacgtttagtggtggtgggttgggccatgatagggctgctttctgaggctgaggtctctggtgcaggccctgtgcttactcatcttaatcagtgcggtacctagcatagtacctgacacatcacagatgctcagaaattatttgctggatttaatttcaggtccttggtaaatcctgcaagccaatcccaggtaagcaaagaagatggtcttcctcttctgtcgtcactcttcctatagtaagctctctctctgctacaactgtgtccctctcggcttcatcatcccatcatggctgtctccagggactttcccccagctctccctgctgcccatcctgtcatctgtgtcacttcttgtgatgttcataggctggtaatccttaataggagctaaaggctgacctagcctgcttcacttggtcagccatttctgtgttgcatgtgtttatattgtcattagacaacttaattcccattttgatcatcagtttctttatctcaacttcttttccttctccactgttccctacccttgtcctgtcccttcctggacttttcacctttgttctctacctcctccctgtcttatacttaaccctgttgctcaatccttatctaggtgccagcctggcaccctccttttgtcctctctaagccttccttctcagtcattcttttctccctgagtcttttcttggttcctgggagggagggcattggggtcatcaataccttatggatgcctgaattttccactctgttttttccctgtagtcatgctccttggggtgaccctcttgaagaagaagtacccgttggccaagtacctgtgtgtgctgttaattgtggctggagtggcccttttcatgtacaaacccaagaaagttgttgggatagaagaacacacagtcggctatggagagctactcttggtatgagatcctgttggggaaggcacccttttccagcaaacttaaccaaaggatagtctcacctaggcaggtagaaggccagttctgtgtcaagggaggttgtggtgctccttgtccccatatctgctctttgctgcaggcccctgactctattaatgccatagtgggaaacctgaaatatttaactacaactcagctctcattctggagaagagataactctgagggttgtggctgaatcctggtgtgaggtcacagagacctgagagcaaagagggaaggaataatgtctctcactgtggctttccaagaaacctggaagccagagtttaaaataatatgatagtagctggtatgtatgcattaggcactgttccgagtgttttacatgttaattgactaatttttacaacaataatctcatatgtagtattatctccattttacagatgaagaaactaggcacagagaagttaactcgcttgcccatggtcacttggctatttgaagtggtagagtcaggattccaatccaggcagcctaagcacaggatccggtctctggagcactatactccaagctaggaagctaacctgctgggactacctttcccctcccagtatgttgggaagtgagcttcctgctctactctgattacaaaatcactacgtagctcagttagcctgtcagtccagtgcgtgggccggggggcgggggtggggggtagtgagcatggtctctccccaccttccacctgtgaccaaatggcaacgttttgttctgaggactttaaaggcagtggctttccaaggagcctgagagtgagaatcctgtgtcctgggtttggaaagggccctgttggccacttcactgcaggctgcaccctttctttcccagctattatcgctgaccctggatggactgactggtgtttcccaggaccacatgcgggctcattaccaaacaggctccaaccacatgatgctgaacatcaacctttggtcgacattgctgctgggaatgggtgagagccagttctgctgttcttcccatgtatcaccagagggcaggctgccctcatccttttgatccctctagctgttagttgcccagaccaagggcctgaattagttccaagatgcccttttgttcaagcccttgagaaaccttcctggaaaaacctgcaccagcaggatttgtttgctacttgttactggcacaatgaaggagagtcgtgtgtcagttgtcatgggaagacactcagtagtaaaacacagggaggtacctgggaactttccctttcatgagggaaatgagacacacgtagtgctca

SEQ ID NO: 18466 - DNA, 2300 bp, Homo sapien
gtatgagtctgaaaaagctccctaaggagaatggatttcagaaaggaaaagcaggtgaccaagggaagacagtttgacattgtgggtgttctttgcactggttggatctcttgacagttttggggaagctttggttcatctcagggagtacccacaacatagtgtgcagccttaaagggaacaaagaaactatacaaagacactactcttatcctttcgcagcctttataatgctgcacctgtaagagctcttaggcttttggggaaaatgggaataaccatctcaatatttcaatgatgctttggaatttccgaagcattttcacaaaagacacatccccattgtatgggtgaacagttgactaccccaagggcagtcataataagtacaattgtatctgcctcataagacctgacaacaaactcctaaaccaggctatcccaaccaccattcattgggctggtaagaaccagctaccatgttaagtgctttacataaagtgttattgaaatatgacaaccacccagtaagagaaatatggtaagtcccactgtataatcaggaaaggacaaatagatcgaataactttccccaaaagacacagatatgaagtgggagagctaggattggaaacctgatcatttgaatccagtgcccatgtttctaaccacagcgctctcctgcttgttattatattcccattaatttcacgtgaggaaactcgactcaggacaagcgaattgtttgaggtcccagctggtaaagaagtagagctggcaggtctctcttcccagctatttggtgccctggcatcgcgggctgagccagtagagtaagctagtgagcaagagagcaaatgtatggggctttcccatgccactaatatcgaggagacagtgggctggggacaccctatcttctatcccttactcctccctctaaaagacttctggctcccccgcaaagccttattgagtcaggcccggagcgatgggtgtggtgctgcccagtatttccttcctttgcctgaggctgtgccaaaagagcaggctgctagaagaggagcctcgacctagagagcagcccagagtccaccaggtggccggagatttgggccaattaagtagggggttggaggtagtagtaggaagacctgaggtcagtcttgccctggcaattcgtgccagcaagtgaagacccaacacttgcatgaggaagggatccaacgaggagctcattaatgggaaatattcaggagcgcggccgaagggtttgcgccattgttggtgagttgttaagacttggaagaaaactgacttcagtaagcttccatttccacccctcgatgtgaggaaataagatcagggctgacaaacagtgatgactaataataccttaagcttgcacagcatactttacagtttacaaaacactcttatttgatcctcacaacagccaagaggcgacaaggtggctattactaattatccctagtttccagacctggaaaactctggctcagaacttgggtgacacgggtaggttaccccgcctttaagtgaccaagccgagacttactgtgccgctctcccccttggaagcctagtgatgtgcctaggtaatgagcaggtaaagtcgctgacgctgggcagcagctagacggcgctgaagctccagtaaggaatttggcattaggacccagcagaagcctggccgcccgccgcggaaaagactattggatttgctctgccgaccacacctcctcccgccccgcctacctgtccgtcttcgcacagcgcagccaattggtggcctccacatccttatacgtcattattctacgcccaggtggctctaggacaccctgtggtgctctgggtcgcagttgtcctcagagttgcctgattggaaaaatctccagggcgagggatcagtctcgaggctgccggttcccctggccctcagggatggagccaaggtcccagggcgggttttctttcctaggaagtggttgctgggttctgaggagtttcccccttggcagccatgagccggcagttctggtagtgactgctgggccctgctggacagcggtcgcatgcagctcctatgaggcccctgccgccggtcggcgatgtccggctggagctgtcgcctccgccgccgctgctgccggtgccggttgtgagcgggtctccagtcggctcctctgggcgtctcatggcctctagcagctccctggtgcccgaccggctgcgcctgccgctctgcttcctgggtgtctttgtctgctattttt

SEQ ID NO: 18467 - DNA, 2300 bp, Homo sapien
catttcatctttgtcttcaagagaaggagcctcaattcccacatctgggtgttgttatggctgtacacagagttcctgtcctctggacaccatgcttgcatactttacatggacatataaacaacagacccatgaaaaggctgtccagaatgaagagggtggtttgtcctagaggtggggtgagggagtcactggggaagttacccattcttgtatgagtctgaaaaagctccctaaggagaatggatttcagaaaggaaaagcaggtgaccaagggaagacagtttgacattgtgggtgttctttgcactggttggatctcttgacagttttggggaagctttggttcatctcagggagtacccacaacatagtgtgcagccttaaagggaacaaagaaactatacaaagacactactcttatcctttcgcagcctttataatgctgcacctgtaagagctcttaggcttttggggaaaatgggaataaccatctcaatatttcaatgatgctttggaatttccgaagcattttcacaaaagacacatccccattgtatgggtgaacagttgactaccccaagggcagtcataataagtacaattgtatctgcctcataagacctgacaacaaactcctaaaccaggctatcccaaccaccattcattgggctggtaagaaccagctaccatgttaagtgctttacataaagtgttattgaaatatgacaaccacccagtaagagaaatatggtaagtcccactgtataatcaggaaaggacaaatagatcgaataactttccccaaaagacacagatatgaagtgggagagctaggattggaaacctgatcatttgaatccagtgcccatgtttctaaccacagcgctctcctgcttgttattatattcccattaatttcacgtgaggaaactcgactcaggacaagcgaattgtttgaggtcccagctggtaaagaagtagagctggcaggtctctcttcccagctatttggtgccctggcatcgcgggctgagccagtagagtaagctagtgagcaagagagcaaatgtatggggctttcccatgccactaatatcgaggagacagtgggctggggacaccctatcttctatcccttactcctccctctaaaagacttctggctcccccgcaaagccttattgagtcaggcccggagcgatgggtgtggtgctgcccagtatttccttcctttgcctgaggctgtgccaaaagagcaggctgctagaagaggagcctcgacctagagagcagcccagagtccaccaggtggccggagatttgggccaattaagtagggggttggaggtagtagtaggaagacctgaggtcagtcttgccctggcaattcgtgccagcaagtgaagacccaacacttgcatgaggaagggatccaacgaggagctcattaatgggaaatattcaggagcgcggccgaagggtttgcgccattgttggtgagttgttaagacttggaagaaaactgacttcagtaagcttccatttccacccctcgatgtgaggaaataagatcagggctgacaaacagtgatgactaataataccttaagcttgcacagcatactttacagtttacaaaacactcttatttgatcctcacaacagccaagaggcgacaaggtggctattactaattatccctagtttccagacctggaaaactctggctcagaacttgggtgacacgggtaggttaccccgcctttaagtgaccaagccgagacttactgtgccgctctcccccttggaagcctagtgatgtgcctaggtaatgagcaggtaaagtcgctgacgctgggcagcagctagacggcgctgaagctccagtaaggaatttggcattaggacccagcagaagcctggccgcccgccgcggaaaagactattggatttgctctgccgaccacacctcctcccgccccgcctacctgtccgtcttcgcacagcgcagccaattggtggcctccacatccttatacgtcattattctacgcccaggtggctctaggacaccctgtggtgctctgggtcgcagttgtcctcagagttgcctgattggaaaaatctccagggcgagggatcagtctcgaggctgccggttcccctggccctcagggatggagccaaggtcccagggcgggttttctttcctaggaagtggttgctgggttctgaggagtttcccccttggcagccatgagccggcagttctggtagtgactgctgggccctgctgg

SEQ ID NO: 18468 - DNA, 2300 bp, Homo sapien
taatcctgtgttcttaagaaaattttacactcatagagatcaggagctcagctctggagtcaggctacctgggtaatcttgggcatgttactgtatttctccctgaagtctcaatgaagaggaaataatacccatttcacaagtgtggtcttgagcaataaataagataaagtatgcatggtacttaacatgtacctagcatggagaaaggaattcaatgaatattcgttgctaccattactgattttattaatgaagatgtgaggcagggtggttcaatatgatgtgttagagatctgagctaggaatcaaaaggactcacttctttggacttcagtttcactacttgtaacatggtaagaatccatgtttttccttttccagattgtcatgaggatttcttaaaagtacatgaagactttgaactacttgaaattgaggaacaatataaatgcaagatatcttttttcaactgagttaattaatcttataaagactgagtttttaatcagttcatcaatttttgtttattcttctctgtctttgattagattgtcctcttcatggaaaagtagtacagcatttcttcaatcaattaaaaaaacagttcaaatgtcagatcttgaagtaaatccttcaaaactgcaagagtacactctttgcaaagaaaacctttcttcggtatgttccattgcctcaattcattcagtgtatgtaggctaattttaatattcaacccactcttgaatttccactttgggtattatctactttcaatatttaatcccagaatgacttctctttgcctcacagcaggctcccagattacctctttttctctgattagttagtatggcttcagggaatatcttctttttaacattaaactgggcaaaaacagaaatagaaagaaaaatctgtagcaagatcaaaaatagaattcacagctaaatataaatctggagggaattattcaattatttgaatggtccccaatcacagacaatccagggttgattgacttttgctttttccatatgtagaacaaaatggttaacaaataccaagagtaatattttttttcttttgaagcataatactttttaatagtatcttaaatgttattttctttcccaaatccctttatattattatatcatgtgcttttcacaactgcatgcattctctttggggaccttccagtctcattctgacttgtaagtcagagagcattgatcttggaagaccaggatttgttaacggagtcgcggtgcaaacttgggcaagtttttcagttgctttgttcctttcactctgctgagctagacttggagtggacgactctgaagggaaattccctgcttcttttcagagtcccaatttaatttacaggctagcaattgtttttttaaggttggatcaacaccaagtagggacttggaaacgtggagaaagacagatgtaagtgtcacacgaggcaaggtcgccattaaatacacaaatataatgcaaatcacatgcaaatgatatgcaaaccttgcattaatttgtaggatcttagtttggagcttgtaagtagcactgagatcctataaggatttaaaactaatgttttttaggttaaattaaatgtaatactttttgaaggtatcgctttctctgtgattcagggactcaactgtgtaaagtttgacactgctccctactcccgcccccaaaaattatttcactagtgtttgactccaacctacacccagcgccgcgcccactctccagctcagcctgacgtcacgtgacattatatttgcatactacctgggactgggtgtgacgctcccctattctgcgtcttctcattggtggcgctggagaaccagccctcttctgtacaggccaatcagcagcccctgggatgttggaaaaccgaagggggcggtgtgagggtggggtcttggcttggatcgctaggctcatcgaccaatcatcctcaggaaagggaaggctaagctgtggattggctggggtggaaggtctgggtttccgcagtccaatgacagctctaggatgagggggccggtccccgccccgtacagcagataagcagcggcctcgggggttggggggctgtgtgagtctcgcagtggggctgaggcaggcagccgggagagccatggcgggggccgcagcgggcggcagaggcggaggtgcctgggggccggggcgcggaggggccggggggctccggcggggctgctctcccccagcccccgccggctccccccgggctgggctgcagccgc

SEQ ID NO: 18469 - DNA, 2300 bp, Homo sapien
ccaacatggagaaacactgtctctactaaaaatacaaaaagtagccacatgtggtggcgggcgcctgtaatctcagctactcgggaggttgaggcaggagaatcgcctgaacccgggaggcggaggctgcggtgagccgagctcgtgccattgccctccagcctggcaacaagagcaaaaccctgtctcagaaaaaaaaaaaaaaaaagaaaggctggtatggctgggagtggtggctcacaccttaatcccagcactctggaaggccgagacagtagttcagctcagtaggtcgagaccagcctgggcagcatggtgaaactctgtctctacaaaaaatacaaaaattagccaggtgtggtggcacacgcctgcagtcccagctactcgggaggctgaggcaagagaatcccttgagcccacgaggtggagcttgcagtgaactgacatccagccattgcactccagcctgggcaacacagcaagactctgtcttgaaagaaaaaaaaagaagagagagaaaaaaagtaggatggtatgaaataactgagatatgctcttaatgtaagagatccttaccaccagttggggagccagaacattcaaatgtaacctcaggaacatatccgtgagtgcaaaataacagagtaatgtatgaaattaaatgcttaagtggtgaggggctacatgaaattaaatgcttaagtggtgagaagtaatgtgaaccattttcaaataagttcttacgtgcagttcaacctaagtaggttatcaaaggtatttatactaagcactaaaagctaagtattaaatactaaaagctgcctgtgtcaacactggcccaggacatccccaaggagagtgctggctaaaggtctggaactttaaatctttagagttctttacttagcacatcaatcagatatttaccttctgcttctttgttctttagccctgctcctgggggaaatctccatcttaacggggcctcagtttgaaattggggttcgggatcctaacttaatgactgagcgtgcctgggttccacccagtcgcaattggtcaagacttggtcctctcaaggcctttcctccggagaggttaaatcctcaacgcctgctctccactttccagccttttcttaaggctcttctttcagcctagtatctgtgaccaacttctccttcctaggccctctcattattatttaaatgtccattcttttgggggcttcaacttcactaaaaacattccttcctcttcctccgcctcgtaactctctgctcaagcatctggatgccagaggtcatttgagctaaatggggttcaaagcttttctgactctggtactgcattccccactttcaaatcacatttttcaccccagggcccccagtggtctcaaacccaaacacagtgcggttaggaagtgggcactcgccacagagctaaattgggaattatttgacctgcagcttctggagaatggttttgcctcctccccgcgacatcaactaactcacttgctgttagctaagggcaaggacaatgtctcctctaccagacaggaaacttgatggcggacgctatccgttagttcctttttcaattccccattcccaccccttcgagaccacgatgtttcttaaaatacaaagtttcttttacaaaacatccctccgcaactttgagtttatataataaacggaaacgtcctttaaacaatcaggctacgaaggggttaaatctaatctcagcaacctgatggattctggggggtttccttcctcgactctagaaattaaaacgaaattttgcccaaggtaaagatgagaaccgtttacatcaactgtcaggcttctgccccaaacaagaatggctacccacgcccacaaacagagccactcacgtaactaaaaatggttggctccgggttccaccactggagtcactttctgcccaacttcaaaatggcgcccactagcttcaccaaaaggatcgaacttcccagcaccctctctggcccgtaacgtcaggtgacgcgagacccagccggaagtgaaggaaaaagcgcttcagcccgcggcgcctgcgcagaacgctccagacgctgagaggcaggaggcactagggatcgtccgcaggattgggactgatacagaggccgccacggagcccgccggagccaccgttcctgctgctgccgccgctgcccgaatcggaaccgtcgggccgcagccgccggcaatgccgcgaaggaaggtgagaaacgggagaggagggatggcgggtttctaagg

SEQ ID NO: 18470 - DNA, 2300 bp, Homo sapien
aaatgcttaagtggtgagaagtaatgtgaaccattttcaaataagttcttacgtgcagttcaacctaagtaggttatcaaaggtatttatactaagcactaaaagctaagtattaaatactaaaagctgcctgtgtcaacactggcccaggacatccccaaggagagtgctggctaaaggtctggaactttaaatctttagagttctttacttagcacatcaatcagatatttaccttctgcttctttgttctttagccctgctcctgggggaaatctccatcttaacggggcctcagtttgaaattggggttcgggatcctaacttaatgactgagcgtgcctgggttccacccagtcgcaattggtcaagacttggtcctctcaaggcctttcctccggagaggttaaatcctcaacgcctgctctccactttccagccttttcttaaggctcttctttcagcctagtatctgtgaccaacttctccttcctaggccctctcattattatttaaatgtccattcttttgggggcttcaacttcactaaaaacattccttcctcttcctccgcctcgtaactctctgctcaagcatctggatgccagaggtcatttgagctaaatggggttcaaagcttttctgactctggtactgcattccccactttcaaatcacatttttcaccccagggcccccagtggtctcaaacccaaacacagtgcggttaggaagtgggcactcgccacagagctaaattgggaattatttgacctgcagcttctggagaatggttttgcctcctccccgcgacatcaactaactcacttgctgttagctaagggcaaggacaatgtctcctctaccagacaggaaacttgatggcggacgctatccgttagttcctttttcaattccccattcccaccccttcgagaccacgatgtttcttaaaatacaaagtttcttttacaaaacatccctccgcaactttgagtttatataataaacggaaacgtcctttaaacaatcaggctacgaaggggttaaatctaatctcagcaacctgatggattctggggggtttccttcctcgactctagaaattaaaacgaaattttgcccaaggtaaagatgagaaccgtttacatcaactgtcaggcttctgccccaaacaagaatggctacccacgcccacaaacagagccactcacgtaactaaaaatggttggctccgggttccaccactggagtcactttctgcccaacttcaaaatggcgcccactagcttcaccaaaaggatcgaacttcccagcaccctctctggcccgtaacgtcaggtgacgcgagacccagccggaagtgaaggaaaaagcgcttcagcccgcggcgcctgcgcagaacgctccagacgctgagaggcaggaggcactagggatcgtccgcaggattgggactgatacagaggccgccacggagcccgccggagccaccgttcctgctgctgccgccgctgcccgaatcggaaccgtcgggccgcagccgccggcaatgccgcgaaggaaggtgagaaacgggagaggagggatggcgggtttctaaggacagtcgattgagcaccgtgacgcagttggccacgcctcacagtgcttgggtcccaactttccgctcccccgaaccttgttcagctaccctctcttctgtccatacccaacagaaaaatgtgggcccgaccctggcctcggcctatgcttgcaactattcccgccctctgcttgcctggatcggaggcgttcttattaattggtcgctgaaacgtctggaagcatattgattggctggtgacgccgcctgtttgggctcaacggtcacctccccgcgtgcgggggcggtgtctggccccggccccagcgctctcccactggctggagagaacgatccctcctctcctgattggtcgaggttggcagtctgtcctgtgggggcgcggcttaggcggacctcgattgggtggcccgaatccccgcctttccgagcggggacgctgataggtgcagaggcggggttttggaggcctcgttaccttccaggtgaggggcacaacaaagcagaagactgggtggtgggaagccagcgcccactcgcaggggatccctctcaggccagttgcctctttccttatttgctagttcgacagcgcctagaaaatgcagttggtaaaaactaaaaacttctagaattagaaggcacttagaagatcacccaggaatggccccgtcgtttcttcttacagctgaac

SEQ ID NO: 18471 - DNA, 2300 bp, Homo sapien
tctcaaactcctgaccttaagtgatgtacccacctcggcctgccaaagtgctgggattacagacatgagccactgccccccagcctggatgataattcctatggacagtctgtgccaccccatctcatgagcgacccctactggactggagtacctgaccccagttactgggctttgacttagggcctctgctttatgttgcagaacccactcagaacccctgcttgctgggctccattgtcattgtcactcacctcccactcgcttccccatcagcccaaagaactggcttgccttgcccgtcttcacctcctgcagctggagctgaatgctggggccagcgccttcctgaagaagcagagagttagtgttagagttgggaggttgtccagcagacgggaggccagcctgggcaatggcaatctcaggagtgacagctggtggtcagcagagacttgctgtgcactggcactgggcacctcagcatattttacacagtactgcacatctttgtaataatagctaacatttcacctactatgttctgagcacgttgatctagtaactaatttaaacctcaccaaaacaccaggaaaacagtaccctaagtactgttactgtcattttacacatgaaaacaccgagacacaggttaaagaattgttcagctgggcgcagtggctcacacctgtaatcccggcactctgggaggccgagatgggtgggtcgcttgaggtcaggagttcgagaccagcctggccaacatggtgaaaccccgtctctaataaaaatacaaaaattagctgggcatggtggtagacacctgtaatcccagctactcaggaggctgaggcaggagaattgcttgaacctgggaggcagaggctgcagtgagccaagatcctgcccctgcactccagcctaggtgacagagcaagactccatttcaaaaagaaagaattgtccaaggtcacccagctgggaagtgagaggtggaaccagaagttgaactcaggctcaaaggctggtctgaaacactgcagtcataatctcatttaatcttcacaaccaccataactagtagaaactatgatttcccccggcccctgcattttacagatggagaaactgagatgtaaggaggttaagtgacttgtccaaggtcacacgggaagaggctgagccaagattcaaagtctgacttcacagtactggttctgctctatcatgggaagtgtctccaacatagatgaggagagggcagccagtgaactcacggtgggtccccaggaggcaaggcaggactgcttcccctccttatccccactcacctctcttccccaggcacttcccccattgtcccagattttccttgccttagagcctgggcctcccggaaggaagtggcatgtggtctgggggtggaggctattaccctgggcaaagacattttaatcgttgtgctgatggcatcctcaaccaaggactgtggattgacattctcattcttccattagcctctgtgaccttggccaaagccttctccctctctgaccttaacctgaacttctgaactggggcttgctcagttctgctgaaagggagtcgctccctagttgagagagtgacagtgggtaacattcattagactgtcttcacatgtctgtatccccagctcctggcactgagccttgcacacataggagcccagcacacatgggacacagaatgccaaatgaggagtcctttctctgagagtctgggaatagggagggggctggggagtccccttttccaggaaagctaaagatagacaaacagagccctagagtaatgcgagccgcctgccaggagctgggagctgggcttggatcagaggctctttcttccatccccagtttccctaggggtagcgctggagctcctgggaccagcaggaacctggctagggacgacataaaccctcttgtctctcacaacttgtgttgtggcacctttcaggatcaggaatggattgttttctaagccttggactaattcactcacttcccatctgcttccctcccaccccaccaggacgtcagtggctggggcatctatcttgagctggagtcacccagcctggccaagaactggaaaagtctctttggggatttggacccatttctgaaaagctcatgaaaaccactttgccttggtaagaggcagccttcaggtgcaagctggagagaatggccacttatgaattcaataggactgacctttctcccccactgggtttctgtgcctggtgggggggc

SEQ ID NO: 18472 - DNA, 2300 bp, Homo sapien
gtgagtgcaggtttcttaaggacctactgtatgccaagcacacatctgtcacagccctactctcagagagctcatggcaaagtcaacaaccacatggctgactagcagagatgccctcagcccagctgtcccttttgggagaactggagccaagcttcttcttccaggggtgaacaccccgagctaggctgcgcagatcagtgagcagagctggggatgcgtttcacctccactggccccctctgcagccagccttgtgcaggacacaacctgcacaacttcacatagaggcccgtgggaagccatagagatccaagtggcagatgttggcaaaaggagccaattacttcttgctagagacaggaatagagacagaagaattctatggaagaggcgagtattaagctggatctttaagaatgaatgggaattcaccaggcggaaagggaggtccagcagaggcaacagcctgtcctggaacaggggtaggggtggactgggaaggcgcacgtgcctttcccttgctcccaccgctacgctggcacatgtcaaaccaaacgtagcttatctgccaaccagaggtctctgtgcctgaactgtgatatgctacaggatgaatgtcttactcatcttctaccacccactgcctcacccaatgccgataacagtaacagtaataatggtcaagccaggtgcggtggctcatgcctgtaatcccagcactttgggaggccgaggcaggtagatcacctgaggttggcagttgaagaccagcctgaccaacatgatgaaaccctgtctctactaaaatacagaaattaaccaggtgtggtggtgggcgcctgtaatcccaactactcaggggctgaggcaggaggattgcttgaacccaggaggcagaggctgcagtgagctgagatcacgccactgcactccagcctgggcaacagagccagactccgtctcaaaaaaaaaaaaaaaaaaaaaaaaagtcagcaggtggtaaatattgaccatcacgctttatgctaagtgctccagggcattctctcatttcatcctcaaactttggtaacaagtgctattattaatcctgttttacagacaaggattctcgagaagagttaagtaatgtgcctaaagtcacacaactatttggaatccaggcctctgtgaccacagagcccttgttctagaccgatgagtggatagatggatgaatggatctgggtggataggcgagagggaagaactaaatgaaacaccatgaacgccacactagggagcttgaattcactcaagggcagtgggaagacactgaaaggttgtaagcaggagagacaagtcagtttagggacttagaaacatcactttgacaacaggggaaagatcacttagagccaatgacgcttgaaacctgcagccatttttctggcaaatcccaattcccactcgtgaggagcctcatttctttaagcaatgtgttatttctcttaaaggaagacgtgttcttttgcacacacagggactattgatggaggagaatgctggagaggagggggctcaaagacaggaagaggagacagaaaggggatactgctaatttccagggagaggcctctctgtacaggggagcagagcaccaggtagggagaaggcatatggccccctcccttatttctaagatgagaaggtcccttcaggttttccagcctggaagctgcaagctccaggtcccacacactgccccactgtgcacctgccaccagggaaacagccaaaggtgaggcaggtgttgcatcagagtgttaagccctgggatcaaatgttagggggcagcagtggaagaggtctgatccctcctcctgagcagctcctaatatcattggcctgtccagccagggagggaggggagtcacagaaactggcctggggatcagttaagctgaaggaaggaatcaggaacagctggaaggaccagaaaacagggggagtttcccctatctacactcaaggagccaaagagcaaaccaaagcctgcaggaggcatcttcaagctgagaggggctcccagagattccaggacagtgcaggctcaccatgctgccttgcctcgccctgcttctcctgatggagctgtccgtgtgcactgtggcaggtgatggtggagaggaacagacactcagcactgaagcagagacctgggtaattgtggccttggaggtacttttggggagaggctctgacgagggcaggggataatcggcagtgcagaggcagaagatcccctgcatggctgc

SEQ ID NO: 18473 - DNA, 2300 bp, Homo sapien
tttttttttcttaaagacagggtctcgctctgtcacccaggctggagtgcagtggtaccatcatgactcgctgcagcctcaaactcccaggctcaagcaatcctctcaccttagcctcccaagtagctgggactataggcgtgtggccaccatgcccggcttattttattctattttgttttatttcttatagagacggggtctccctgtgttgcccaggctggtcttgaacacctgggctcaagtgatcctcccgcactggcctcatgaagtgcatgggattacaggcataagccactgcacccagtcaagattcttaaacttcttagaatcttgacaagctttgatgtggagagcatgtataaaatggaggttcctgggcccagtgaattagagtggggacgctgtgggaatctgcgttttgaacaagggttcctctaatgctgaggcaggcaggtgatacatggcctatattttgagacacaaaacctcagtgactatatctctgaatgctagaaaggacattgagaagatatctggtctttttctccccaaaaggggttgggttttgtctttagggaagaaggttcatggagctggagaaacctcaggggcttgggtttgatccattataacccactgcacccgtgctgagcacccgctctggaccagcatcacagcaagccctgggggaggaatggggagaggcagggaggggaaggtggcagctctctgcccagagaggggaaaagggcccaggtgacagagtgagaacgttctaagagacctggtcttgctgtgtccctcggcccatcttgggactcatcaagcttagctttggccaccaagattgctttgtttccacactgctaagtctctcttcctgcaaaggatattcgtataggggtaatgctagtggctggggcttttcttgggtctgacacagtctaggggcccaggaagcagggggaatccatgaagatagcgggacagtgcccccatcttgagcaccccacccctgcccccctccacccacgggaagatgggggtcgcatcccaggctgagatccactctctcctttttcccttggaggatacttcaatcctgcctcacggtcatctatttcattttacccactggggaagggcttctcgatattttacttcaagctttcctgctgacaaagaggcatctatctatcttccttttcagacaggggaaggaaagaggtctgacccggatctcatcctgcttctgaagcctattaaaaatgcctccagttaagatgacatatttaaaggaaaaaaaaaatgttgtccctggccgggtgctgtggctcacgcctgtaatcctagcactttgggaggccgagatgggtggattgcctgagctcaggagttcgataccagcctgggcaacacagtgaaacccggtctctactaaaataaaaaaaaaaattagctggacgaggtggcgtgtgcctgtaatcccagttacttgggaggctgaggcaggagaattgcttgaaacagggaggcggaggttgcagtgagccaagattgtgccattgcactccagcctgggtgacagagcaagactccaactcaaaaaaaaaaaaaaaaagtcatccccccacattcagtctagtcacattcctccctggtcagagaagctcccagttcccatcctgcttcctcccccatgtgcttctcgccttctctcctcccgctcccctcccattcccatcccctgtggaatggtggaatgcagggaacctcctgttcctgctgacaccctctcctcgaactctaggctgctggtggggggtgtgcaggaagaccagtttttccagccctgagaccaaggagagacctgcctgcccccaggggctcttccaagcccagtcagaaggcaacctgggcctctgaggaatgcggcagatccagctcttgctgccacaacgccaacagagtgaggtcggaggtggccagagtccagggccagcagggtccaaggacgtcccctcccactcaggccaggaaccaatgccagcagcatctacccccttctggtcccctcccctacttgttcagaggctctgggacctttcagatccacctgacttggccaggccaccccttcttccctttgtggtagtgatggggggtcttcaggttggcatgctctgctcttccatacttccttctccaaccagcaccctctcctcctcctcctcccttcctgtcccgcctgacgtctgcctccaggaggccttctcagattgaggggtcactgtgcc

SEQ ID NO: 18474 - DNA, 2300 bp, Homo sapien
ggacgagaggggagtgggttctccagctgccctgcaaaagccccttcttcccggctccaaggcttcaagatgaagagctccaagccaggtgctagagtctctccttggaaaaactcacctctatctattccactggggagtctagtttgaaatagacttgctcttcctccttgcaggacacctgactgaacttcaaccacccctgcacacccatttgattgattttgtctaaggaggcttgggctccattccccagccagtgttttctcctattcttccaggctgctgcctcctcctcctcctcctcctcatcctcctccttcttttttcgacatagagtctcactcggtcagtcaggctggagtgaagtggcatgatctcaactcactgctgccttaacatccagggctcaagtgatcctcctgcctcagtctcctgagtagctgggactacgggcatacaccaccatgaccagctaatttttgtactttttgtagagatgagtctccctatgttgcccaggctgatctcaaactcctgagctcaaccgatctgcctgcctgggccaaatgctgggattaccggcctgagccaccttgcctgatctctctttcttatcaccatcctcttccatctcccagttctacgagggctaccttcactctgaacgctaacaatgagagcatgtgtgtgtgtacaaacatgaatatgcctgcccagttgcataaagtgggaacaggtgtttgggtatgctggggaatttgtgaagactggcagtttagggacacatctaacataaggcatcttagatgtgtgtggacaggtatttctcatagagcaggaacacaagtatacattttatatgcttggatcttctgtattttctagtaggtacaccagtgatttgacttgtatactcatgaatccatgtaagagacaagtactagatagtgtttttatttagggatagtgctaattcatctttaggtatgtagatgtatacacatcacagcctaaagtgtttgcagatttacaaatgaacctctctttttatagaggaatgctagtgtgaacatcagtgtaggtacctccatgttggtatatgtgagtatacatgttgtatttgaatggagtccctgtgtagttgtgtacacgtgtcaataaatgcttgtatacgtggacacgtgtccatcgaggccatggatactaatgtttagaagcaagtcctgaacacagcctggaaaatgcgccagggagactggcctgcagtatttcctgtgcccgcccaggagccatccaactggactcatctcccactcccagatttcgtccgggttcaagcaacacttcagccccctgcggcgccaggtaaggcggggcaccgcacaggctaaagcccagagggcggatcccttcttcagcctcgggggcctgcaaggagctgcggtgtcgcaaccaaaccagggcccctgccggaagcggaagccagcacgcagggcggtggggtgcagcggcggcggtctcggcgtgccaggcccagggcgccccgcgggggcgtgcgcgccacacgcgtgcggggcaggctgggcgccgggcggcaccctcccagccccggcgtctatttaccaacaaactgccggcgctcagcagcggcgcattccgacgcgctgactaagcggttggcgctggcggtctgcacttgactccccttcaggtccaccgcggctggaccagaatcgacgtgcagatccccgaaatcgggagactgcaaatgcagattccctgcgtctccgcagcccccgggcctctgcccaccacccagctccctgtctcttgggcatccagtctcgccacctctctagcatttctgccattataaccgaggttcctggactgcaccaatcgctctgcaaccccagcacctctcggaggagaccccgaggtagaccggcctggagcatgcgcaccgcccctctcccatttaccacttctctacagcgggctgtcccggggggcggggcccggctgcaagtctccgtgaggtcaccgcgggcggtagccaatccgggacgtctaagagggcggggcccccgtcgggtcccgggaaccgaacccgatggagaggagggggcccccatggatttagggggggaggggaaagtcatggggggcacccccccggaacccctttcccaggcgcgcgttctccgctgaaagaggctcagagagacactttctccgggatcttaagtgtgggggctgctggctggggggcccgtccggcccaacgccggaggctt

SEQ ID NO: 18475 - DNA, 2300 bp, Homo sapien
tcaagtcctggtaggagggctgtagacatcgaggcttattctgggctctgtcctctcccttccctggccttacccgctctcctcagaccaggcctgaccttgactggaagctggcctggcagaatctgggagtaggacccttctatccattgttctgagaaggtagccaaaggctggtaggaaagtcgctcatctctccctgactacctcagccttccagccaaaggagccggccatcgctgtcatctccactctttggctttggggtaggttaggccacagttcccgttgcctggagcaactctgagctcctgagaaagtgctcactggaaggcctcaatgaagcggagaacctggcccgtctttgggatcctgggccttgcagctgagctgacatacaatgtgggtatggcattgcccacaatcccatctgcactggctccagcttagcctccaggtctctggactctctgcctccatctaattgctcaccccctcctcctgcaattgtctttggcagtctcttccaaggaggcacacccattaggtgacttcactggagtcagctcaggaccaagacatcttcctcccttctcctgtggctctgacatgctcacaaaccatcagagccagaagtgaccctaggatttagaagctcaacttctttgatgtatagatgggtaaagcatgtggccaggagcatcgattttagggagcttcctccaacccccccaaaattaactgccttctgtgacagaactgtggctgtctcctgggctgcggagtgtggctggagtgggcgcagttgcagggaggagtagttctagtttttcaaatgaatccctttgactgtcctttagtgtatgctaataggatatgtttgtgtgtgttatgtgtttggggactggggtgggaatatcatgaccttgtcctcaggggaattgctggcagtagggttggtgttgtcagtcttgtctgagatctaaggacaacagagtggagagttcattttctttaaggactttcccccatccagcgaaaaaccacacacacccagatttccttagaatacatttctagcatttctctgctggaactggtgggtttgggcgctctagagtggagggcatgtgatcgagagcttggggtcctccttttacttccactctatgtccactcctgccttgggaaaaggtttggctccaagtgagcggtgccaccaccccgttgagccgtagggagcagcgggcctggagggaggccttggggctccatgatcgcgacccgggcagatctcgtaacttgctggaactggggtagggaaaggcagctgtccgggaaggaacttggagggggtctgctgggagagttggggcgcggagggctatgcgaattcagcaaccgggtcggcctcagagactctgcgtccccgctcgaattgcgcagtccacgcagccagagaggcgcgggtgggctctgggctgccagcccagagctgccagcagtggggtcgaggcaggggaggcaggacaggcgcgggcgggagcggaaacccaacggtttttctgggaattggttgaggcagggtcgaggagggaggatctcagaagcccgcagcgcccgaggccacgggtgagggatgcgggggaggtgacggcagctggtgaccgcggctggccgagggcgggtacactgacgtgtggagggtgagcccgactaggggaagaaggtggggggacgcgggcggacagaagccgctctctctcggctcaggtcggctggacagacccgcagggaatgcggcgaacgctgccctaagcgcccgggcattgcggctgctccatccgccctactcctcccattgcctgggacctctgcagcgtccccgtagagccgcgcaggttagggtggctggcttggaagaacagaaacccctcggcccaaccctcccctgtccctcagcattctagggctgggctgtcccgcggccgagattcctggagagctaggcgggccagagctgaccagatcccccgcggcggcaccgcagcgcgatccaggagtggccccgccgggctacgctgcgcgctcttggaacccgggtcaccttccctgccgccggaaccgctctgtgcgcgctgcccaacgaaggaaggggctgccccacgcagacccggcttctgggggtccctggaaacccaggcggccacggtgtggcgggggagacatggtcacttttcctgcagggtgcgcctgagcagaggggcagcccgttacagtaggcgaggccagggcaaacc

SEQ ID NO: 18476 - DNA, 2300 bp, Homo sapien
gcagctgcagttagcgaaaacagagggcacagtctgcggggcggggcagggggagctccaaagcaggccctgaacgcctcccccgctcccatcctgggagggagccggcccgcccagtgcccttcctgcccccaacgccgcaggctctcttggcgccctcttggcagcagaacagagggcacccggagcgggtggcaactcgccccgccacgggctcggagcggcgggcgctgggcgctggggggacgcggagatagacagacagatagcgctcccctcgcccgcccccgcccccacctttcccacgcggcggcctccgggagtggcccagaccaagcgggcactcacccctgcccctcagtccgcggaccgtgccctctgtttctgccaactgcagctctcaaagccctttggactgccggaagcctgctgcgcgagtctgactttggaaaggggcatacagccccctgtacactgctctgccaggcagggtcttcggaggaaacccctccccgaggcttggccgggcgccgggctcggggagctgcagagctcgaaggaaccacgaggtggcgcgctagcactgcgttcgcccggcgaggcagggcgagtggacgtggggtcgacggagcgagccgggcaggctgggaactgagatttggattctctcccccagagaaaggcgaagggcaaaatggggtgtgggaggcagggatgagctagacgttgggaacagctagcatgacctagggggcccagcttggtgggctagacaggactaaaagctgggggtccccacagaggggagccattcttcagggcttttctggtgcaggaggaattcagtggagcagtacagctcccagctactggagatgaggaaggtactaagcggtctagacacatctgcctacaaccacatgttcacacgcggatggccctccactcatgctgcctgcaccccgcccccgacacactcctgcatgcatgtacctctgtggatactgtggaacacatgaaatcctcacatcacacaccccaaatacactcgtcccatgcacccagtccccaaaagtgtcccaattccccagtgctgtcccatgatacacaaaatctgccctcagacttactgaagcacacagtcacagagccagcctgtgtccacccaacctcgtggggaccccaggtcccttgctaccttcagcaagactgggccatctgtgaaactgcacatacatagctttggagatagttctggtatcaccggacaggctgtacatccccaacaacctctaaatccacacaggtctgcttccccttctccaataggatcctcctagtgctaaattatgtctttcataggctcaagacattcttgcccggtgggcaccttcctaaataaaaagaaaattttttaaattacgtttttgtaattatgtaatacaaggatataatagcaatgactgcattgctattaagataatatattaatatcatatattcaaacattctctttcacctaaaaggtgttttccttttcttctgattttaagagaaaccattttcaggggctgtgagtcctcaccactttgggtacatttgtgtgcctgtcatttgcacagtgcgtgcacacgtgtgcacacacacacaaccataccccaccttagaccatctctttccacaaacacacaatgggcaaactcccctccttgcccacctcacctaagcccatctctcatcccccagccagagaaacagactgacagatcctgggggctccacagagcaacccttcccctccacctccacgcccctccttcagagaacttatctgggctggagctacaagagtagcgagggtgtgtgtgtgtgtgtgtgtgtgtgtgtgtgttttgagtaacaacaaagactggggaaaaagaagagagaggagggaggagagaaggaaaagggagagagagagagagaggagagcataggagcgagagagcaaaagcgtgttttgcctggaaggcaagacttgcagccaatcagcgcgtaggagcctccctcggcgactccactattgagtctataaccggctggccgggcggagctggcagcatttgattgtggcttgggacgcgaggagaggcgcgcagcgaccgcctgacggcaggcaatggtgtaagcgcctctcggcctccccctccccccagacgcggccgggtcctcccttcgccttctggacacacacccctgcctcgtctcttccgcctctctcgcactccggtccgttcctgtcctctgcggaggccagc

SEQ ID NO: 18477 - DNA, 2300 bp, Homo sapien
ataaaatgagcctgcttgtgaaatgatttgtaaactgtaaagctaggccaggaccctttcccaggctctgaatctaattttgtactcataattcttatgagtacaaaataattttattcttaaagagcaccccagattgcacaagcttcaggacccaccaaacttggacacgcccaaagtagtgtataaatgttcattattagcataagtagttaagggctccagggtcagataacacaggatgaaaatcctagttgtgtgacctctgccaaattgcctaacctccctgagcctcatttttctcgttttaaaacagagataacacttcaaagattgttgtgaggatttaacatttgtgaagcatttagcatagttcctgctgcgtatgtgcttaatacatggtgttttgttcttattattttaagaatagatggagaaaagaatgctcggggaggccaggcagggtggctcacgcctgtaatcccagcactttgggaggcggcggggtggatcacgaggtcaggagttcgagaccagcctgaccaacacggcgaaaccccgtctctactaaaaatacaaaaattagccgggcatggtggtgggcgcctgtaatcccagctactcaggaggctgaggcaggagaatcgcttgaaccccggaggcagaggttgcagtgagcggagatcgcgccactgcactccagcctgggagacagagcgagactccgtcgtctcaaaaacaaaacaaaacaaaacaaaaaaacaatgttccggggaaaatgggtctctgagctgcaataagagaaatgtgagttagatccaagaaagtacatagtaacctcttttttttttttgagacgacgtctcactctgtcacccaggctggagtgcagtggcgcgatctcggctcactgcaacctgcgcctcccgggttcaagcgattctcctgccccagcctcccaaatagctggaactacaggcgcccgccaccacgaccggctaatttttgtatttttttagtagagacagggtttccccacattggccaggctggtctcgaactcctgacttcgtgatccgccctccccgggttcccaaagtgctgggattacaggcgtgaaccactgcgcctggccagagtaacctcttgaagttccctttcgatttgattccttggtggaggagacctttagtctccgcccacttactgccacctggccctacccaccaaacacctgatgggtgctgacgtccgagcccagtctccaaacactctgttcgagcttgggtgggaagagggagcctctgggattctgctgggctgggccctgaaggcaggagtggacgagaaatggatacggtctaggctcagcttcccggctacgcagtgcgttctgtgaaggacggactcatttctacattgacagtcttagcctttgataccagaagtcgcagcacttagggggaaaaatgctttttggtaattataattagcgacatttggttgttaccactgctaaatatgtctgtctttgctgaggagccaatctcagctcggatcagggtgagtggataggagaaataaatctcggcaaagacagcgaggggcctgagtgcgaggaagaactcccagagaccgccagccacctcttggggactcacagcgctgcggaggcgagtccagcattctagccagccgcgcacggacgtcggttcccagatgcgccaatgccaggtctctccagcccggctggccttttcagcagcagcagcagcagccgcaggaaagcggccagacaaatcccacccccggccccgcccgtcacatccatcttgctccccaggcgacgctttctcggagaagcgaggggcggggaggggaaatctaagcctttgggggttgccgacaggtgtttgggggagaaggcggagctggggtagggaggatgaggagggaggggcggtgctgcccctttaagaggaggcggccgagccgggatctttttctctttccccggaaggaaagcgcagcccgggctgggctcgcaaggtggggaggtgcgggactgggcgtggggaggcggggcgcgcgccgggggacccctccctcctgtcctccttgcggtcgaccggtgcgcttgccagatccgccgcgaagccgggatcgaaggcgacagcgcggccaagggggcgcggccgggacaagctgggggccggttgcccggggcagggacggcggcgacccggccgctggggaggcaggaagatagacccacggatcttaggaagggatccgagagc

SEQ ID NO: 18478 - DNA, 2300 bp, Homo sapien
ggcgggggcagagtttggactttggacattctaaacttcctcaagctctgcaggccccagccagagcagggagattttccagtgtaccctggatgtgaccacgtcttcttgttcagtggggtcagaggccaggtgggggcagaggctaggtgggggcagatgcctggcagatcgcccagcccaaagtggtggatggtacctgcttaacctgtcctaaacaccgtccctctttggacagcttcacctcccccaaccgccaacctccgcgcgctctgaggccacggcagagagacctctgaagcctggacatgctcctgggcatgagggcgtctggtggagtgagggggacccaggaggctgggtgcaacctcctcctccttcctccactgtgcatagctcttcccctcctccttgcagctgttggggaaggagaacagaagaaagagaaaaacactgtttccctcttcaaaccaaaacaaacacactcagggttgaagatccaacacgaatctgtggaatgcagggaagatgtctgcggggagagtgccactgcttgcgggtgggcaggaggagacccagccagagttgggacaagtcctcctctctctttcaccgcccctatcctcaaggcgtcagagggagcgtatggacagctccaaacgcccagactcacccatcgcctcaccctccatccgccaagccagcggttgagaaggccatccagtctggctctgcagagggtgtggctggcgtggccgcagactaccagcgaggtgcttaaatgtatatgctcatttttcccccaagcgtacgggaaggggggagtccgctgggtgtttatcttgcagtttaccccagctcccagccctggagagaacaggctagtgctgggtactcggttcacagaatgggagaggactcagccaccgggaccccacttccgctctcatgagagatctaaagggcggaggggtggcgtccagacaggttctggccccgtcagcacttgccaatgattactgcccgaccccacacccaatcctccacttcccgccaacccccagcagccagagggccgccccttaatcctggctcccaagggccagctgccctgggctccgactcagctccggacccgcatcccgcgctcgcacactctctcgctcccaccccacaccctccagcttcacttacaggtagcgctgctgccgctctgtctgccgatggagggcgaccgagtagccgaagaggctgcccgggttcccggcctccttcactaccaggaatcgggtatccaggttgaaggcggagacgacgcagccgccggccgccaccatcaaggcgagcgcacagagcatcaggcgtggggcgcggggcgcgcggctggggccggggcccatggctgccagcggaagcggggtcccggcgagagcgcgtgagggcgcggagctgggcgtgaggacctgttcacctgctccccgcgccgccggaggacactggaacccgccggccgctgcgctccgtagcgctgatcggtttcgtgcccccagccccagccagtttcacagctgcgctctcggatcccttcctaagatccgtgggtctatcttcctgcctccccagcggccgggtcgccgccgtccctgccccgggcaaccggcccccagcttgtcccggccgcgcccccttggccgcgctgtcgccttcgatcccggcttcgcggcggatctggcaagcgcaccggtcgaccgcaaggaggacaggagggaggggtcccccggcgcgcgccccgcctccccacgcccagtcccgcacctccccaccttgcgagcccagcccgggctgcgctttccttccggggaaagagaaaaagatcccggctcggccgcctcctcttaaaggggcagcaccgcccctccctcctcatcctccctaccccagctccgccttctcccccaaacacctgtcggcaacccccaaaggcttagatttcccctccccgcccctcgcttctccgagaaagcgtcgcctggggagcaagatggatgtgacgggcggggccgggggtgggatttgtctggccgctttcctgcggctgctgctgctgctgctgaaaaggccagccgggctggagagacctggcattggcgcatctgggaaccgacgtccgtgcgcggctggctagaatgctggactcgcctccgcagcgctgtgagtccccaagaggtggctggcggtctctgggagttcttcctcgcactcaggcccctcgctgtctttgccgagatttatttctccta

SEQ ID NO: 18479 - DNA, 2300 bp, Homo sapien
tcaaaaaaaaaaaaaaaaaaaaaaaaaagaataatgctgtctaatgctgatgaggtggagagaaatgctattgatttggatgataaattggtagattcttttaggagacgaagttttcagtatctattaaaatttaaagtgcccatttccttagatccagtacatgagaatatattgtaaggagctaataggacaagtatacaaagataaatatatggggatattttagataattatttataatggcagaaagttggaaacaatctaaatgtctttcagtaggagattggttcaataaattatggtacatttccttcaatgactgtgcagtcctcagaagagattaggctgatctttaccaattgacgtgaaaagatgatgatattaagtgaaaaaaaaacaggttgctggctgggcatggtggcttatgcctataatcctaacactttgggaggccaaggtaggaggatcgcttgagcctaggagtttgaggctatcctgggtaacaaagtgagacccatctctacaaaaaaaatcaagaaattatctggatgtggtggcacatggtcccagctacactggaggctgaggcaggagaatcacttgagcccaggaggtggagtctccagtgattcatgtttgtgttattgcactccagcctgagcaacacagtgagaccctgtcttaaaaagaaaagaaagagaccgggcgtggtggctcacgcctgtaatcccagcactttgggaggccgaggcgggcagatcacctgaggtcaggagttcgagaccagcctggccaacatggtgaaaccccggctctactaaaaatgctggggtggtggcgggcgcctgtaatcccagctactcaggaggctgaggtaggagaattgcttggacccaggacacagaggttgcagtgagccaagatcgcaccactgcactccagcctgggcgacagagtgagactgtcttaaaaaaaaaaaagaaagaaaagggaggaaggaagagagggaggaagggaggttgctgaagggtgtatgtgacatgatcccatttatgtagatcatattaatattccatatttaaaactatggaaagagattcaccagagattacagagatcgtaatttctagatattaaaattactgggaaccagctgggcatggtggctcacgcctgtaatcccagcactttgggacgtcgaggcaggtggaccacttgaggtcaggagttcaagaccagcctggccaacatggtgaaacccgtctctagtaaaaatacaaaaatgagctggttgtggtggtgggcacctgtaatctcagaaactcaggaggctgaggcaggagaattgcttgagcccaggaggcagaggttgcagtgagccaagattgtgcccctgcactccagcctgggcaacagaatggaactctgtctcaaaaaaatatatatattatagatttataatatatattagattatacattatagatttataatatatattagattatacattatagatttataatatatattagattatacattatagatttataatgtatattagattatacattatagatttataatgtatattagattatacattatagatttataatgtatattagattatacattatagatttataatgtatattagattatacacatatagatttataatatatattagattatacatattatagatttataatatatattagattatacatattatagatttataatatatattagattatacatattatagatttataatatatattagattatgttatattatagatttataatatatattagattatgtatattatagatttataatatatatagaatatgtataatatatatattagattatatattatacatgtataatatatatattagattatatattatacatgtataatatatatattagattatatattatacatgtataatatatatattagattatatatattatacatgtataatatatatattagattatatatattatacatgtataatatatatattagattatatatataactgggaacctttagttttctttatatcatctgtatttttaaaaaaatcatcaaaataattttaaaagaagtgaaaatcatgtatagtcagaacaaacacggctgggcacagtggctcacacctgtaatcccagcactttgggaggccaaggcaggtggatcacctgagttcaggagtttgagaccagcctggccaacatggtgaaaccctgtctctactaa

SEQ ID NO: 18480 - DNA, 2300 bp, Homo sapien
tttgggaggccgaggcgggcagatcacctgaggtcaggagttcgagaccagcctggccaacatggtgaaaccccggctctactaaaaatgctggggtggtggcgggcgcctgtaatcccagctactcaggaggctgaggtaggagaattgcttggacccaggacacagaggttgcagtgagccaagatcgcaccactgcactccagcctgggcgacagagtgagactgtcttaaaaaaaaaaaagaaagaaaagggaggaaggaagagagggaggaagggaggttgctgaagggtgtatgtgacatgatcccatttatgtagatcatattaatattccatatttaaaactatggaaagagattcaccagagattacagagatcgtaatttctagatattaaaattactgggaaccagctgggcatggtggctcacgcctgtaatcccagcactttgggacgtcgaggcaggtggaccacttgaggtcaggagttcaagaccagcctggccaacatggtgaaacccgtctctagtaaaaatacaaaaatgagctggttgtggtggtgggcacctgtaatctcagaaactcaggaggctgaggcaggagaattgcttgagcccaggaggcagaggttgcagtgagccaagattgtgcccctgcactccagcctgggcaacagaatggaactctgtctcaaaaaaatatatatattatagatttataatatatattagattatacattatagatttataatatatattagattatacattatagatttataatatatattagattatacattatagatttataatgtatattagattatacattatagatttataatgtatattagattatacattatagatttataatgtatattagattatacattatagatttataatgtatattagattatacacatatagatttataatatatattagattatacatattatagatttataatatatattagattatacatattatagatttataatatatattagattatacatattatagatttataatatatattagattatgttatattatagatttataatatatattagattatgtatattatagatttataatatatatagaatatgtataatatatatattagattatatattatacatgtataatatatatattagattatatattatacatgtataatatatatattagattatatattatacatgtataatatatatattagattatatatattatacatgtataatatatatattagattatatatattatacatgtataatatatatattagattatatatataactgggaacctttagttttctttatatcatctgtatttttaaaaaaatcatcaaaataattttaaaagaagtgaaaatcatgtatagtcagaacaaacacggctgggcacagtggctcacacctgtaatcccagcactttgggaggccaaggcaggtggatcacctgagttcaggagtttgagaccagcctggccaacatggtgaaaccctgtctctactaaaaatacaaaaattaattgggcacggtggtacacgcctgaaattccagctacttgggaggctgcagcaggagaattgcttgaacctgggaggcagtggttgcagtgagccgagattgtgccactgcactccaccctcagcaacagagcaaaactccatctcaaaaaaaaaaaaaaaaaaacctcatatacacacacatccgtatttatctccattgtaggggaagaaaaagaatgggactatcagccgggcatggtggctcacgcctgtaatcccagcactttgggaggccgaggtgggcggatcacctgaggtcgggagttcgagaccagcctgaccaacatggtgaaacctcatctccactaaaaatacaaaattagccaggcgtgatggtgcgtgcctgtaatcccagctactcgggaggctgaggcaggagaatcgcttgaacctgggaggcagagctggtggtgagccaagattccaccattgcactccagcctgggcaacagagcaagactctgtctccaaaaaataaaataaaataaaataaaataaaaagaatgggaatatatgctatgaattctttgtggggtttttttggtgaatatttatggagtgtttgctgtgtagcaggtgttgctctaagcagttttcttatatcaaacacacttaattctccccagcaacctatgagagaggtaatattcccattttacagatgaacaacagagaggttaagta

SEQ ID NO: 18481 - DNA, 2300 bp, Homo sapien
atattagattatatatattatacatgtataatatatatattagattatatatattatacatgtataatatatatattagattatatatataactgggaacctttagttttctttatatcatctgtatttttaaaaaaatcatcaaaataattttaaaagaagtgaaaatcatgtatagtcagaacaaacacggctgggcacagtggctcacacctgtaatcccagcactttgggaggccaaggcaggtggatcacctgagttcaggagtttgagaccagcctggccaacatggtgaaaccctgtctctactaaaaatacaaaaattaattgggcacggtggtacacgcctgaaattccagctacttgggaggctgcagcaggagaattgcttgaacctgggaggcagtggttgcagtgagccgagattgtgccactgcactccaccctcagcaacagagcaaaactccatctcaaaaaaaaaaaaaaaaaaacctcatatacacacacatccgtatttatctccattgtaggggaagaaaaagaatgggactatcagccgggcatggtggctcacgcctgtaatcccagcactttgggaggccgaggtgggcggatcacctgaggtcgggagttcgagaccagcctgaccaacatggtgaaacctcatctccactaaaaatacaaaattagccaggcgtgatggtgcgtgcctgtaatcccagctactcgggaggctgaggcaggagaatcgcttgaacctgggaggcagagctggtggtgagccaagattccaccattgcactccagcctgggcaacagagcaagactctgtctccaaaaaataaaataaaataaaataaaataaaaagaatgggaatatatgctatgaattctttgtggggtttttttggtgaatatttatggagtgtttgctgtgtagcaggtgttgctctaagcagttttcttatatcaaacacacttaattctccccagcaacctatgagagaggtaatattcccattttacagatgaacaacagagaggttaagtaacttgccaaggccaaacagctcgtgaatagcaaacctgggctagaacccaggtaatgtggctccagaacccctgcttttggtcgttctgctattctatgaggtagtcattatgatccccctcatcagaaagcagaaagcatgagattcagaggggtgcaattacttgtccaaggtcacacagctcatcagggaaggagctggtacccaggcccagatgtgtgggtcacacacccagactccaggccacctcccagatctgaggccgctcctctggagtcaagtctgtgcctgggagaagcaggaaggaccactggacctgctgtcagtggggcaggcacaggctttttccagtcccaggctgccccctactggcagcaggacaaacagcaggtgcctgggcccagctaggataggaagggtgaggatgggcctaagcaggctgacacagggctgagtcctcctctccccgctccagttctctgtggacattgactcggagctggtggaggagctgccggccgaaatcgagctgtggctggtgctggtggccgtgggtgcagggctgctgctgctggggctgatcatcctcctgctgtggaaggttagtagcccagcccactcctgctccgggacctccaccagcacactcaccagcccttcctccaacccacgtctccccatcctggtcctcccttccatctcacccccacccttcctccctgtcctctccaccttctaccaccagcttacagtctcacccctggcctgggttagtggggggagctgcaagctggaaagggggacccaggagctctggcttctgaccacaccaccaagctgggactgagccccagcccccaggctccccagccctaaagccctggtccacgagtgctgctggtgaggatagcccagcgcccccctgatggcccgtccccacctcctcccctccgcagtgcggcttcttcaagcgagcccgcactcgcgccctgtatgaagctaagaggcagaaggcggagatgaagagccagccgtcagagacagagaggctgaccgacgactactgagggggcagccccccgcccccggcccacctgggtaacacggcctccgggcccccttccccgagccccacagctggccgggcctctgactctgtcctatctgctcctcttcccttatgggcctgctctgacctcattctgtccccaccaccaccccaaagatcaggtcactctgactgtccc

SEQ ID NO: 18482 - DNA, 2300 bp, Homo sapien
ctcagtcagttacccagattggagtgccgtggcacaatcatggctctggctcactgcagccttgacctctggggctcaaggaatcttcctacttcagcctcccaagtagctgggactataggtacatgccaccacactcagctaattttatattttttgtagggacaagatcttgctatgctgcccaggctggtctcgaactcctgggctcaagcaatcctcctacctcagcctcccaaagtgagggccaggtttttttgtacataatattctatatattattctgtgcacttgaaaactgcactcaccagcatcatcaatcacgtcctaattgctagcccagtggatgtttggtggttctctggaatatctctgtggtgtgctcctctgcttgccctgtcttctttttcaccctgtcctccctactaggtgctgagtactgcctgatgctagagatagggcagtgaataagacagatacaacccctgccctgccctcacggagcttaaagtctagcgggaaaacagatcagttggcaaacaattttcactcaattgataagagctaccatcagctccttttaacccctccttcctggatttgtccaggtagctttcagccaatccctttcctcgacgaggtacctgtttcacatgtcctgatctttccttgtcctctcttaaggggtcttgtggattcccagtctggatgacagtgacccagactgcgaatatttgctaagaccaggagatctaaggagcccttgaagggagcctataacccagcttggcaggatcaaggaaggcttccaggaggaagggatgactaagcagctgagacctgaagaatgggcaggtgaaggtgggaagaaagaatgatccagacagaagagatgcatttgcagtggcttagagattagaggctggttcaaggcagcagacaggtatggctgggagctgcatgggggaatgtagagagaggagtctggagaattaagcaaaagtcaatcgacttgtgacaactggaaaggctccagtaagaagaagagagccattgatggcctagcacagtgcctcatacctgtaatccctgcactttgggaggttgaggcgggcagatcacttgaggtcaggaattcaagaccagcctggccaacatggtgaaaccctgtctctactaaaattacaaaaattagccaggcatggtagtacatgcctgttatcccagctacttggaaagctgagacaggagaatcgcttgaacctgggaggagaagtttgcagtgagccaaggttgtgccactgcactccagcttggacgacagagggagactcaatctcaaaaaaaaaaaaaaaaaaaaaaaaaatagcccattgaaaggctgtgagcaaggaagtaataaggtcagatttgcagttgagaatgatccctgagtctcggttttcttatctatgaaatgaggctaagaataataaaatagagaattaaatgagataatgcctgtaaacagtgcctggcatatagcttattattcatccagctaagaggcccttccatatgtgaagctttgctctgtgaggtctgtattacaatcacattcagttatagctaattatttacttatgtagctatctctgaaacttagaaatgaaatcatcgaggaaaaaggccatttcttgatcctgtctgtgttccctgttcccagcataaagcctaacacgtattaggctaatgtcaccgagcaaagaaagcatcaaagtggcgggtcgggccctaaacccacgatgggagataccacattcggccacaagagggcgcgtcacattttctccaagagaagctgggccgctgatgaaggacgggctccgggcctcccagagacacttcacctcctgggatcttgctctaaggaagcccggtgcgaaggaggtggctttctcaggtggtcgcgctagatgtccaaggctttatgttcggtcagatgagctgtataataaaatgaaagtgttaactggcatggacgatagctgctgcctccaccgccactagtagtgatggtttttactctggatgtttttcagttggaaaagcaaactccgccttttcctgagccgcttggatctttgtggaagcgggtgggctgcatatatacaggacggattcgtataggcttgcaccctggttccgaattttgcaaatattcgcagtctgggtcactgtcatccggactgggaatccccaagacccgttaagggaggataggtaacgatcatgacaggtgaaacaggtacctttgagtt

SEQ ID NO: 18483 - DNA, 2300 bp, Homo sapien
tggatttgtccaggtagctttcagccaatccctttcctcgacgaggtacctgtttcacatgtcctgatctttccttgtcctctcttaaggggtcttgtggattcccagtctggatgacagtgacccagactgcgaatatttgctaagaccaggagatctaaggagcccttgaagggagcctataacccagcttggcaggatcaaggaaggcttccaggaggaagggatgactaagcagctgagacctgaagaatgggcaggtgaaggtgggaagaaagaatgatccagacagaagagatgcatttgcagtggcttagagattagaggctggttcaaggcagcagacaggtatggctgggagctgcatgggggaatgtagagagaggagtctggagaattaagcaaaagtcaatcgacttgtgacaactggaaaggctccagtaagaagaagagagccattgatggcctagcacagtgcctcatacctgtaatccctgcactttgggaggttgaggcgggcagatcacttgaggtcaggaattcaagaccagcctggccaacatggtgaaaccctgtctctactaaaattacaaaaattagccaggcatggtagtacatgcctgttatcccagctacttggaaagctgagacaggagaatcgcttgaacctgggaggagaagtttgcagtgagccaaggttgtgccactgcactccagcttggacgacagagggagactcaatctcaaaaaaaaaaaaaaaaaaaaaaaaaatagcccattgaaaggctgtgagcaaggaagtaataaggtcagatttgcagttgagaatgatccctgagtctcggttttcttatctatgaaatgaggctaagaataataaaatagagaattaaatgagataatgcctgtaaacagtgcctggcatatagcttattattcatccagctaagaggcccttccatatgtgaagctttgctctgtgaggtctgtattacaatcacattcagttatagctaattatttacttatgtagctatctctgaaacttagaaatgaaatcatcgaggaaaaaggccatttcttgatcctgtctgtgttccctgttcccagcataaagcctaacacgtattaggctaatgtcaccgagcaaagaaagcatcaaagtggcgggtcgggccctaaacccacgatgggagataccacattcggccacaagagggcgcgtcacattttctccaagagaagctgggccgctgatgaaggacgggctccgggcctcccagagacacttcacctcctgggatcttgctctaaggaagcccggtgcgaaggaggtggctttctcaggtggtcgcgctagatgtccaaggctttatgttcggtcagatgagctgtataataaaatgaaagtgttaactggcatggacgatagctgctgcctccaccgccactagtagtgatggtttttactctggatgtttttcagttggaaaagcaaactccgccttttcctgagccgcttggatctttgtggaagcgggtgggctgcatatatacaggacggattcgtataggcttgcaccctggttccgaattttgcaaatattcgcagtctgggtcactgtcatccggactgggaatccccaagacccgttaagggaggataggtaacgatcatgacaggtgaaacaggtacctttgagttggagaaaagggattggttgaaagctacctagacaactctggaaaggaagggttaaaaggagcctgcaggtgaaggagatgcgagggggtagcaagggaaaggcaggcgtggaagaggaagcgaaagggctggcggggctctgggaaggaaggggttaacccgggcttcgccccgcggaggaaagggaggagtgaacacaggggaggtgggaactcggcgcggcctccccaaaacaacaggccgccccggcaaagcgtgggttaagggggcgggcccgggggaagccacgtgccggggcggaaggctattggttcgcccggagttgtttgtgagtggccattggcgacgtcgaggcgccatgacgagccgattggctgggcgttggaatgcccgccagggcaagggtagggaggaggcggccgaaccgcgtcgctgggccgaaaggtgcgcgagcgctgcccgcgcggggaccacaaccaaagtcgcggccgccgcagccatgcgctgggtgtgggcgctgctgaagaatgcgtccctggcaggggcgcccaagtacatagagcacttcagcaagttctccccgtccccgctgtcc

SEQ ID NO: 18484 - DNA, 2300 bp, Homo sapien
ggatgggcccggaggcaaggttggggcaagttaggaaaacacatatacaccctcccacccctccctctcctcccacccctggataatctctccagagtgctcttccagggaaaccacatccccagactcctgacctagtaatgctgccaagtgttagctgcagttcacttctggctcatttaatcctgtgtaaagaagatattattagccccattttacagctgaggaaactgaggccctgagaggtccaggagcaaagtcacagtaagtgaaggagggggaattcagccccagcctgtgtgactcaaagttcctgtttcccacctctcactctccagccaccccgctgcctaaggcatgaggaaaccctccctctaggccccggaaggaccctcagggcccgcagtttacagggtgaaagtctcccagctcctccgggaagggaggaggagggttctcggtgagcggctgccccctcgtccaggtgaccgatggctgcgggagccccctgcaccggctgcgctcgcctttgcactcaggcccggggtccccggccgggggctctttctgcctggatcctccggggttgcggcgcagcctggacgaggacgagccgccgccctcgccgctcacacgctaccggcccctgcacaacgctgcgtcgcacgagggcctggccgccgcctcctgctctccgccgcgctccgcgccctcctccgacagctcccccagcttcgtgcgccgccacccgcgcgcagagccgcacagcgaaggtgagaggcggccagcgccgcacctcctgctggtcgctcccgggcgcagcagccctcccggtcccggcgcgcaccgcagccgcggaaggggcagctgagcagggtggctgggggaggtgaagagtaaacgccgccgctcactcattctttaccgagcgcctactaagtgccagatcctgtgggctctgggacacccaggtgagcaaacacatgcagtctttatcatcatagtggtttagtggagaaacaatcaaatcaggcctggctggcggctcacgcctgtaatcccaacaccttgggaggccgagatggaggatcgcttgagcccaggagttcgagaccagcctgggcaacatagcgagaccgtctccagaaaaaattaaaaaattagccccgcgtggtatgcacctgtagaaccagctacttggaaggctgaggcgggaggatagcttgaacccgggagttttgagctgcagtgagctatgatcactccttgcctcaaaaacaaaacaaaacaaaaacccaatcaaatcatcccttaactaaatgtctagttataaactataacaagtgctatttgggaaatgtgtgcggcagcatggcgggagagcatacaccaggatgcttggcctggctaggaacatcctggaaatgacatttgagccaagtttggaaggttggttagatgttggccaggataggccgagtgcagtggctcacgcttgtaatcccagcactttgggaggccgaggcgggtggatcacctgaggtcaggagttcgagaccagcctggacaacatgatgaaaccctgtctgaactaaaaacacaaaaaattagccgggtgtggtggcgggcgcctgtaatcccagctactcaggaggctgaggcaggagaattgcttgaacccgggaggtggaagttgcagtgagccaagatcacgccattgcactccagcctgggcaacaagagcaaaactctgtctcaaaaaaaaaaaaaaaaaaaaaagttggccaggataaaattgagtaaatggtagtgattcctacctttttggaacgttttatagtttgtaaaaggctgtcataagcatcccattaggtcccatgaagcaggtagatgttattatccccatatttaaaatggaggaaggccagagaggtaaagtggcttatcctaggacacccagctagtgaaggccaccagagccaggatgcctgattctaagtcaagagaatttctaccaccccacactggcagccgaaggaggcaggcagggcagcaaacaggcagtttccttccttctctccctggaaagatgacagccgtgacgccagtcctcctgagcccgccagccccaccatcggcctcgataagaagactcgccgaaagttcctggacctggggtgagtggaggcggggctagatcgcagggcttggagctgctggggtaaggggtagcacagtgggcagccctgccccacttcctgctgcctccccacagggtcaccctgcgccgagcatccacg

SEQ ID NO: 18485 - DNA, 2300 bp, Homo sapien
caaggaagagagtagaagctggtttgaggttacatgatcggttcattttgatgagttgagcttgagacaccttggggtctttgacgtggtaacttccttggcaggtgcctgagtgcccacactcagaattcaggggagggtgtcaaggctggaaatagaaataggtggtagttaagccaggagagcaactggggtggcttaggggttgtctacagaacgaaacaggagcagacaaggcagggtgggcatgagtgacagaatagggcccctgagatcatgctgggtggagtggggaggaaaagtcttgacccatcttgaagcctgggaagactctttctgtttggagaccccagtgccaagctcagcactggtacagcatgagggcttcattccgaggtgcagcacgtgacaagtggagctatgagcaataaggactttaacgctggacccactgggtctgcccactcttcctccatgtcctcatgcaagatctagcacagggccacagacccaggacagaagagaggtttcggggactatggggctttccttcctgccactgccagtggattctgggggtgtccctttgctccactccaactgcaagccctctagatgctcagcagtgctatctctgagtgagaccctgcgcgtggcacagcaagccagtgtccccagtagggccagtctctagagccagcctagccaggctcaaatcctggaccattgctagctggtggctttagtcaagtgacttaacctctctgagttttagtttgctcagctgtaaagtatgcatagtaactgtcctaaccccaccgggttgttttgagtgagagatgatgtatgtacactgtctggtgtgtagtaagtgtttcttaaatggtggccattatttccatcatctctccagcctcatccctcaacccttctctccacaaagctaccctccaactgtccctggaggtaccacccttgtttccctacttcctagcattgcatatacctgttttgcccacctcatctcttacagactcctacccagacgttaaaacccagctttggtgtttcctcctctgatgcatccaaacagggctgccgttcctccgtgtctacaggagggttcatcacacggcgctgtattttagcgccggcatttctgcttcccctgcacacccgcccactcccacctgagacggggagacaccctgtttttcatctgtctgtgctcccagcactcaagaacacgggttgaatgcctggggtgtgggtgcaggtggcccctgaggtgggcctctgggcttgccgtcacctctcatgtgtctggtctctgctcccctcccccggttcgcagacctggacttggctgtgccagagacggccagactggacagcagtttacacaaggcccgggcccaactgttggccaagggccggagacaccggccatcccgctccaggcttcgggacagtgccagctccgcggaggatggtgaaggctcggatgggcccggaggcaaggttggggcaagttaggaaaacacatatacaccctcccacccctccctctcctcccacccctggataatctctccagagtgctcttccagggaaaccacatccccagactcctgacctagtaatgctgccaagtgttagctgcagttcacttctggctcatttaatcctgtgtaaagaagatattattagccccattttacagctgaggaaactgaggccctgagaggtccaggagcaaagtcacagtaagtgaaggagggggaattcagccccagcctgtgtgactcaaagttcctgtttcccacctctcactctccagccaccccgctgcctaaggcatgaggaaaccctccctctaggccccggaaggaccctcagggcccgcagtttacagggtgaaagtctcccagctcctccgggaagggaggaggagggttctcggtgagcggctgccccctcgtccaggtgaccgatggctgcgggagccccctgcaccggctgcgctcgcctttgcactcaggcccggggtccccggccgggggctctttctgcctggatcctccggggttgcggcgcagcctggacgaggacgagccgccgccctcgccgctcacacgctaccggcccctgcacaacgctgcgtcgcacgagggcctggccgccgcctcctgctctccgccgcgctccgcgccctcctccgacagctcccccagcttcgtgcgccgccacccgcgcgcagagccgcacagcgaaggtgagaggcggccagcgccgcacct

SEQ ID NO: 18486 - DNA, 2300 bp, Homo sapien
agaaaagaagagttggaaaagaccccagcaggcatgtggcctagccttcctacatctgacacatgtatgatctagctcagtgccttgccattctcctggggacctgagtgttagaagtaattggaggtcatgtctcagccatgcagcgtccccttgccttaaaccatcaatggcccctgggcttcctcactctccccccagccagtatcccctggccagtgggctccctagggctactggaatcctacatctgcttgaaagcctattcaaatggtttcagctatatatatccttccctatctgccctcccttcttgcttcccaccaaaaaaccttgaaccaaaacaaaaaaaaccctacccattcacacttcttcccagaacatagttgcatcatagaggtttggctgtccattgtgtgctgtgtgtattcctcgtaccctcctacatctatgagtctgtcaagaactgtgagaactgtgtctggaacagtggccctgctgatggtgccagcttcctgaacagctcttgttcagaaaggcaggtggtgagggcaccagtgatgggggtgtagggaagggggaggcaggattggaaaagagatggagaattgatggatgcaaagataggtggatggacagatggcggcaggtgttgggtgcatgggagcagatgtgggatggacggatgggtggatagatgggtgagtgaatggatgatgagtaggcaagtagataggtggatgagtgcataggtgggtagacggatggtagaacctgggtcctggtcctgattttgccattaacttgctatgtgatcttgggccaatcactcccccttctgtttcttcatttgtaacatgagaggattggatttaataatctccatgacttctcccagatttgattggacagttgatgattgaaagcttttaggggatgctaatgatgcgaaggcccaagacagtgaaggggagaagttcagtgacccacgtgaaggcacacagcaaatcagtggaccaggataccaggaccacagggctcagcctgtgtctgtgccttggttttgcgtctgcccccaccctcctactatactgcctgccccggcgcccaccatctgggttatgattccagtggcttctcttccaggggacagaagaagggttctaaggtaaggggaggggccaacaggcctggagcaggtagccttccacatctcttctgcctcggtcagcctgaatctctaacccaggctctctttttctttctctcccctcttgtccttcccagctctcttgagtcatggcttcttcaaagctccgagaacccgtggatgaagtttttggtaagttctgtgtggctctatctctagccaatagacacagccatagagtacttccttcctgggccaccaggcattgaaggggatagggtgcttcttggcagcttcagagtgtgtgtgtgtgtgtgtgtgtgtgtgtgtgtgtgtgcgcgcgcgcgtgcacgcgtgcaggtattgtggcctgaccctttgtcaccactatcttagtggacacaccagttataacaataagggtctccatttattaagtgcttctcttatgccagatactaggttaagcacccccatctcacatgcactgtattagttaacccttacaataatgtaagcccagtttacagaccaggagtgtagggtacagagggctgaagtgacttgctttcaagatcacattgcaagttagtggcagggctgggactagaaccccaaactgccagacttcctgctcttagtgactatcctatacatctgtaaactccagcccagatgacacacgttacctccaagtcacataaataagtgcaagggacctcaccctgcttggatgtgtgctgaaatcaaatgcataacatacacagcctcaatacccccaggctggccccctcatgctggcctgcacgcccacgtcctcagtacacactggggtgcatgcacacaccacggtaccatcatttaccccctgcaatcttctcttgtgtggactggagaaagaaaccaccccagctgggcagagttcccagcatgcactggggcggaaagccggtttcccagcgggattccggtggaggagtcaggaggagtcctgagcaaaggaacttggaggaatgagggagagggtgagagcggcctgctcctcgaggggctcctatgccagagggtccccagcttctcctcatctctcccttcttccctctctcccctggtcatgccaggaactgctgcttcccatcccagtctcctc

SEQ ID NO: 18487 - DNA, 2300 bp, Homo sapien
caaagcacaacccctttaagacagccagatgcagcccccacagctgtcaacagaaaccccaccccttccccagatttccacaatctagcctcatggctgccagaagattctgaagacacccagagacccccaaactcctataaatcccctaggataccctcagaccctaaaggctgttaattctgtcctcactcatagtcacaagattgtcctggttcaacaggccacttcccggaggcctcggactgcagagtcctgtgggccatcagggaactctgtcctatagactccacacctctcctctgactctagacccctgatccagcttcaccacttgccttttttttttttttttttttttttttttttttttttttttgagatttgagtttcactctgttggccaggctgaaaggcagtggcacaatctcagctcactccaacctccacctcccaggttcaagcaattctcatgcctcagcctccagagtagcgccaccatgcctgactaatttttgtatttttagtagagacaagggtttcaccatgttggccaggctggtctcgaactcctgacctcatgtaatccacccaccttggcctcccaaagtgctgggattacagtcgtgagccactgcgcctggcctttcaccacttgctcttgagcaaagcactttccttcttctaagtctctgttttctctgaggcagtgggtaatggaaacacccaccttgtgggtttattgtgagggtgacaatagatgatctgagagcgcctggcacctgccaagctgtgacgtgcggtagctggttgtggatccctacattgcctccctggctggcctgccactaccatcagcgcactgggtccaagtctgatctcatccgtccccacccccacctgctccagggcttcctgcctcaagccaaggtccacagccatcctagacccctcctccctcacctcctagtccagcaggtccccaaatcctgtcagcttcttcggtgtcagcttcttcaggcctgcatcctgaagggctctcagcttaatctgtaatctttatgcccactgccaccggccctcaatagcctccagcgggtctccctgccttcagagtgccctctgtaaccctgtctccaggggagccaagggtgcttcctaaatgcacacctgagcccctccctcctcttaattttgtgtgtgtgcgcgcgcgcgcgtgtgtgtgtgtgtgtgtgtgtgtgtgtgggcggcggggtgggcggctggtagaataaagtgcaagccccctgcacctccccagcttcaatttatcttcccctcttgccctcccacccccaacaccccctggcacttccctaccctggcccgcagttgtagccaacacatcacatcctctgggaatcccccagcccagctcccgccgcggccgcctggacccaggccgggccaggggtgcgctctcccttccggcaagaagtgccctctgttagctgggcccatggcgcccaggctcgtgagggcctccccactcgtctgagcccccgactggcccactggccttgagcgcagttagggggcgggggttctgttcaccgctgtcccctccagcctcggcgccccggctgctcggcggacgtttgttgaatgaatgaactaatcgggagccctgatggacccggcagaggaggcggaagccccgtgggtcccgtggcgggaccgccccggagccgctcccacccgcgcagactccggtgcgccgcgtctcccgcgggcagagaagtagctgcaactccgctccccggccccagccgcctcctccccgccgccctcccccgcccccgccccctcgctccctcccgctctttgtctcctgggcgcccggcttctccgccacgcgccccccaccccgacgccccttccccggagacccccgcggacccctgccgacgcgacgccgcgcgaatcggccctgccaggcgggggccccgcgtccggccaggcctggcgggcggcaggggcggggagggaggtggcgctcgctcttcgctcttctctctctctctctctctgtcacacacacacacacgcacacgcacacgcacacacacacggagcatcctcccgtcaggtctcctggtccagccccgcccgcgcctcctgcttccagcgaacctgttccctctccccacatcccccgccctccatctcccccggctctgggacccttcccgccgacctcacccccacccccgggatggagcggctcgagcccgcccggagccccccgcggccggggtgac

SEQ ID NO: 18488 - DNA, 2300 bp, Homo sapien
agagccagtcctgggtacctctccccttccacccctcctgctcccctcctcctcttctgtctcacacccgctcccccctctctccccatctggcattctccagcatcttctccatcctctctcccctcctcctcttcccctcttctgctcagcctgttccttcctctctgtgtctgtctttgtgtcccctctcgcctgtctggctctctgggtcctatctctcactttccctctatctgggtgtctgggttcctgagttggacgtttctccaggattccccttctgtgcctatggcagaccatgctcacgctggttggagctacagagagaatagcagtgcgggtctgccaaggctgggtccctttctgtcttgaccctgggctccagaactataagggcctttgttttgctcagagctggggtctcaggggactgggtgaggcctcatctcagggctatcatggggaggcatggggtgggtaactcagcctgcctcctcggcctcctcatgccagttctgcacttgtcctcctgccggcctctctgaccagctgcctccctccccaggtgttcagcacttactccaacgaggattacgatcgtcgcaacgaggatgtggatcccatggcagcctctgctgagtacgagctggagaagcgtgtggagaggttggagctgttccctgtggagctggagaagggtgagaggccaggaggccacgtcacttgcgcacagctggggttgacccgggtctcatctctggcaccagctcctgccctgtgccctcaggggctcccacagacttgctgggcctctccctctgactcaggcccttggtgaccttccccgctcctcccttgtcagcacccagagcaaacagggcctccaacccaggccaagccacacccccaccaccccggtcatggaaccacatttgcacattcagttaacaggtctctgtagggtactgtgtgctaggtcctgggctctgtgttggggacacagtggtgggctcctggggagatggatgggggaggcagacatggaaggcacagtcacatctaatctcacccttaggcgctggaataggggctggggaaggtaaggaggggccactgtaaaagcgtttaacaggtgacctaaccagactgtgcttgggggcattctccagggaagtgaagcttgagttgcactctggtgaggaggaattaggggagtagtcaggaaaggggcttggctgcatttgcatagggagggcaagaagagcatgcaaatgaggccttgcagaccacgtggtcttgttgctaagatggattgggagccatttcgaagcacaggaaaggtctagaaagaccacaccaggctgtgatgtagggagggggtcacaagtggatggagaaaggccactgtggcgtggacaggaagatggcagagcgggtgtgggtggactggaaagatctccaggggtagaatccatagcatctgggggtcatttggctcaggtggaggctgtgagtgggagggaggaatccaggtgcctcccaggtctggcaggtggcaggtggtggtaccatcccccatgagggagtgtttgtgggggaaggtcattagttgggacatcagagggccatgagtcaggcaggggcaggtgtggataggggaatggacctcaggggagagaaaatctggaggtctttggtccttgaagctatgagtacagatgagactggctgagagggagaagaccaaaggcttagggctgagtcccatcctggctacccccatcctggctacccccatcctggccacacgccctggtctgcatatgcaacagtcttacctgcctgtgccacccttggcacgctcttctgcccattggttctttggaagggacaaagggcagggagcggctcaggagccatcctagtagacttggcaaagacggtggacagaactatatcccttcttcagttgtgggacatcccctaatggggactgcttcctgatgggggggctgtgccctggaattcggggtggagagtctctcgtctgtcccctacaagccctgccatctcaccactctctgttccacagactccgagggcctgggcatcagcatcatcggcatgggcgccggggcagacatgggcctggagaagctgggtatcttcgtcaagaccgtgacggagggtggtgcggcccatcgggatggcaggtaccaatcctccccagtctcgcctgaccctttttccctctccgaccggccatccttggtggggtgggccactgagcagggggt

SEQ ID NO: 18489 - DNA, 2300 bp, Homo sapien
cctgcaccatcccaaagtgcaaaactggggaggggtaagtttcctgggcaactgggcaaagatgcaggtggcatttggaaagtgtgaggtctgggttcacttccggctctagctcacaacctagatcttccctcttccttagcaccagcctcaggatcagtcctgcggttcctggcccctcccgatcccaatatccagggttcccaggcggcttccccacaccccatcccccacgctgtactctaagctcttttgcacatggtaacgcgttaatatcccacaaaacccacacacacccctgcagtggagtggtaggagggctccctttgccagcccttccaggccaggggggagagagtgggagattaggaaaaggaggaagaggatggaggggaagagggcgggggaggaggcagaggccgcagaaaggcctgagatgcaggaagcagctgggagtggggggaggctttgtgcctgagttgttctctgggtcctagggcccattgtgttcaccagtttctgggatgtgtggaatgaaccagctcacctggacctgtccagagggcggactctcacacccagggcccaggcagcgccagcaccctagctgtgtatgcggggggtgcagagggcatcaaacagctttctgggttgccaggacaggggatgtgtaagtcactgtcaccctccccacccccccaccccaaccggaacacagtggccaggatcctttaaatcagagacccaagttagagctctcactggcgaaactttggccccaggcctctcgaattcctgctcccaaacccttccttccggtttgagaggcaggagtgccagggtaggggcctgaagacgggtgcacagcagacaggcgacaggacatcctttccagacttcggcagttttggtgatcccctgctacttggatgacggggttcacctcctttcttcaccacccctcccccaccatcgaaaggtcaccagcgctggaccaaggtttcacacctccaagggggccaaagattgcctgtagtgaagtgttaaaatgcagattcctgggttcagcctcggagattctccttcacaaggttcgagagagatcccagaaatctgcatttttaccaagtgcccagcgattctgatgctaaaggcttgaagcacaccgaagagctagctccgaggacactgaagaatgaacctctgcccctccctacaaaccccctcccctcacactgagaccatcgtggatgtactgcctccccccaatatttcatggaggtgcggttctgtgggttgtgaccgcagtcagaagttgtgatggaagcaggttgaagagtgctggccaacgtccgggggcagcggaaggctctccgcgagggctggggaggggaggggatccgttcgggtggaggggaaggggagggctcacaggctccggccccggaaatccgatccctttaggacccagaggtgccagtcccccagcggcggctgcgagaagggcagccgctcggtctccggcagccgccgctcgggcaaagccagagaaagaccgaggctcggggcacgggggggagggagggagggagggaggcgcggcggcggagcggcccgggccggcggagcagccatgggcgttggggtgccgggccccccgagagccgaggcctccggccggactgggggacgcccgggctgccagccccgctgacaccgtctcggacgatgtgagccggcgacaccgcggctgcttcgcgggcagggcgcgcgctcccaccggccccagacgccgctttgctaatttgggtgggggcgaccgtaccaggccgctcgggcttttgaagcggggctggctgtcttcggcagcttgattgggggaggcgacccacacacagggcgcttggagattttttttttttcatttttttttttaaagcgggattaactgtttttggcagcttggttttggggggaccctaaaaaaggccttcggggtttcttttatcggggggagggggcggtggtcccgacttggccagccgcctgttgaagcgggggagcggggagcaggggcatgcgaacccggctccccccaccatgatgaagacggagccacgggggcccgggggtcccctccggagcgcctccccgcaccgcagcgcctacgaggcgggcatccaggcgctgaagccgcccgacgcgcccgggcccgacgaggcacccaagggggcccaccacaagaaatatggctccaacgtccaccgcatcaaaagtatgttcctgcagatgggcacgac

SEQ ID NO: 18490 - DNA, 2300 bp, Homo sapien
cttgtgggacagtccctggctcccttgaattgggcagggaggatctgatggggaagtagctgcagcttttcattaaggaaggctggcctctgtgggcctggtgacactggggccaggcactgctaccttaagacagctgagtgggtggctccaaaaatagccagggggacggcagggggcggggagtcacatggagaagctcaggggtgaggctgggcaggtgcccagggggttggcacttctgcctgctcccccagaacccttgggctcttcctctgcctccagaacctttcttcctccctccctctgtctctgagaagacagagagatggccaggtgatgctgggacaaatactgccttgcctgaggggacgctgactctggaatttggtggctctccagggatgagcgggtcagtcaggtggagagagagagaggaagggacaaggactgcgtaacctgcctaccagtcaccccatctgcaggccaacacctgtgcccttaggctggacccaagtgatccttgcctggggtattttgttgtccttttgaggccctggaggagaggtcacacaggcaccaaggatttgggaaccctggcagccataggtccccgcccccttctcagggcacctggggagagtgcccctgtgcctgccctaagtgagagacctggggagaggacaccgcgccccatcgcccctggactgagatcctttggcagaggcaagaaggaaggggaagcagggccgggcaagtacatcagcagcacagtcatcgactgagccaggcactgggctaagccgtccacatgcattctactcatcagcaatgtggccttggggaaggtatacacccctgtgcctcagttttatcatctgttaaatgggcacagtaataatacctgcctcatggaactgctgaggagatggaatgaggtaatataggtagatatatgtaagattctcagcacagtagctggcagcgctagctggtattacccactggcaggtgacctccatgtgggcagaggtttgcttatctttgcaatttcaatgtctgatacatagcaggtgtttcataaatatgcgctgcattcattactttgtggagtcctcacaatgatgccaagaggcaagcactattcttgccagtttatagttgtggaaatgggctagagggcaaatggtgcactcaaggcctcatccccagcaagtggccaaggtggcccacctccaggcctccaagtctatgcgccgaatgaaccctgactccatgggccagagagggtgcctcctccgctcacctgtctctagctggctggtcctgtccagggcttgctagacctccacgctgaagtgcttggactggggataaaggctgggtggatggcacctacgtttgctgttaaggaagctgccgccagccagctacacctactagttaccaggccctgtgccaggcccaaggatacaaacgtgacaagatcctagtcttcgaggagcttggagcagtctgtgtgattgtgttgtgcccaggaaagcacgcaggggctaaggggacacccagcttggcctagcagaagaagggaggtcagaaaggcttcagagaggagaggacatctgtgcagagtctggaaaggtgactggaaggttgctgcttgaatgaaggtgggaagggaactgcaggcagaggcaatagcctggacgacggcttggagacttgagagagtctgccaagctaggcaggagcggagtgaggctgagcaggggcctggggttggaagggtaggggcagaggatgggattctagaccagctgaccaggttcaggacaggccagaaagccaccaactggggatgagctgggaactcaggggccatgagaaccattagagttttaagggaggatggaggtggcctggttggtggtttaaaaaacactgtggccactggaggggacggttggagggacaatgagtgcgaggagggtgtctatcccagatttggtgcatgctccaggcggggaggggaggctgacgctgggacccagctgccccgagccacctccctccttccctcctctcctccctgccccctgtctctgtcactcaccgggcgggccaggccgggcagccatggctgagacactcttctggactcctctcctcgtgggcaagttggggccttgttcagcggggaggcccaggatgagggggcaggatttaggggtggtaagacggaggtgtggagggcccacagaagagggatctgggttgggtgaggcaggcgccagaagggc

SEQ ID NO: 18491 - DNA, 2300 bp, Homo sapien
ccaagagttcaaggccagcctgaccaacatggtgaaaccccatctctatttaaaaaaaaaaaccaaaacctacctcctaggactgctgtgaagattgaaagagaaaatgtggctgagtgtttacaacagtgcccaccacgtgataagcgctcacaagatatggagacatgaatagacatccacaggggccatattcttccagaagccagtgtttgctgagctttatattatgtttttatattatttatttatttttaagagatggggtctcactttgtcgccaacttcagtgcagtggcacaatcgtagctcactgcagcctctacctcctgggctcaagcgatactcctgcctcagcctcctgagtaactgggactataagtgcaagccaccatgctcggctaatttaaaattttttttgtagagacaggtgtcttactatgttgttcaggctggtcttgaactcctggcctcaagggaccctcctgcctctgcctcccaaagtgctgggattacaggcatgagccactgcacccagccaagaattggttttcttagaggagctggggccccaggcagggctgaagcgaccccacttgccacttggttactgatgagatgagggaggagaagtgatccccacccatgttcaggtcccaattagtggacacagactccggttagagcctgacagtttagactgcagaaaagacctagcttcacgctgaatgggccatgctcctcctgcggggaggccagcaggaagaggtggagtcaccatctaaggccaggggagggtcaagatgagctcttgagtctggaattcagtgagctgagttgtccgaaacccaattttctattcccaggcaaggggagactgaggggaaagaaagcaaccagtgtgtggatgctgagatagagacagctgggcaggtgaggccctggcagaggaaggcctcagtcagtgggccccctccttattcccagccccacatctggacctcattactctggcaacacacaggtggaaaaatgtgctggggatgtttttctagagcaagagcagaggccagaccccgcagtggcttccccacggtccttccacatcagcacttgggcagacagacaaacggcaggcattcctacacactcaggcacacgcacagacacacacacacgtggcctaggtctcacccacacccactccaccaccaacacacagtcccgaaagcactgcctctggcacagaaatccccaggagagggtcgtggggcctggaggactctgtgaccgctgaaatctgatctaggtgaaaagcaggcagcagaatcataacttgtggataatctgaaaagtggcagacattgaacaagtgaaaaattggattttgtagaaatacatcaacgtgaaatccaaaccagccaaggctaacgttgcacatggtaaaacggttattgatttcacattgactgaggcagcagatttttctgacaacatcagagctacagagttgacccggggaaggctggatgtggaggaaatactggtcacaagagaatatccccagtgccagtagatgttagtgtttaaatttggttcagtccaaaaaaattgaggaataaaatcttcctagtgaaatgtacatgaaaaatcactgatccccatggggaaaaattctataaaattgaaaacagaaaataaaagcaaagccttttaactgctttgtatagaaagttgcttgaggaattaagtcaacttagcgtaagtcaacttagcgtacatctctgttcactttggaaactatattccccataaaaattcataaatgttggtataaccctgatgcctgcaaagcttgtattcttcaacccagtggctcaaaaacccagtgggtcaagatggtgggatcaaaatggtgagtttaaaactgggggccaggccaggtgcagtagctttagtcccagctactcaggaagctgagatgggaggatcgcttgagcccagggagtctgaggttgcagtgagctatgattatgccactgtgctccagcttgggtgacaaagtgagaccctctctctaaaaattttttaaaaaataaaatccgcccaggcatgtgcacacacacatgcatatgtgcacgcaccgtgcaggcccgctgtctggcccacaagcgcagccctcctccccaggacacctggcatgttacatgcctccaccatctggcatctccggtccacccctccccggaggaaacaatggggccactgtgacccacacagaattctggtagcctctgagg

SEQ ID NO: 18492 - DNA, 2300 bp, Homo sapien
tctttcttttttttcttaaattcttgcttcctcttcccccctcttctccgtcccttctctttcccttcaccttctgcctgctccttcccagaggccctgagaaggcgaggcccggagggaaggtgactgttcggctcccccatctcaggtaagggggacagcgagtgtggtcagcgggggacagagaatccagggcgtcagaagtccagagagaaccaggcacccggagccagggagacagcgagacgacagctggtcacctctctcacctcatctcaggtctaaacccaaaaagaacaaaaagcccgcactcctccctaaggtctccagagagatggacaagtctgtagataccatccatcagcaatactaatatcgtgatgtcattaagtattcatggccgttcattatggccttcaataattcatcattagcacttctaccacacttaggacagtgtagaaagggaatcagtgtagagaggataagaatgatggcatataaatgaaggcttattcatatgcaaattacccaaagttgtgtgatgcctatccatctctctttctctcttttttttgagacagagtctcactctgtcacccaggctggagtgcggtggcgcagtctcagctcactgcaacctccgcctcccaggttcaagcaattctcatgcctcagcctcccaagtaactgggatgacagccatgcactaccacgcccagctaatttttatatttttagtagagtcagggttttaccatgttagccagcctggtctcgaactcctggcctcaagtgatccacctgcctcagcctctcaaagtgctgggattgcggacatgagccacagcaccaggctccatctcttgatcaatgtgttgattgcttggtgatgcctgccatgctgcccaggaaaccctgtccacttggacctctgggactttaggaccctggctgtccaggccacatccccatctgccctcgtgggggacccagggacatcctgagcctggcatccaaggctctacctggccactacccacctgcccaggctcactgtcccctcccctgcccacatctgtcacaccaaccaaaaagggtggccaacagttctcacaaatgcactgcatttccccacttccaggccttctagatgtcctttctctctgcatgctcaacaccctactgtccgggccatgctcaaatgtctcattctcttcccattcccttgcccaacccagcctgagctcagcccctctgagtttccaaagctctccagatccacatagctcccctcggtccttcatcctaggattgtggatgtggtcatgtttccatcctgttattctctccagactagaggccaggtgttgcaatgcagggctaggcagagtctgtgcttaggtactggggagactaaagagagagagactgagctagagaggccacccattaggtgagagcatggcgctgtgtgtgcttggtgcacaggagtgagcgagtgtgagaggaagagcaagtggaaggcccatgggggagcagacagcaacggagggcgcagggcagggctttctgcagcaacagacatgtcctagagctgcaccgcccagtgcggtagccgctaaccacatgcagctgttgagcatgtgagatgcagttagtgtgactgaggaatgcagtttccacttttactgaattgcaattagttttactaactatatgtgggataagggttaccatacggggcagcagagctgtaggcaaaggagtgaatatgcctcttgtcacctctgtacaaatctacatgtgggtacgtgggtgtgtgtgcacacgcgtgggcatgtatgtggacacacgcactgtgggtcagggctgcagcgggggcagccttgtgtggcagtgccccatgggcagctctgagcctgcatcacgtggtgtggggccggtgtgtggtttcagtgtgtacaggacaggaggggagggggacaaaggggccattgtgccacattcccaactcaaaccctcctttccgctgacatcacagccgccctaaatacagccacccagacccgctccccgagaccctcactatctcctgcagggtgtcacagagcctgccgctctgtcagactcacctttgtcttctctgtgagaaggaccaggctcctgatttttggctgatttttcagtcaagcccagatggaaaattctagaaagggaggaggcttcatttggatttttaatttctgctgcaatctcagaatcctgggtcccttttgggacctaagccccatctcctg

SEQ ID NO: 18493 - DNA, 2300 bp, Homo sapien
ctaaccctcatactaccaagccctgcggcaccctgccctagaccaccactctaaatgtctgttccctccaaaaacaggacccctgtcgcctattagggaggggttctcttggaactgacccacagtagggggcaggactttggtgggttcaagaactgccatctcagcacctcagccccctagtcctgccctgcagtcgctggcactaggcgggggcagaccctgggccacaagttgctgccacatggtcgggataattgatgaaggtccatccctccattgctgtctccagccctgcctctctggaaactctatattttccctttaattatagcccctgcagtctccctctgctgccccacccgcaccgctcatcctggctgcccacggccagccggccagccgacgtggctccctccccttctgttccttttttttcccctttgccttcgttgcacaaaaccagctgggggagggcgtggagaggggcggggggaggcaatggaatcttggatggtttgggggaggcgggactccccgcttccacgtttgcagctctggagcacccggggtggggagctgcacaggagggagagaaatgaacagggcactgcaaggagacccccaggccttctctcagccctacagagtttctcaggacgaggtagattggggttgaggcagagccttgttgggggaatgggacatggaggaagaaaggacgtggagttctagagccatcttccttagatatagcctgctgtccttcgggtccccagaccctttcagagtgtacagatgattctctctggttcctaaggcatagagcaatgaccgggattttcaagaaagagatgaggcagtgggaagtagcccctaaaacaaagtcaatcatcctctgcagcccatcccacacccccaaaggaaagtttcacccagacacccaaaatatcccatacatccccaacactgagtccaggtacaactggagaaggggctttatgcagctcccagaaagacacccctttagctaagtgccctccctccacccaggttctctctggtttgactgtgctgggaaggagggtctctaagcagcccctggccacagccatggcaaacaaaactcttctctaagtcaccaatgatcacaggcctcccactaaaaatacttcccaactctggggtggaagagtttgggggatgaatttttaggggattgcaagccccaatccccacctctgtgtccctagaatcccccacccctaccttggctgctccatcacccaaccaccaaagctttcttctgcagaggccacctagtcatgtttctcaccctgcacctcagcctccccactccatctctcaatcatgcctagggtttggaggaaggcatttgattctgttctggagcacagcagaagaattgacatcctcaaaattaaaactcccttgcctgcacccctccctcagatatctgattcttaatgtctagaaaggaatctgtaaattgttccccaaatattcctaagctccatcccctagccacaccagaagacacccccaaacaggcacatctttttaattcccagcttcctctgttttggagaggtcctcagcatgcctctttatgcccctcccttagctcttgccaggatatcagagggtgactggggcacagccaggaggaccccctccccaacacccccaacccttccacctttggaagtctccccacccagctccccagttccccagttccacttcttctagattggaggtcccaggaagagagcagaggggcacccctacccactggttagcccacgccattctgaggacccagctgcacccctaccacagcacctctggcccaggctgggctggggggctggggaggcagagctgcgaagaggggagatgtggggtggactcccttccctcctcctccccctctccattccaactcccaaattgggggccgggccaggcagctctgattggctggggcacgggcggccggctccccctctccgaggggcagggttcctccctgctctccatcaggacagtataaaaggggcccgggccagtcgtcggagcagacgggagtttctcctcggggtcggagcaggaggcacgcggagtgtgaggccacgcatgagcggacgctaaccccctccccagccacaaagagtctacatgtctagggtctagacatgttcagctttgtggacctccggctcctgctcctcttagcggccaccgccctcctgacgcacggccaagaggaaggccaa

SEQ ID NO: 18494 - DNA, 2300 bp, Homo sapien
tttggggaagaaactaggtggaaaaaactgcctggacagaggcaaggagagaagcagaaagagtaagaggaggggctggagaacatggtggggggtgggggtcaggtggggactggttatgggggaccctgaaggtctctctgagatgggactttattcaggtggcagcagggagcctccgattagggaacaagagagcgacatgcccaacatggcctgtccctccttggcaatgaggtgaccaagctagaggccttgttgaatatggctacgagagtcctgaggagccaggctgcacggggtgccgatggcagtggggataaagggagaggacacctgtgacaggcacagcctccagtctccatgagctctcagcccatgtggagaggcgggcctcctctgtgaagtagacccaggcagcgctcagtgggctgtgcgggagtagaaagggggaacaaactgggagtggagggaatcacatctccagtcccagaccacgttcaggagtggtcggcacctggacggacatcctctgggatctgtcaccagccccaccttctcaggcctgactggccttaagtggggcccagtggacagcagaggggtttagtgagcaaagcttcctggggaaactggggttggatgctgcagcccatccagggaggtgagcagtccaaaagcagcgagaccctgcactccttggcaccccactctgcctccatgtgaaatgcagagaaggaagtatgggccccttgtctctgccaggaatgacagctagcatttatttgccattactgtatgccagactctgagcggcctgtttcatcctcatcatggcctatatgatgagggaggtactgttatccaactcctccctctccttcctgttgagagaggcccagagaagttccatttctcgtctaaggtcacacagcacaacatattcagtggcacactgactaacacgacacaatactgcccctacaggcagagccgggctagagcagagcattctgctggctttgaaaagagatcccagcctagtgccatcagccattacagatattagtgtccaccaaagtatgggggtgggggggactgccaagtaaaacagaattcaccctggctcttccccttcacccaagcctggccccctgggctgggctgagccaggctaggcgaggccacccaccctgagtgatcctccatccagagcagtggagcagggctccccaggcccgaggtgagtgccacctgtgctgggtgtggcgtcttgagcgctgcatggttctgatcctgactcagcccctcatgtcctgtgcgacctggccttcccgctctccaggccctggttgcctcctctgagaagggcgtaagtgggccggctggcctcggaggcccctccttccagctgggccccggcaggatgcacaatcagctcattctttagtgaatgcactgggggcccagcgagcgtttatgaagacatttcgaagtggctgctcttgggaaaccccagatggaatttggtgttgaatctagggggccgctgactacatgaggcctctgggtttctgtgctcgtgtatgcctgagcacctgcacacgctgccctcctggtgctaggtgacgtgccaaacagaagatgctggccttgtccaggaccctccttcctctagaacagcccttctctgctcagtctaggggggtccatggtgctcccacccccttctgacctcacccaccaaaaatccgagggccctggggccatgatgaatgctaacaggccctggtgttcttggcctggcctgggaccacccacttccaggctcctcatcttgtccccatctgcaggaaggaacgtagggcagtttggtgtcatggaactgggggcccagccgaggggctcaagagcccttcagactctgcctggtgagtcaagtgctaaggacctcacttcttcattggaagatgtggggtgggggtggagtttgttcctaggacattgtagcgatgtggatagcattgccagattttgttttgttttgtttttctttttagagcgagggtggtgctctgtcacccaggctggagtgtagtggtgtgatctcagctcactgcagccttgaactcctaggctcaagtgatcctcctacctcaacctccagagtaactgggactacaggtacatgccaccacaccggcttaattgcttttgttttctttgtttgcagagacagggtcttgctatgttgcccaggctggtctcaaactcctgggctcaagtgatcttcctacctc

SEQ ID NO: 18495 - DNA, 2300 bp, Homo sapien
ctctgtagggctcccagcctgggcaggatagcagggagtgtggggtagagaccccaggccttgctgttgcagtggggcctgggtggggacaagaagaaccctggcagcccaagttggcaacgactcaagaggtggaggctccagcactctcaggacgaggtccccctgccaaggtccacctgcaggggaggaggggagacggcggccccttcccttctccaagctcacagtcacttcaaatacagaggggccagatcccaatacccctcggatcaggagactagaagattatcttcttaaggggcaaaaagggctaggaggtaatgggaaatagagacagggaaagggagagagagagcagggagacagcataagaaacagaccgagagactgggggtgcaggaccaaaccagggacaaggagaagggaccagagaaaccgagaaaaacagacgcctccgccgaggcagacagaggtgaacagagagaggagaaacagacgggagaacagagggaaaggctgggaactcgagagaaactgggtgcggacagatgggaagaaaccgaaacagaaaaacagaggctgggagaaacggggagagacacagaggggttaaatataagacagagaacatgactgggagagatgagggagaagggtgagaggcagagagcaaggaaagagaagaaacgcccacgacgtcgggggtgtttttcaggggtcaagacagattggcgacacagcaggaggcgcccaaggacatgacgttgagcctctcagggtcccccttggccgggccagggagcagcgccccacgctccatcaccccctctccccctcccgcggtcctggctgcactgctcctgcctcgccctcgcccagcgcccccagcccacaagccccggccgcgcccctcccggctcccgggggcacccgcgctgggcgacgctgccacctgccggccgctcccggaagctccgcgcctggagtgctggaggcggcggccgcagggggctcagaatcaggcccctccgcactggggcggcctccgcggggtctttccaggaatctggatgggcctgctcgcccgcgccccggcgggcctggcagaggaccagccccagctgcggaccccggggcagtctaaaccctggggccttgagttcccgttttgtcaatgggagaaaatgcaccaacacctcctgtaggatttcaagaggggaggggacacgaaggtacccacgttgtgctcctggtcttccttcctcgacctggaaatctcagggcactctgaaatcagccaggctgctctgtccctccctttttggtcaaaacacaatggggtgatatcccccaaccataacccctcaaaatctaccctagaaccttcgccttcccctccctcaacctctgcccccatttgacttctcaccagacccagaggtccagataagaaggggcttccacgtccccttcccactcccgccggtcccggcacccctccctggagtctggggcacttaggagtggaggagttgggagttaggaaggcccagctcagcggtgtggagttgatcccacctctttttaaatttaggttatttatttatttatttatttatttagagatggagtctcactccgtcgcccaggctggagtgcactggcacgatctcggctcactgcaacctctgcttcccgggttcaagcgattctcctgcctcaggctcctgagtagttgggattacaggcacccgccaccacgcccggctaaattttgtatttctagtggagacggggggtctcaccatgtaggccaagctggtctcgaactcctgacctgaagtgatcctcccaaagtgctggtattacaggcgtgagccaccgcgcccgggaccgcttttttaaaaatccgttaatctcttctacctcccaaatcccaaaacccaacccagacctctgcgcctcccttcctcccttcctcctcccagcccctccctgccccgagtccgcctctcccggtgcagctccgcccccatcccgaggcggggccccataggtggagagaagtgggagaggtcgcagccccgccttctctacacaggaaagctcagtggcccccaagccaggatgtcccaagcttgggtccccggcctcgcgcccaccttgctgttcagcctgctggctggcccccaaaaggtgagactgggaggtaaggttgttgaacttttgggccctacccttgtaggtcaggagcctgcttctggagcctggtcgccaccttccagaatcaggatttc

SEQ ID NO: 18496 - DNA, 2300 bp, Homo sapien
gggtggcagaacgagactcaaaaaaaaaaaaaaaaaaaaaaaaaaaaaaaaaaagccaggcgcggtggccacgcctgtaatcccaacactttgggaggctgaggtgggcagatcatgaggtcaggagattgagaccatcctggctaacacggtgaaaccccgtctctcctaagaatacaaaaaaaaaaaaaattagccagtcgtggtggtgggcgcctgtagtcccagctactacttgggaggctgaggcaggagaatggcgtgaacctgggaggcagagcatgcagtgagccgagatcgcgccactgcactccagcctgggcaacagagcagactccgtctcaaaaaaaaaaaaaaaaaaaagagagaaatgggggaaaggaaaggaaaggatagccactaaaatgttaatgatgatcatcttaaggggtgggattgtaggtgacttttactttttttcttattcgtttagtgtttaaatgttatataatggatatttattacttatataatcagtgaaaaataaagctattttcattgttgtggggggaattcttggcaggtagaagtccctagaggatctgatttaatgagcacacaagatcaatatttaattaacatatcaattgccgggatgtcaactgatgttttccaaaatcattgaagtgtaggctctcttaagtagccaaactgtcgtcggaaacatagtttacaattctcccatttaacaaacgcggaggaacagaatgattacaaatgctaaagcgcagaagacgattaaaggaggttatttatgtaccatcaaatgcttgtgtatcctgtacacatcagtttagaattctctcatcaacccaaccttgtggcaacttccaaacccctccatcatggccttctaacttttcaaacttttttttttgtaagccacttctctttccagacctctctgtagtggttcctaacgtcttccctttaaaccttctaacttgtgtttgctatttttatgacttcctcctcccagtgcctggcttccccagctggggattcaccttgctttggtggccactgttttgctcttctcgccttccctctctccatgggcctgccaggcttagggaaggccgcaggtgcttagaccttgtccaatgcggtgctcattgaacacgccgggttctcaaacaaatgttagggacagctggttagacgggaatctgggcctcccctgcttgctttccgcaacatttcttgagcattgctgggtgtccaaggcagggcgagatcccagagcagtcacgaccggatgtatgattggtgctcactgcacagtgctggggacgcacagggaggatgccactgatggtgtagggggtggggacttggcagagggagcagcatgtgtcgaggtctactggttctccaagtttggtcccagagcaaaggcatcagcatcacctgggaacctgctgaaaattctaatgcttaggcctcactaccgacctaccaaagcagacactctgggggagggaggaggggcactaaaaatctgttttatcaagacctccaagagactccaacacacgctagagtagtttgagaaccacgactctgggagcggcctgaggatgcttaggatgagcgcagagcggaaaggaggattcgtgaaggctctctgatgccagtcaaggggttagactttgccccgcaggtgcggcctccaggtttttaagcagacgcctgtggctctcacacgccctctcccaaggcggcgtctctgggagccctggcgttccctgggcccccgggaccgagagcttacccgcgtgggactgaactcgcccacgacccccgacaccaggcaagagaggttgtgccgcagaccctccactccccagcaccaggcgctcgccgtccaggtggaggggagcacacgtgggagccaggggcaccggcggagacacgagcgcagaaggcacgcgctcaagcccacgcccgcgactgccgggactgaaggtgttgcgagccccggctccacccctagcctgcggtgcgccgtgctttggccccgcaggccccgcccccggccccgccccggcgcgcgcccggcccgcctccctaggcgtggaggagggggggcggctcagccccgcgcccgtgcgcgcgctcgcggccgggttgcagggctgggcgcgcgccccgcgtcccgggcaggaagatggtggcgagcgcgcgagtgcagaagctggtgcggcgctacaagctggcgattgccacggcgctggccatcctgctgctgcagggcctgg

SEQ ID NO: 18497 - DNA, 2300 bp, Homo sapien
attacaggtgtacgccaccacgcccagctaatttttcgtatttttagtagaaacggggtttcaccatgttagccaggctggtctcgaactcctgacctcaggtgatcccaaagtgttgggattacaggcctcacccatgactttctcagctgtccactcatccactgctcaccaaatactagtaaaccaaaaggatggctggcctaaaagtggctcccacagggtcctggccatttcagaaggctgggccctttcttctcaaagcacatcaagcagaggtccaaccatgacccacacactgcccttgttaatctgacctctccatactcattccaaagtgctcaatagcattcatttgcagaagtaaaatgaactaaaattcatactaagatggtagtcccttgctgtatgacaagcctaggggtgcaactccttgcctgcaggtctccagacacagccatgatttaaggtccatgccagtgtctttagagaagccttgtgggtctctggagcctataagttcagagttcctgaagcctgggtttctgacatttccatgacaccagagactagctggggcaaaggaccagagataaggactcagaaagacaacatgttaaaacatgcccggcgccaggatctacctacctttaaacatctattcattcatttacatacttactaagctcaggagctgggcttttactttacttacattatctcactcacaaatctttgctcttcaccctactccccatcctcctcctcaaagtaaatggtaccaccattcatccagttgcttaggcagaaaccagagtcattgcagattccttctctttgctgtcctcacatattgttcaccagcaagctctgtggatgctaactccaaaacagatctcaaattcatccgttttcctccaagttcactgccaccacaaacatcttggctaaatcatctctcctcagggctattacgactttccatttgatttcctcatttccactcctatcccctttaaatttacataagagcaatagtttgcttctcaaaatgtaaaactggctcaagtcactctcctgtccctcactctacacaggtctaggtctcctgtcattcttttttttttgggggggggggatagggccccattctgtcacccaggctggagtgcagtggtatgaacatagctcactgcaacctcgacctcccgagctcaggtgatcctcccacctcagcctcctgagtatctgagaccacaggcaagcgccactacacccagctaatttttgtattttttgtagagatggggttttgccatgttgcccagtcggtcttgaactcctgggctcaagcgatccgcccacctaggcctcccaaagtgttgggactacaggcgtgagccatcacgccccgcctgtcattctttaggttttaaatgttatctcctcagaagccttccttcaccgtccaatctaaaaaaagacacacacacagacacacattatccttcttcacagcacttgccagtctacatctactttatatgttcatttattgccttatgcaccagagagaaccgttcgggggctagaagccaagtcttcacgttttctgctgattttccgaacacctaccgccgtgtctagcacaaagtaagacctcaatctgctgaatcaatagattaattttttcaaccccaatatgccaatgttactaatacttctacagagaaaggacccacccaaatccccaaccgccaaggaacccgtccgtgctgctgaggcaggagaaagacaagtgctcttcaaacgccctcactcacggctccacccaggatgtgtcacgtgaccagcgacaccgtccctcaaacctggagtaccccacacacttcccctcgcatccaaggtcctccgcggggatcagtgtcacctccttccctccctgctggagctccactctgcctccccgcctcaccccgctctgactactgcgtcccattaccggctgtccgggtcctcagcgccaacaccaccgacgccatgctttcgatcactcacttccggtctcgaaaagtttctacttccgctatcaggagatctacttccgggccctgcgtggcagttgaaagagtggcgggagaagttgcaggtgagcgtccccggtcgcaggcctgcggattgggcagggcttccctcctgaacaccgctctgcagaatcttggtggctaaggtgtccaggagcctctgcagcggaccgccagcctgagaggcgcagagcttgtcgggcaggggcccgcttg

SEQ ID NO: 18498 - DNA, 2300 bp, Homo sapien
catggccccaacacattcaatctggaactctaactcctggtaatctaacaggaatcctcctcaaattctttccaggtcaagctgaagtataaacaaagtagagttaccattacaaaattttaatggggggaggtggtaacaagatttaacacctccaaccccttgtttatcttcacgtttgaaatggagatgtcaaaagttcttcttttttttttttgagatggagtctcactctggcacccacgttggagtgcagtggcacaatcttggctcactgcaacctcactcccaggttcaagtgattctcctgcctcagcctagctgggattacaggcgccccaccaccacacctggctaatttttgtatttttagtagagatgcgttttcatcatgttcgccaggctagtcttgaactcctgacctcaagtgatccgcccgccttggcctcccaaagtgctgagattacaggtgtgaaccactgcacctggccaaaaactgttctttttaaaaattgagatataggctgggcatggtagctcatgcgtataatcccagcactttgggaggccaaagcagaaggatcacttgagcccaggagttcgagaacagcctgggcaacatagtgagaactcgtctctacaaaaaaatacaaaaattagctgggtatggtggctcacacctgtagtcccagatactcaggaggctgaggtgggaggattgcttgagcctgggaggtcaaggctgcagtgagctgtgattgtacgactgcactccagcccgggtgacagagtgagaccctgcttcaaaagaaaaataaaataaaaataaaaatagagatataatttgcacagcataatatccttttaaaagtgtacattcagtagattttagtatattcacaatgttgtgcaaccatcatcactattttatcacctcaaaaagaattcctgcagccattaagccgtcactgtcctttccctccctccccagctcctggcaaccataaatctgtctctatgcatttgcctattctggatatttcatataaatagaatcatacactatgtggccttttgtgattgacttttttcactcagcttgttttcaaggtttatctatgatgtagcctgtatcagtagttaattgcttttcatgactgaataatattccactgtatggatatgctacattttgtttatccattcatcacttggacatttaatttgtttcctttttttgcctgttatgaataatgctgctatgaacactgacatacaagtttttgtgggggtatgttttcaaatccctttcgtgtatatacctaggagtagaattgctgggtcatatgcaaagctaatcatttcttgaacatttactaacactgtaggtatgacccagaaggagacatgtaacctgcctaggcctcagtttcttccttagtaaaacagggatggtaacagcacccattttataaggtagtgagaattaaataaaataatgcatccaccgcgcttagtacagcatctggcacacagctggctaagtagagtaagttgaatgactagggagggggcctcatctctgacccttcgctgggcctccgttgacatctgcaaatcaggggagtgggacaagcgggcccctgcccgacaagctctgcgcctctcaggctggcggtccgctgcagaggctcctggacaccttagccaccaagattctgcagagcggtgttcaggagggaagccctgcccaatccgcaggcctgcgaccggggacgctcacctgcaacttctcccgccactctttcaactgccacgcagggcccggaagtagatctcctgatagcggaagtagaaacttttcgagaccggaagtgagtgatcgaaagcatggcgtcggtggtgttggcgctgaggacccggacagccggtaatgggacgcagtagtcagagcggggtgaggcggggaggcagagtggagctccagcagggagggaaggaggtgacactgatccccgcggaggaccttggatgcgaggggaagtgtgtggggtactccaggtttgagggacggtgtcgctggtcacgtgacacatcctgggtggagccgtgagtgagggcgtttgaagagcacttgtctttctcctgcctcagcagcacggacgggttccttggcggttggggatttgggtgggtcctttctctgtagaagtattagtaacattggcatattggggttgaaaaaattaatctattgattcagcagattgaggtcttactttgtgctagacacggcggta

SEQ ID NO: 18499 - DNA, 2300 bp, Homo sapien
agatggttccttcttcagaaaggcaaatgttggcaactcctcagagtcactatcaccagaatccagtgagggtgatgacttctttagagccatcagtatgtgctatcaaataattccctaaaaggaaaagagacatatgacacagactggagcattcaattcagtccactagctgtgttccatagccaggctttatgacataaatataagatatagagaatacagaaacagagaaatatgacatggccccaacacattcaatctggaactctaactcctggtaatctaacaggaatcctcctcaaattctttccaggtcaagctgaagtataaacaaagtagagttaccattacaaaattttaatggggggaggtggtaacaagatttaacacctccaaccccttgtttatcttcacgtttgaaatggagatgtcaaaagttcttcttttttttttttgagatggagtctcactctggcacccacgttggagtgcagtggcacaatcttggctcactgcaacctcactcccaggttcaagtgattctcctgcctcagcctagctgggattacaggcgccccaccaccacacctggctaatttttgtatttttagtagagatgcgttttcatcatgttcgccaggctagtcttgaactcctgacctcaagtgatccgcccgccttggcctcccaaagtgctgagattacaggtgtgaaccactgcacctggccaaaaactgttctttttaaaaattgagatataggctgggcatggtagctcatgcgtataatcccagcactttgggaggccaaagcagaaggatcacttgagcccaggagttcgagaacagcctgggcaacatagtgagaactcgtctctacaaaaaaatacaaaaattagctgggtatggtggctcacacctgtagtcccagatactcaggaggctgaggtgggaggattgcttgagcctgggaggtcaaggctgcagtgagctgtgattgtacgactgcactccagcccgggtgacagagtgagaccctgcttcaaaagaaaaataaaataaaaataaaaatagagatataatttgcacagcataatatccttttaaaagtgtacattcagtagattttagtatattcacaatgttgtgcaaccatcatcactattttatcacctcaaaaagaattcctgcagccattaagccgtcactgtcctttccctccctccccagctcctggcaaccataaatctgtctctatgcatttgcctattctggatatttcatataaatagaatcatacactatgtggccttttgtgattgacttttttcactcagcttgttttcaaggtttatctatgatgtagcctgtatcagtagttaattgcttttcatgactgaataatattccactgtatggatatgctacattttgtttatccattcatcacttggacatttaatttgtttcctttttttgcctgttatgaataatgctgctatgaacactgacatacaagtttttgtgggggtatgttttcaaatccctttcgtgtatatacctaggagtagaattgctgggtcatatgcaaagctaatcatttcttgaacatttactaacactgtaggtatgacccagaaggagacatgtaacctgcctaggcctcagtttcttccttagtaaaacagggatggtaacagcacccattttataaggtagtgagaattaaataaaataatgcatccaccgcgcttagtacagcatctggcacacagctggctaagtagagtaagttgaatgactagggagggggcctcatctctgacccttcgctgggcctccgttgacatctgcaaatcaggggagtgggacaagcgggcccctgcccgacaagctctgcgcctctcaggctggcggtccgctgcagaggctcctggacaccttagccaccaagattctgcagagcggtgttcaggagggaagccctgcccaatccgcaggcctgcgaccggggacgctcacctgcaacttctcccgccactctttcaactgccacgcagggcccggaagtagatctcctgatagcggaagtagaaacttttcgagaccggaagtgagtgatcgaaagcatggcgtcggtggtgttggcgctgaggacccggacagccggtaatgggacgcagtagtcagagcggggtgaggcggggaggcagagtggagctccagcagggagggaaggaggtgacactgatccccgcggaggaccttggatgcgaggggaagtgtgtggggtactcc

SEQ ID NO: 18500 - DNA, 2300 bp, Homo sapien
actctgcctccccgcctcaccccgctctgactactgcgtcccattaccggctgtccgggtcctcagcgccaacaccaccgacgccatgctttcgatcactcacttccggtctcgaaaagtttctacttccgctatcaggagatctacttccgggccctgcgtggcagttgaaagagtggcgggagaagttgcaggtgagcgtccccggtcgcaggcctgcggattgggcagggcttccctcctgaacaccgctctgcagaatcttggtggctaaggtgtccaggagcctctgcagcggaccgccagcctgagaggcgcagagcttgtcgggcaggggcccgcttgtcccactcccctgatttgcagatgtcaacggaggcccagcgaagggtcagagatgaggccccctccctagtcattcaacttactctacttagccagctgtgtgccagatgctgtactaagcgcggtggatgcattattttatttaattctcactaccttataaaatgggtgctgttaccatccctgttttactaaggaagaaactgaggcctaggcaggttacatgtctccttctgggtcatacctacagtgttagtaaatgttcaagaaatgattagctttgcatatgacccagcaattctactcctaggtatatacacgaaagggatttgaaaacatacccccacaaaaacttgtatgtcagtgttcatagcagcattattcataacaggcaaaaaaaggaaacaaattaaatgtccaagtgatgaatggataaacaaaatgtagcatatccatacagtggaatattattcagtcatgaaaagcaattaactactgatacaggctacatcatagataaaccttgaaaacaagctgagtgaaaaaagtcaatcacaaaaggccacatagtgtatgattctatttatatgaaatatccagaataggcaaatgcatagagacagatttatggttgccaggagctggggagggagggaaaggacagtgacggcttaatggctgcaggaattctttttgaggtgataaaatagtgatgatggttgcacaacattgtgaatatactaaaatctactgaatgtacacttttaaaaggatattatgctgtgcaaattatatctctatttttatttttattttatttttcttttgaagcagggtctcactctgtcacccgggctggagtgcagtcgtacaatcacagctcactgcagccttgacctcccaggctcaagcaatcctcccacctcagcctcctgagtatctgggactacaggtgtgagccaccatacccagctaatttttgtatttttttgtagagacgagttctcactatgttgcccaggctgttctcgaactcctgggctcaagtgatccttctgctttggcctcccaaagtgctgggattatacgcatgagctaccatgcccagcctatatctcaatttttaaaaagaacagtttttggccaggtgcagtggttcacacctgtaatctcagcactttgggaggccaaggcgggcggatcacttgaggtcaggagttcaagactagcctggcgaacatgatgaaaacgcatctctactaaaaatacaaaaattagccaggtgtggtggtggggcgcctgtaatcccagctaggctgaggcaggagaatcacttgaacctgggagtgaggttgcagtgagccaagattgtgccactgcactccaacgtgggtgccagagtgagactccatctcaaaaaaaaaaaagaagaacttttgacatctccatttcaaacgtgaagataaacaaggggttggaggtgttaaatcttgttaccacctccccccattaaaattttgtaatggtaactctactttgtttatacttcagcttgacctggaaagaatttgaggaggattcctgttagattaccaggagttagagttccagattgaatgtgttggggccatgtcatatttctctgtttctgtattctctatatcttatatttatgtcataaagcctggctatggaacacagctagtggactgaattgaatgctccagtctgtgtcatatgtctcttttccttttagggaattatttgatagcacatactgatggctctaaagaagtcatcaccctcactggattctggtgatagtgactctgaggagttgccaacatttgcctttctgaagaaggaaccatcttcaacaaagaggagacagcctgaaagggaagagaagattgtagtggttgacatctcagattgtgaagcctcctgtcctccag

SEQ ID NO: 18501 - DNA, 2300 bp, Homo sapien
tcatttacttgtactaacctttggaagagtttcccttccctccattcccgtattcaaaatggccccagcccctttcaacttgctatgttccttttttctctctttttttttttttgagacagagtttcaccctgctgcccaggctagaatgcaatggcatggtctcggctcactgcagcttctgccttctgggttcaagtgattcttctgcctcagcctcccaagtagctgggattacaggcgtgtaccaccacgcccagctaatatttttgtatttttagtagagacggggtttcaccatgttggccaggctggtctcgaactcctgacctcaggtgatccgcccgcctaggcctcccaaagtgctgggattgggattacaggtgtgagccaccgtgcctggcctgctatgttcctttttttttttttgatggagtctagccccgttgccaggttggggtgcagtgttatgatctcggctcactgcaacctccacctcccagtttcaagcaattctcctgcctcagtctcccgagtagctgggattacaggcacgtaccgccacacccagctaatttttgtatttttaatagagatggggttttaccgtgttggccaggatgggcttgatctccgacctcgtgatctgcccacctcggcctcccaaagtgctgggattacaggcgtgagtcaccgcgcccggctgctatgttcctttcttattcactgtctctgagatgcagggcaccaagactgaatcattgagggctgggagggacagcgacactgtttcttgccacagtgacttcattccagaaaggataatgcataaggggtgggagttagttcattcacccagaagacctgggccactctcacaggtgctcaatacctgctgacctccctccctgtgctgtgttctgggtactttggcaggacagagaggactgggtggaggagccaacagtactggtgttgctccgggcagaggcatttgtgtccatgatcgacaatggaaagcaggtgggcagagccagagggtgggaggacacggaacagagggctgactcttactaggaagcaagtattaatgcagtttctgccccttcatgcagggaagcctggacagcactatgaaagggaaggaaacgcttcagggctttgtaactgacatcacagcaaagacagcagggaaagctctgtcactggtgattgtggatcaggagaaatgcttcaggtttggatttgccctggtgatttcatgttaaaaggggcagctcttgggccaaggggggtgagtttagtttattcattgcagatgtaggtcactctgcaaggtagtccatctctaacaagtccagggggatgctctggtccagtcttcttctgtatcttctgcctgacttcagcctggagctgctgttctttgatttcctcccctgcaccagtgctcagaatcctccaagaagagggaaacagggagcaaataaacagaccaagaagcagcagcagagacaaccagaggccagcatagggtccatggtatccagggtagacgctgaagaggtaagaacgtcctgttgcctgaatcgggctgggtactcactggtcacctgagacttgctattgatagagaataaaatgcctgctgcgtactgttttctgccttggcactgactaagagaaggtaccaaacaggaagccaaggggctggggtgtggctttagtggacagtgacttggcagctagtctcttcctacccttccagtccatcgttgcttttgggtttctaggcattggtggatctgcagctacacacagaagcccaggctcaaattgtgcagagctggaaagagctggccgacttcacatgcgcattcacaaaggctgtggctgaggcgcccttcaagtgagtaaccccagcaagtccagcctccatgctgggcctgtcctttaccatggctcttgcagtcaaagcaaatgtccctttcccctcatctctgcagtcagcccattgtctctcaagcttgaggcagaaggagctgacctcacactggggattcttgggaagagtcctcaagcctagcgccttttcaaatattctcctttcgcctatatgtaagtatgtgttctgcaggctgatatcataggccaggttaccataggccaagttaccaggattaattacaggtcagatcacaatgtaataagcactaggaaagcaaatttttggcctactcagttcaagaagtgttcactgtcagaatttaaaataagtaaatgacctcagagacaatcca

SEQ ID NO: 18502 - DNA, 2300 bp, Homo sapien
ggagcaaataaacagaccaagaagcagcagcagagacaaccagaggccagcatagggtccatggtatccagggtagacgctgaagaggtaagaacgtcctgttgcctgaatcgggctgggtactcactggtcacctgagacttgctattgatagagaataaaatgcctgctgcgtactgttttctgccttggcactgactaagagaaggtaccaaacaggaagccaaggggctggggtgtggctttagtggacagtgacttggcagctagtctcttcctacccttccagtccatcgttgcttttgggtttctaggcattggtggatctgcagctacacacagaagcccaggctcaaattgtgcagagctggaaagagctggccgacttcacatgcgcattcacaaaggctgtggctgaggcgcccttcaagtgagtaaccccagcaagtccagcctccatgctgggcctgtcctttaccatggctcttgcagtcaaagcaaatgtccctttcccctcatctctgcagtcagcccattgtctctcaagcttgaggcagaaggagctgacctcacactggggattcttgggaagagtcctcaagcctagcgccttttcaaatattctcctttcgcctatatgtaagtatgtgttctgcaggctgatatcataggccaggttaccataggccaagttaccaggattaattacaggtcagatcacaatgtaataagcactaggaaagcaaatttttggcctactcagttcaagaagtgttcactgtcagaatttaaaataagtaaatgacctcagagacaatccagtccaagtcccttattttatacttgaggggactgaggcctgaagagattgacttgtctaagctcctagcagttagaagaaccagaaatagattgcagattgccagatatccaaagaatctggtatcttttcttctactataatggactagatgtagtttttaaatgaatcagcaactggccctatacctggcaacaaagtgagcactcaaattgtcaaaggcacaaaaaggccagatgtaacatggcgcccacctcttccaaggtcagtgggggggttttcagttgccacttgaggggaacaggtgtagaagagtaatgagcaacttacagctctccaaccacgctgttgcaggaagctccgagatgaaactaccttctccttctgtctggagagtgactgggctggaggggtgaaggtggaccttgctggcaggggactcgcactagtctggaggagacagattcagcagctgaaccgagtcagcctggaaatggccagtgcagttgtgaatgcctatccctccccacagctcctggtacaggtatgctgctccagggctcaggggtcactgcccattgcctgcgggctcagtgggcccccagatttccatggacaactgttgagggcccacaaaggcctcacaggtcagcagtgcaggtctactaagatcagtgttgctaatgctgacccagggagggaggacaggttctcatgccccaagccaagcgtagcaccctccatgctcatggagaagggatcaccatggatggtaccatattaagaggtcatctaccacttccaggcttatcagcagtgtttttcggataaagaacgccagaatttgctcgcagacatacaggtgcgccgtggggaaggtgtgacatccacttctcgccgcattggaccagaactatccaggcgtatctaccttcagatgaccactttacagccacatctctctttagatagtgctgactgattctagccctcagggatgaggatgaaaagctggaaacttccacttccccaacctcagagcctgactgtaatgaagagactggcagcacctcctggaacacaagcctaggtgaggcccagtctttcttgggtcttattatttgtgaaggtctctctgcctgtcggctggggcagagactgaaatactgccacctacctttggcatttaatgttcctctcctggcaaaaattcactgccacagacaaaccacccccactcctacccagccagccctcaaaacacaaaggaacaaagacagtccactcagacacttatttaataactgtagaaatccaaaagaattagcatcaaatcttgaagtcgtgagtgaagctgcgggttggcttgactgggctcagccactgagctgcctcaaccggccaaggaacgggattatgatgactatgcggacttctatattgtcttcatctcattgtgtgtattatgtatttagtttca

SEQ ID NO: 18503 - DNA, 2300 bp, Homo sapien
atccacctttaaacatggggcttgcaacttagctcgcacctgatcaatcaggtagtaaagagagctcactgaaatgctaattaagcaaaaacaggaggtaaagaaatagccaatcatctatcgcctgagagcacaggaggagggacaatgatcgggatataaacccaggcattcgagccggcaacagcaaccccctttgggtcccctgccattttatgggagctctgttttcactctattaaatcttgcaactgcacacttttctggtccgtgtttgttacggcttgagctgagcttttccttaccgtccactactgctgtttgctgctgtcgcagacccgctgctgacttccacccctctggatctggcagggtgtctgctgggctcccgatccagtgaggcgcccattgctgctctggatcaggctaaaggcttgccattgttcctgcgtggctaagtgcctggatttgtcctaattgagctgaatagagctataacactcattgcatggcccaagattccattccttggaatgcgtgaggccaagaaacccaggtcagagaacaagaggcttgccgccatcttggaagtggcccgccaccatcttgggagttctaagaacaaggacccctgccacccaccccccgtaacaattgcacttactttatttggtgttcatagtttccctctgagacaagattttttattttttatttttttagagatggggtcttgctatgttgcccagactggttttgaactcctagcctcaaataatcctctcatcttggcctcccaagtattgggattacaggtgtgagctatcctgctcggcccctctgagataagctttaatatccctatttcaaaatgagtaaactgaggtttggagtgggtaaagtgcttccttccttcattcattcattcattcatccatccatctattcatttattcaacagacatctgaatgagtagctaccctgcatcagggtatgccaactctgggcatacgaagatgattaagacaaaaatccctgtcctcacagtccagaatgaaggacagacacataaagatgagtataatacaaggtggatcatgaattgtagctaatatttattgggtacttactaagtgccagtgactgctgtaagctcttggtgtgttttactccttcagttctccccaacctctgttagctacatgtctcatagattgattcatagataagactgaagcctggtgattgtctacggttttataagtagcaagtggcagagccaggatgaatacccagtggataggtattagtgccagaggtcccacttggccatcaagctctactgtctctgatgataaagtagcaaacagggacctaagttggttggggggggcgctaactcagtctggcattcacggtgttcaggggagatttcctgaaggactaaggaattagctagacagaggtgagtgggggggagggagggccatcgctggggagggccagacgtgggagccacctcctggaaatctacacagcatctaggccaggcagggactggagcgtgtgaggaagctgcgaaagcaggcaggacccagcttccaaaggaaagtggtccgtatcctagaggtagctgcaagtttgaagggttttacgtaggggagagacttggccagatttttagaaagatcaccggggagctgggtgaaagtggatggaaggacagagacaagcactgaggcagtgagtggggaggagagaggagaaattcaggaagaagagttttccccatgatggttattcgggggttaagtagaggacagggagcagttttagaggacacccagcttctgctcctaatcagggggattggggtgatctgatgaggtcagtattggatgtcaacccagtcttctggcgcccagtccgtgccctttcgcctcgtggcactgccagcaataatgcccgcgggccacgggtgaacgtgaaccgagctcgcagcctccaaccccacccctccggcggcggcgacgtgcagtgcatcaccctgggcaccagggggcgtgcccgcacacgctcgggccgctctggcccagcccatctcagtggtcgcggaaggtgacgtggacacggaagtggtcgtcgtcgcggcaccggtgggagctaggcgcgaggctcggagtgcggccagcgggcggaggcggtctcgcatcggcggcgacggagggctcaggcgtcgtcgtttgggtggggggccgctgaactgacaagcgacatttcagctcctttcacccgccgg

SEQ ID NO: 18504 - DNA, 2300 bp, Homo sapien
ctcctccccatccacagaaccagtgcctaccagggctttgcacaaataaaacaattctccctcctaaaaaaggtttgcaattcctacacagaggaaggtcttagagtgaagacacaagaggaaggagaggatggaaaaagaaacaatcactgaaaactggccgactaccagttctgtgccacctactcaattcttacccagccctctgcgtgaagttggtattattatccccatttgacagataacgaggctggagaggccccgtgacttgcccaaagccacaaagagactactggcagagctttggcctatgtttaagaagctgaacctctttgggattcagtttcttcatccataaaaacaaagacacattccaagccatgcctgttccttgcagggtgtttgtgagggtcagagaaaatgtccttgaagagcctggcatgtacaagataccctgaaactgatggctatgatgccacggcctgtgcacctaggaagagtcaggaaagcccagtgtcttgaaaagccgaggctggagcaaagttcaaggaggaactcacttctctcccactctaggactgaccctcaaactagccagaagagtggaaggacctacaagatcagtacccaccccacacttcataggccaagagagggacagtggtttacccagggtcacccagcatgctagaggctaagcctgccagccacggctgggaacccagacttgtgaatgccccagccctccacattccctggtccgctatcaaagacagttagtctaattaggaaagcacacccttgcaggcccagcctccggtgatctctttgttcctctgtctcttcctgccccaaccccacagaaactgaagtgtggggaccctccctaggaaccggggttccagggaggatttgaggtcacgctcaagatcataaagaggcccagcatggactccttctcatgacccaagtggagccagagttcccagataagggcaaaggtcacctcaggccaggctccactctcagccaccccttctgcctggcagggtttacttcatctcctccagtcaggagaggggaggtcacactgccagggcctttgccccattcttctccagctccttctctagaggaagagtcatggctaggccgaggcagtgtggacctggaacaggtataaactgtgctactctttggtgcccagtgccacttttcctagccaggaccagagctatcaccttctctgtcccgcagctctgcccaggtcttagtaccccactcacccctgggcctcaggaaccctaaggaggggcatagggttgctttccattcacacctggggcagcacagggaactgtgccacaggccccaagacaggcagatggaggatgaaatacacaggtcccagtccctgaggccaccttacgtgtccggcccccaaccctgtgcagaaggtcaaggcagaggcgccgaggagggatgggaggatgcctcctgtgagatggggtacaactggtgttccttctgaagctgacatctggcctcagctgggactctggcgccagcgggcccgcagggggctcacccgcgacaccctttgttctggctgcctccccaaccccgcggggccctctgctccagctggcatgcctcaaggacgcttcgcgcctgctcctttggcccccggctcgcaagtagcggggccagcacgtgacccgagggggcaggggatggatggatcttgaccttgccatctggcccctcacggatgtgctgctggctctccctctaggaaatcaacaaatttttgcgcttctaacatccaggcccctgaggatggtcgcgaggaagatctgtttcggactgcagctggggccttcggatccagaggaaaccagggctattcttcgagggtgggagggggagggccgcggggtcggaggggaaggtggccccgcgcgaagtcgccgccgccgcgccccgccccgccccgccggcggagaccgaatccgccgcaccccataggcagaggccaccctccccgcctccccgcccgctgcgcgcccgccccgccccggctcactttaaaagtttactcgggccgggacgcagggcaaagcgagccatggctgtctacgtcgggatgctgcgcctggggaggctgtgcgccgggagctcgggggtgctgggggcccgggccgccctctctcggagttggcaggaagccaggttgcagggtgtccgcttcctcaggtactggccccccgcgggaagagagggggcggggcagttccccg

SEQ ID NO: 18505 - DNA, 2300 bp, Homo sapien
gtcacgggactgttctctgtggttccataagcaacctagagggtccagaaagggtgtttgaagagggctcagcacgtgcagagggatcaggtgagctatctgaggaaatgggaaggaattcataaaagaaaagggaaagtggagggcagccgaatggtggaaacagagacatcattggtaggggcctggggtcaggaggcagaggtgctgggagtgagcagactagatctctgcagggccccagatctgaaagaaaattgagagcagggacaccattctcttccagctggagctctctcagtgccccgtttccctggagcagccacctgtctgtgcctgtggctccggtattaccaacaccccacacttctccccccatcccctggctgccttaaccccaccttcctgatttcaggccacatccccggctcctcccttccaagctgaaggccccataaacttgatgagaaagccagcctgccttggcccagctaggagtggcacagacacaaccccacccccgcattctgcaaaccctgaacaagtgcctggccttggggcaggcgtcccccaagctctggagagtttcccgtgaatttatttccatcaaaataaaaaaacaacctaagcagtgattttaaaaaccagtggtacccccaccccacctcccccatttccagtggttggaaagcctgagcaacagaaaaaccagaagccagccttggagaagcctaaataccatcaaggaatggtctaggccaagtatgaccctcctatcctagaggcaaggggcagagaggtttgggaaaagggcaggccctggaaaccaggccccaacacgagggtactgggtaagggaagagaggctagttaccccgtatcctaggtcccctttaatcaacggataccagatctcatccatcctcctccctgcaccaagcttcccccatatcagctgctctggctctggcacggctggggtttggttcaatgtgggttctggtttctccttccacccctcatcacagacaatatcctgtgccaggcagcttggagctcaccctgaggccagagctgtgaccctgcctgctcaccctcccctttccacaggaatccggacatcgtggctggcaagtgggcacacagaaatctggcgggctggggcgggactgcccacagaacttagggtctggcagccagagccgtccagggctggtccctcgacctgccccaccccctcccgcacccctcctcacagtcctggggccaccgcccgaatgtggcatctgccaagtacacctcggcgccactcagccgccaccctgagacccctcaggggcgggtcctgaccactagggttggggatgagggatggagatatttcggggcgatgaaggaggggggatggtgcgactgtgcttgtggcctgtggtttccaggtgtgtttgccattcctgtgggccactctcccccacttcccacttctctgcttagccttcagcggtggaaaaaggggatgagggcgccggcgacagaaacgcaagcggggttggaagagaggggtgggggcgcgcccgagggtggggaaggagctcgggtctacccagggccagcttcggcgcgtcgagtctgaagtgggagaccgacgccggggcggctctcacgctcggcaggcgccgcacaagcgcccctttaaagcgcaggcagctggcccaccgcagggagacgcatccagctgtccggccccgcttcctcccgcctcgcatccagggcacccggccgagcgtgtgtggatggcgcggcgtggaggctcaaacctgagcaaacaaataagttgagggaacgcctccctctctccgatgtaaactcggggctccagacataactattcccccttcccagaaaagccccgggaaaggcggtaggcagaggagcaccataggagagcggggggctacagccggggctcagggctcggggctcgggggccacggtcccaccccctcatgcacggtagccggctgggggaacggccccgcccccttccccgtggagggcgggggcgcatctctgggcgcgagcgagttaagcccagtggcctcgatgctccacgtaggagctggctcggctgccggctgcggtcagggccaccgtataaagagggcggcagacccgagcgcctaggactcgccgctgcccgcgccccgccgccgctgctgcccccagccccggccccaggcgtcccagccatggtccgcccaatgctcttgctcagcctcggcctcctggctggtctgctg

SEQ ID NO: 18506 - DNA, 2300 bp, Homo sapien
aagtgacatgcaacgtgtttattacctataggtaggcactaagggacaacagaaggctgggattcatttggagctggacccctacggctcaggaaagctgctgaggcagctgggggatggaccgttgtctgtgcatgcctgacttttttttttgttgttggtttgttgtgagatggagtctcgctctttcacccgggctggagtgcagtggtgtgaaccctgggattcaagcaattttcctgcctcagcctccctggtagctgggattacaggcgtgcactaccacgtccagctattttttttttttttagtagaaacagtttcgccatgttggccaggctggtcttgaacttctgacctcaggtgatccacccgcctcggcctcccaaagtgttgtgataacaggcatgggccaccacgcccagccagccagacttgtactgaagctgagggaccccagaaaccagcccgccctgtttttcgtttgtttgtttgtttgtttgatacagagtctcactctgtctcccaggctggagtgcagtgtcgccatctgggctcactgcaacttccgcctcccaggttcaagcaattctcctgcctcagcctcccgggtagctgggactactggcacgcaccaccacacctggctagttttttgtatttttagtaaaaacggggtttcaccgtgttagccaggatggtctcaatctcctgaccttatgatccgcccgcatcggcctcccaaagtgctgggattacaggagtaagccaccgcgcccggcttctgccctgggctttataccctggggccatgtgacatgttgggctgaagtgttgaaggacatgctttttctagggggactggaacagagcatggctgtgctggccagtccttccttccctcaggatgttgcattctctgcacactctacagttttatttatttatttattgagacagtcttgctccatcacccaggctggagtgcagtggcactgtctcagctcactgcaacctccgcctcccaggttcgagggattctccctgctcagcctcccgtgtagctgggattacaggtgcccaccaccacgcttggataatttttgtatttttggtaaagacggggtttcagcatgttggctaggctggtcttgaacttctgatctcaagtgatctgcccgcctcggcctcccaaagtgctgggattacaggcgtctacagttattcttgagaactacaagcaagaaaggaggggagaaccaggtcagttcaaggccactgggagaactgtcctgcaccgcctgcctctgaagcccatgatgtttctgctttgtgggacagttgttcaggtgcctgcttccccaggccttcccctgcgccttccccctctctcctacacacaccatctgactgtccttccagcacgtacacctccagatgcttgggttggcctgacccaaaacagtctactctcccggccaagccaattgcccctgggattttctgctcctccaagatcccgtgcatagccctggtggtggctcatgcccttaatccttagttactctagatgctgaggcaggaggatcgcttgaggccgaggagttcaagacctcccctctcccaaatatttgtaaatgaaattaaaagaaagatccagcccaagtgtctcttctgccctactgactcccacactcttaaaacagatgacctcacagcactgaggcggacggctctggtgtccagcaggcacggaattaatacgccttgcctgtcctggccggttggcttgcctctctcctgccagaatgcaacctggctttatgcacctagatgtccccagcgcccagttctgagccaggcacatcaaatgtcaaggaattgactgaacaaactaagagctcctggatgggtccgggaactcgcccgggcacaaggtgccaaaaggcaagcagcccgcctcgcggcctggggaaagaaccgacaggaggccgcagtgagcgcccgggcgcccggcaggtggcgccgcagccccgggcccgggccctcttgtcgcgcggtcacgcagcccctcttccttccgccggctgcgcactcacagtgatccctgcgcgcgtctcctgctcgggtcagtgcgccgcgctgcgctgggcgccatggcgctccccggagcccgggctcgcggctgggcggcagcagccagagcggcccagaggcgccgccgcgtggagaacgcaggagggtccccgagtcctgagcctgcgggccggcgcgcggcgctttacgtacacgtgagtagg

SEQ ID NO: 18507 - DNA, 2300 bp, Homo sapien
gaagtgttgaaggacatgctttttctagggggactggaacagagcatggctgtgctggccagtccttccttccctcaggatgttgcattctctgcacactctacagttttatttatttatttattgagacagtcttgctccatcacccaggctggagtgcagtggcactgtctcagctcactgcaacctccgcctcccaggttcgagggattctccctgctcagcctcccgtgtagctgggattacaggtgcccaccaccacgcttggataatttttgtatttttggtaaagacggggtttcagcatgttggctaggctggtcttgaacttctgatctcaagtgatctgcccgcctcggcctcccaaagtgctgggattacaggcgtctacagttattcttgagaactacaagcaagaaaggaggggagaaccaggtcagttcaaggccactgggagaactgtcctgcaccgcctgcctctgaagcccatgatgtttctgctttgtgggacagttgttcaggtgcctgcttccccaggccttcccctgcgccttccccctctctcctacacacaccatctgactgtccttccagcacgtacacctccagatgcttgggttggcctgacccaaaacagtctactctcccggccaagccaattgcccctgggattttctgctcctccaagatcccgtgcatagccctggtggtggctcatgcccttaatccttagttactctagatgctgaggcaggaggatcgcttgaggccgaggagttcaagacctcccctctcccaaatatttgtaaatgaaattaaaagaaagatccagcccaagtgtctcttctgccctactgactcccacactcttaaaacagatgacctcacagcactgaggcggacggctctggtgtccagcaggcacggaattaatacgccttgcctgtcctggccggttggcttgcctctctcctgccagaatgcaacctggctttatgcacctagatgtccccagcgcccagttctgagccaggcacatcaaatgtcaaggaattgactgaacaaactaagagctcctggatgggtccgggaactcgcccgggcacaaggtgccaaaaggcaagcagcccgcctcgcggcctggggaaagaaccgacaggaggccgcagtgagcgcccgggcgcccggcaggtggcgccgcagccccgggcccgggccctcttgtcgcgcggtcacgcagcccctcttccttccgccggctgcgcactcacagtgatccctgcgcgcgtctcctgctcgggtcagtgcgccgcgctgcgctgggcgccatggcgctccccggagcccgggctcgcggctgggcggcagcagccagagcggcccagaggcgccgccgcgtggagaacgcaggagggtccccgagtcctgagcctgcgggccggcgcgcggcgctttacgtacacgtgagtaggggcgggggcggagcccacggtgtgtggccgcagccctggccgtgaccgtggccgtccaaaacccaggtggcggtttgtcactctatgaacccgcctgccgtgtttccgtgcccccgtacgaggtctgggatgggaccctgtgctttggcagggaaatgacttggtccagaaacctgaagtctctgctactcaccggctcggtgactctgaccaaatggttcaaatttcataacaattttcctcttagcaagacaaaattttcttaagagcagtgttctgactcggtagctgggaaaatggctcataggaaaattgtatgaaaattatatgatcccagaaagagcttgggttgaattccttcctgacgtctgctggttggaagaggcagcgtaacaaaggagtgagcctcagttttctcacattgaagtggatgtaataaccccagtgcgacctgccttggggagttgtgtggcttagatgtcctagctactgtggaaagacctcgggataggggtgggggtggggttgggggtgtgtgcgactgaaccctggaagtggccagggcagctctcaccgcgcacgtgcactcactgcccccagtggccttactgcgagaagcgctgcagttactgcaacttcaacaagtacatccctcgccgcctggaggaggctgccatgcagaagtgtctggtgaccgaagctcagacgctgctgcggctcagcggggtgcaacggtgggtagtgggggctgtaggcagcgttttgggaaatatttggaggagtggtgggggataggtgcaggcatcccagagggctcccccaggtctc

SEQ ID NO: 18508 - DNA, 2300 bp, Homo sapien
aatgtattatgtaatggtgttgtgtcagtgttgcatttcctgaactctgtaattggattgcagttatgtaagagaatgtccttgttctttaggaaatacacacctaagtatttagaggttagggagtataatatctataactgctattcaatatagtggccactagccacagactagtgagcatttgaaatgtggtaagttaagtttaattcacttaaatttaaataaccacatgtggctactacctatcatattggacagtacagatatgaacatttccaccattgtagaaagttcttttggacagtgctggtttataatttactgttaaatgattcagcataataacaggtatgtatgtttaaagagaaacaaatatggacaaatggtgaatcaagatgaaggttttttttgtgattttctttcaacttttctataggttagaattatttaaaattgaaaagtaaagtaaataaagacttgattttggagtcagacagtcctaaattccaggtcgaactttgcaactgtatggcctggacaagttacttaacacctctgaacctcagttttctcatctgtaaaatagaactaatattggagggttacaaagattaaattagacactacataaaggtgcttggcacatagcgacccttctgtgaatggcagctcttggtgccagcttgaccttccccctcctgccttccagctgcctgccacgtgctgcgttctccctgtatctgtgtctacaatggggaggagggttcttgtctctctctgagctgctggtatgcttacacccaccctcttttcccagtccctagatgacactgagctccggctgttgggacggacgcactcggcctgcgatgctctgcggacgctggcagaggcccggcgcctctttcccgggcgcgtgtctgtagacttgatgctggggctgccggcacagcaggtggggccgtggcttgggcagctgcaggaactgctgcaccactgtgatgaccacctctccctctaccagctgtccctggagcggggcaccgcactcttcgcccaggtgcagcggggtgcccttccagcccctgacccggagctcgcagctgagatgtaccagaggggccgggctgtccttcgggaggctggcttccaccagtatgaggtctccaactttgcccggaatgtaagttctggggctgatggctggaggtggaggatgggcagactgcagtgtgaccagggcgttgtgaccttctgaagagaaggatcctggccgagatggtgggacattctaacctggggccccttacctgagtctaaaaatgaggcctgccctcttcactctgcactatttcctccctccccgcagggggcgctcagtacccacaattggacttactggcagtgtggtcagtaccttggcgttgggcctggtgagtcccgtgaactacagaaagggtgactcaggagaggaatgtcgtggctgtgtgaacttgggccacattaacctctccaagcctctattttctcatatgtaaaatgtggcaaaaaataatacctccctatagaactgttgagcatgaattataaggggcttaatgttgcaccttgcactagggttctcagcctttagtgtgtatgagaatctcctggagggcttgttaaaacccaagctgctgggccccaccctcagaattcccaattggacagggctagaggagagcccaagaatttatatgtcttggcattttgggatagatgattaaaaaaaaaagaaaaagaaaaaagggcctggtgtcatgtgcctctaatctgagctacttgggaagctgaggtggaaagatcgtttgaccccaggcgtccaagaccagcctgggcagtatagtgagacaccacctcaaaaaaaaaaaaaaaaaaaagaaagaaagaaagaaagaaaagaaaagaaaaataatttatatttccagtatgttagaggcagttgctccagggaccacatgatttaaatctggtaaacacatagtattaacagccattaatgtggggatggttgttgatgttgtcaggggcccatggacgatttatgccccagggggctggaggccacacccgggaggctcggatccagacactggagcctgacaactggatgaaggaggtgatgctgtttggccatggcacccggaagcgtgtccccctgggcaggctggagctgtgagcatccaagggcacagggctctcctccaggatccccacaccccaagaccatgtctatttgtatatcttttatttcctgt

SEQ ID NO: 18509 - DNA, 2300 bp, Homo sapien
tcagggattcaccagcactgctggcatcgtctctagctcctccgctgtctggggcagctcttgcaaactcagaaatgtcccaggagacagggttcaaagagccctggccttggactttagaaaaccaggttcaatttgtgcttcccgctagtcaggtgacattacacccttctctctggagctcagtttctccgtttgtaaaatgggcttataatgtgtcccctcccttcaaccccagcatgattttgagaattgactgagaagatactacagtttatggagggcaccctgtttcgtagtttaaatgcacactcaggccaggtgaggtggctcatgcttgtaatcccaacactttgagaggccaaggcgggaggatcgcttaagcccacgagttcaagaccagcctgaacaacatagcaagaccctgtctctacaaaaaatttaataattagctgggtgcagtggcacatgcctgtagtcccagctactcggaaggctaaggcagcaggatcatttaagctcaggagtttgaagctgcagtgagctatgattgtgccactgcactccaacctgggcaacagagtgagatactcgctaagaaaaagaaatacatacatattcatttaaccctggcagtggccttgtgagagcagcattatgacctccattttatgtatgtatatatgtatgtatggatgtatgagatggggatctcactttgttgcccaggctggagtacagtggtgcaatcagagctcactgcagcctggacctcctgggctcaagcaatcttcctgccttagcctccagagtagctaagactacaggtgtgggccaccaaagccagctaattaaaaaaaaatttttttaggctaggcacggtggctcacgcctgtaatcctagcactttgggaggccgaggcgggcagatcacgaggtcaggagttcgagaccagcctgaccaactggtgaaaccccatctctactaaaaatacaaaacttagccaggcatggtggcactcgtctgtaatcccagctactcaggaggctgaggcaggagaatcgcttgaacctgggaggcagaggttgcagtgagccgagatggcaccactacactccagcttgggcacagagcaagactccgtctcaaaaaaaaaaaaaaaaaaatttttttttttttttagaatggagtctccctacgttgctcaggtcaattttgaactcctggcctcaaccaatcctcctgcctcagccttctaaagcactaggattgtaggcctgaaccactgtgcccagcagagaaaaccggctctctaggtcaaggcattggctcaagaacacacagctaacaagccgacatagctgggattagaacccaattgtctggctctagaaccccttcactatttgaggtacaatttactgcctgactactagtgctaaactttgggttgggggcagggcctgaggcagctcctgctctcatacattctgagagccagtttgacaataggcaactacacaaaaaaccgaaataatcccagaatgcctcagggctccaggggaaggcgaaaaaagcgggtgcgtttataaacttaaaataatcagaggcagcatctccaaggactgtgagaatgccccaagtcagggcaaaagttttggctggtttgggaagtgatgaaaggccaaagtggctgcagcgagcgtggacccgggaggtctccaggcgcgttggtgcgagttggggacggcaggcagggacacctaaaacctacggtacgccacgaaggggtttcagcacgtcctgaaaggcccgatccccccccagaaccgctgtgaggggggcagagggaggtccctcgacaggatgtggccttagtcgaggaaggcgggaagcaggggctggcacccccgacgccccacccgccccccgtggcctagcagcagggcggggcgaggcgggtcatgcacccctaccagccagccactcccacccagccctcggctcccgcaactcgcgggggtcctcgcccgggtcccccgccccgccccgcccggctggtgacgtcacggcgctcgtcggcgccgcctgtggcgtcacaggccgggcccgcagggctttctaggggtccgtcgctcttgaagccgccggcggcgggcgcgtgcgcggcccgatgaagaaggaggtttccaagccgtctccgcccaagttgatcggtggatgcgcgcccccgcgcggggcaccggttgctgtggacgcagtggcggccgttggctggcgggtgcggcgcagcctcggt

SEQ ID NO: 18510 - DNA, 2300 bp, Homo sapien
gcatcagaatcacctagggagttgaaaaaagtacagctccctaggccctggctccatgcagtagtcaggaagctgtattcataaaactcccccaaagattctgaggcagacattggactaataacttgggaaccactgatttagtccaactgactctttctacacatggaaagcctgaggcctagagaggttaagtgatgcgtacccaagactgtccagcttataaatagcatagcctgaaatggaacatcttttttgtatattaaaaataatcttttttgtacagatggagtctcaactatgttgcccaggctagtcttgaactcctgggcccaagcaatcctcctgccttggcttctcaaagtgttgggattacaagcttgcaccacggcacccggaatgaaacatctttttgttttgttttgttttgtttttgagacagagtctcactctgttgcccaggttagagtgcagtcacacgatctcagctcactgcaacctctacctcccgggctcaagtgattctcctgcctcagccgcccgagtagctgggactgcaggcatgggccaccacacctggctaatttttgtatttttagtagggacggggtttcaccatgttggccaggttggtcttgaactcctggcctcaagtgatcctcctgtgtcagcctcctaaagtgctgggattacaggcatgagccaccacacctggcctgaaacgaaacatcttctgatctcaattctggctacagaagtcttagtcactgtggtgagccaggggctgtgggtagggggaccctccagagagaactcccattgccccagcaaagtgctacccaggccaccttggcagcctctgctatctatccagctggtcagctctgccccccaccatggagtctagtatatatttttacttttatttttgtatgtatatattgatatatacagaaggagctctttaaggacttaataactttctgcttctcttcagaaaagaagcgggcaaagggacctgaacaacccacacccacaattcaggaagagcctgaacctgttagcaatgtcctacaaggagatgacattcttgccttggccattaagaaggaagacttgaaggaggtgaggatgaagcccaagcttcccttaccatagaaacgtttccctgccggcagcctgagtggtctagaacaccagccatgtccctactcatggggagtgtctaactccatggaaaaacccactgaacacagattcttttcactttaccaccttaaggaattcactgtgttgtctgttttaacatttctgagattcatatagaaccacaggggaaatgagatgatgaggtatcttgcttcccatagaggtaggtgccatcattcccatttcacagaccggaggatgagtttaaggagccaaggtacagctctgggtaaagctgctaaaccctaaccccatgctttacctgggagagtcagccatctctcacccaaactgtctggaggcataagatgttcttttttttccctccaggatattactaagtcacatatctgttacacaggcatttccttgacagaacatatggacagagctgaagaaacagatctgtcagccttcaggaactccacccagaactagaacagaagagatgggtggtgctcttcctcctgccaccacaggtggaattctcctttgttttatttctttttagcaacacattcctcgccttactgaaaaggaagataaacgtgtcatcacccagaaatttatcatccgtaaactcaaacccatggatcctaggaggaaggtctgccaccttgtagcacgtcctgcgaatcctgatgaagccacaaagcctctggactactccggtacacccagtctcagccctggcttcactgtctttcaactcatgggtcagcctcaagagaaacccagtctccatcagaaagttgccctcttgaaagttgtccacccacagcttctttcccctttcttcttttatcctcccaggtcccggtgacagcttcgatggcagtgaccagatcctgccccaccacatcttggggagtctccaggattttaagagaattgcacttgctcgagggaacacccaggtttgtttgcacagaactacccggatgagagcagtcactgaagtcattttggtctcccacctgacacagtcaagcagggctggggttaaagagacagtctagtctgtaggttttgagtctgagttgataagggaccctctcccagaatagttggacacttcaggcagctgaagc

SEQ ID NO: 18511 - DNA, 2300 bp, Homo sapien
aaaaaaagaatcaacttgtctgggcttgtatgatccaaccccattggaggggtcagtcccagagacctttcagtctgtggatacaggaaggaaaattggcctccaggaggccagagtagaactggggctgagcccaggcccaccccaaacggctaaatgggcaccgctccatgggctccctggagttgccccttgaacaacttagctctagtatctccatatgtcaaaggtaccagcgcagggccacctccccagactggtttgaaaagtaaaactgcaaaagcaggtggattgcttgagcccaggagttcgagactagcctgggcaatgtggtgaaaccccatctctacaaaaaatagaaaaaagtagccaggtctggtggtgcacgcctgtagtcccagctacttgggaggctgagatgggagaatcacctgagccagggaagtcaaggctgcagtgagccatgatcacaccactggactccagcctgggtgacagagtgagatcctgtcaaaaaaaaaaaaaatctgcaaaaccaaaaattatttcacaagaactttgaacttgtgaaattctttcacaaacaactggtttctttcccctctccagctattctctcacagcatagttcatatataggtgcttcccacagagtaaactctgcctgtgatgttgtcccgttcttccaggtccgtgggctgctggacaccctggtgactgacctgatggtcctggctgatgagctcagccccataaagaatgtcgaggaggctttgcgcctctgcaggtgactctcgggcccaagcaaccttctggaaaacgggttaataaataaatcaataaagaaccttcaagtttctactacttccgtgtgcctctgtgtcttgcatgatggatcttggctaggtcagctcctgatccaggtcctcccatgttccacctgccctcagatcccctcctgccagctgccagagccctcctgcaggaggacagacagacatagctggggaagtgatgtgtgggatgccaagcagaggagcagattggtagcaagacaaggagtcaggtgacaggacagtgtgtcacctctggtagtccctgcctctggcttccttggcccacactttcagggtcgtgcttcctggagccaggtcttcccgaagtgtcatcaccaagtatgacaaagtgtgagatgaggagtagaactagacccatgggacctggctccctgccatctcccctcttcagctgggtcccagggccccaattcagtccctgaagatcatgctcaccacacctcttcagctctagaggccacatcaccttgttatttcggggtctagtctgccttatccccctcctcatctcaaactatctggccttgagccatctttctgccttaaaaacagctgctgatcttcatgctacctcccttgctcaggggaacatgaaacaggctagaaatggctctcagaaaaaaaggtattgtcagctcaaactcaggcccctcattgtcttctgtcagtcataaccatttggggctgggctccctgtgtgaagagcactccaggctcccagagtttgaagaacaactttggtttttgggtgggtgggcatccttaagtgggcctcaggcatcctccagctgagatgcaggagggggaggatggacagaaggatctgactccgtgtgggaaaggcagggagggggctgtgctggagtcctgatgctctcctccccaagaagacgagaagacgggggctccaccaaagagccagccccagggaatgtccctgccctctcctttaatgtcctcccggcccagaggaggaaggggaggggtgtggtgggggtgttggagcccccctcctttcctgttgaagaggcaggggaagggttaactcaaagcagaggggatcaggtcgccagcactggctccagatgtgcacttcctgggggcggccaacaggcaggccccccacctctcaatgcaccacttgcctggccagcaggaaggggttaacctgccctgcacttcctcctgtgtcctgttactgctgaggcagacctgccgggccagctgagcaactttcctcggagtgctgcctggcgctggctaggaggcaaacgcacgcgggaagagctgctacccattccagggaccctgccgctgcccctctgaggggtctgcacctcctgggagcaggtgggtctctgggacgagggtccatggtggatggctctggagacgctcccgaggctgtgccgtcccgctgctgcacaggtcggagggtcaccg

SEQ ID NO: 18512 - DNA, 2300 bp, Homo sapien
ggccccccaccacagacccctgggccctgaactctccccaccacaaactccccagcactggggctgacccttggggagcctccctggagacctccgacacacctggtaagaagagggccagagagtgtgagtgaggagctgggggacttccaggcagggccaaggggcagcagatactgtttgtgttaggaggacagcttctctggaaaggggtcagaccaacacctgccctttttgtcaacccatctcctcttcctctctctcttccgaggtggtgcctcgacctttgacccatttgccaaacctccagaatccacagagaccaaggaggggctggagcaggccctgccctctgggaagcccagcagccctgtgggtgagcagggcaaggggatggtgaggctctggggaatgaggggcccaccccgagcagcctctgtcctcttcctcccacgtcgggcgccaatccctttccccaccaattagctctagcatttctattccagagctggacctgtttggagaccccagccccagttccaagcaaaatggcacgaaggagccagatgccctggacctgggcatactaggggaagcactaacccagccaagcaaagaggcccgagcttgccggactcccgagtccttcctgggtccctcagcttcctccttggtcaaccttgactcgttggtcaaggcaccccaggttgcaaagacccggaaccccttcctgacaggtaagatatgcccttgtccctcaacccaggggctcctgctttcagagcctagcctccgccggaggagcccactcttcttcccaacttccacgacctcccggtgtagggctctgaaccccgggtcactcaaagccactctcgttctgcaggtctcagcgctccgtcccccaccaacccgttcggcgcgggcgagccgggcaggccgacgctaaaccagatgcgcaccggctcgccggcgctgggcctggcaggcgggcctgtgggggcgcccctgggctccatgacctacagcgcctctctgcccctcccgctcagcagcgtgccagctggcttgaccctccccgcctcggttagcgtcttcccgcaggccggagccttcgcaccgcagccgctgctgcccacgccgagctcagccgggccgcggcccccgcccccgcagaccggcaccaaccccttcctctgagccccgccccgtcccataccggcctgcgcctgcgccggacgctccgcggccccgcctccggacccggggctgggcggggcgccggtgctagtggaacgccgagccagtggcggctggtatcccgcggcggctctggaagctggacgcggaccacggcccgggagctagaaactgaacgcccgcataataaagactggaaccctcgttctcagctctcaccaagtggactttttgcggggtgtggcggccgggtctcgaccacagcgtggatcaccggctgtttaggaaactgcagctgcacaacgtggggtgcaaaactgccccgcttcctttacagctcttctcaaccctcacctccatcccccgtcacccaggcaccttcgcttccagatgctgccaggctgtcactcaattcggtcatttcattcatttatcacacatgggcactggggttgggctaacagcaagagacaataggcctttgttcctatttattgggtactgcttacgtgctaagcagatcagtttatttaatgcttgcaacgactctctgaggtagaaaatattgttaattccgttcaggatcccggctacataatctgtggggctcaatacaaaataaaaatgtaggggctccttgttcaaaatcgtatgaagaatttcaaaacagggacaacagagcatgaaaccaagcgcaaagcccactgcagtgcgattgcacaggtatctcaccttgcagccggcactactcccatttttcaggcaaggaaaccgtggctcagagaggttgaatggcatgctcaaagtcacaaagctggcatggggcggggctggaactcaagagtcagacagtctggctccaaggcctggagatcccaggctgggccccagatttaattcagcaaatattgactgactgctgtggacaaagtgctgggctcaccttggagggatccaacctccaggagctcgagcgcagcagggtagacaagccaggggcacgtgatgcggctgtggcagaagccaagtgcaggagctcccaggctcctttgttttactgagtcaccttaaatgtaactctgccctctcccttgcttcgc

SEQ ID NO: 18513 - DNA, 2300 bp, Homo sapien
ggctaattttgtatttttagtagagatgggggtttctccatgttggtcaggttggtctaaaactcctgacctcaggtgatccaccctcctcggcctcccaaagtgctgggattacaggcgtgagccaccatgccctgcctccatctgtgtctttcacaggcttacttaagcctggacctgagccctcttctctgctcctctgcatggtctccctggatcagctccacacccacatggtctcaacagtcaagacccccaatcctctctcctgaagcctctcctctgtcctccaagcagtgtcatctctgcctccatgtgcacatctcaaacccacaggtcccacaatgaaccccatgagttgtccccccacccccaccccatgccctctcttgagggaacggccccaccttgcaagtcaccctggacaccgccttctttgtcgccgcccatcctgacgacgtttcctccttgaccgacttccagcccatccctttctctgcatctctgctcccccatctccccctgggtgctgctatagcctcctatctgcccctgctttcactcttgcccctttccagttcattctccactgggaagctggtgggatctttccaaaacgcagatctaactggtaaccctcctgactaaagcctttcaatagcttgcttctactgtcatcaaaaatccccttctctggccaggcacggtggctcacacctgtaatcccagcacttcggaggctgaggcagatggatcgcttgaggtcaggagtttgagaccagcctaggcaacatggcgaaaccccgtctctactaaaaatacaaaaattagctgggcatggtggcgcgctcctgtagtcccagctacttggaaggctgaggcacaagaatcgcttaaacctaggaggtggaggttgcagagagccaagatccactgcactccagcctgggcaacagagtgagactctggctaaaaaaaaatggggtcgggtatggtggctcatgcctgtaatcccagcactttgggaggccaaggcagatggatcacctgaggtcaggagttcgagaccagccttgaacccaggatgcggaggttgcagtgagccgagatcacaccactgcactccagcctgggtgacagagcgagactctgtctcaaaaaataaaaatccccttcttacagttcacgagtgtctccaagatcttgcctctgccctcatctactgcctgtcttccctctttctgcagttgctcagcccggactcactgacaagccacgggacctttgcacaaactgtacctctgcctccttccccagcactccccctgagcaccctccaagttcctttctctcgttctccatggcttcacaaatgtgatttcctcagggaagccttcatcctttgccccttccaccagatcaggtcacttgttacgttataccctcacggacttgtcacgtgggtgtttatcggtatggctgtcgaattagcatctgccgctctcaacagactgtgagccatgtgagggcaggagccttgtttctctctgcccaccattgtatactcagtgccttgcagagtggcaggcggcaggcacttaataaatattggctgaatgtagccaatgaggccatgtgtaacctatgagacataaaatgggctcatcagtattatttaaggaagacttcctggagtgggtaggatttgagtaggacctagagacgaggaggctgcaaaaagcaaaccttgttagctggtggacctggccaaggtacgccttcgccttggatctcatttctcatttgtaaaatgggcaggggttggacaaaatgagctgaagctctggcatcccatgtccctagcatctcccagccctagatcccacaactctccctattcccttgagaagggctgtcctccccaggcaggggcagagcccagttttatgcacagaatgggtcctcccaaggctcgggtgcctgatctgcaattctgcgctccgccgcagggcgacgctcggagaccagccacactgtcccaagtcccggcgaagacccgcccgcggctccgtaggtgcccggcccgcccctcgcagcctcctgacttcccttcctgtcctcagcggccgggcccacggccccgagcagccatgctgggcgcgcgggcctggttgggccgcgtccttctgctgccccgcgccggtgcaggcctcgccgcgagccgcaggtacgggcgggcgagcgggcccctagggcactccctgcgcctgcctgcgggcccagtggagggtcttccggac

SEQ ID NO: 18514 - DNA, 2300 bp, Homo sapien
atcgcttaaacctaggaggtggaggttgcagagagccaagatccactgcactccagcctgggcaacagagtgagactctggctaaaaaaaaatggggtcgggtatggtggctcatgcctgtaatcccagcactttgggaggccaaggcagatggatcacctgaggtcaggagttcgagaccagccttgaacccaggatgcggaggttgcagtgagccgagatcacaccactgcactccagcctgggtgacagagcgagactctgtctcaaaaaataaaaatccccttcttacagttcacgagtgtctccaagatcttgcctctgccctcatctactgcctgtcttccctctttctgcagttgctcagcccggactcactgacaagccacgggacctttgcacaaactgtacctctgcctccttccccagcactccccctgagcaccctccaagttcctttctctcgttctccatggcttcacaaatgtgatttcctcagggaagccttcatcctttgccccttccaccagatcaggtcacttgttacgttataccctcacggacttgtcacgtgggtgtttatcggtatggctgtcgaattagcatctgccgctctcaacagactgtgagccatgtgagggcaggagccttgtttctctctgcccaccattgtatactcagtgccttgcagagtggcaggcggcaggcacttaataaatattggctgaatgtagccaatgaggccatgtgtaacctatgagacataaaatgggctcatcagtattatttaaggaagacttcctggagtgggtaggatttgagtaggacctagagacgaggaggctgcaaaaagcaaaccttgttagctggtggacctggccaaggtacgccttcgccttggatctcatttctcatttgtaaaatgggcaggggttggacaaaatgagctgaagctctggcatcccatgtccctagcatctcccagccctagatcccacaactctccctattcccttgagaagggctgtcctccccaggcaggggcagagcccagttttatgcacagaatgggtcctcccaaggctcgggtgcctgatctgcaattctgcgctccgccgcagggcgacgctcggagaccagccacactgtcccaagtcccggcgaagacccgcccgcggctccgtaggtgcccggcccgcccctcgcagcctcctgacttcccttcctgtcctcagcggccgggcccacggccccgagcagccatgctgggcgcgcgggcctggttgggccgcgtccttctgctgccccgcgccggtgcaggcctcgccgcgagccgcaggtacgggcgggcgagcgggcccctagggcactccctgcgcctgcctgcgggcccagtggagggtcttccggacaccggtccccagtgccagtctggaccacccctgcatgcctggcccttcccccaccccacctccggtctgctcctgagacctggctctggctgtaaggccctcctcccctcctctcccgtcctcatcccttccctcctctccccttccttccagtgcagtgccagctcctcagggactgttctgacactgcttccaggaagccttccttgcaccccagtgctggatgctgggtcaagggcctttctccaatagtaccctgtgccctgtcacagtcctttattgctgcatggacctttcgttatttaggtctgcctgcagtcccacttccaggctgaactccctgaggtctctgattccctaggtgtcctggagtctggcccaggacctggccccacaggagtcccagcaggtgggcgctgagtgagggagtccccatgtctggtttcctctgtttgtccctcacctggtcgagtcccagaccctactgatcttggcctgtccagccaccaacagtaggctgccttccagtggggccacacccaggcctgccagagagatgcctccaagcagctgctccaggaagggccgggggaggggcctggggaggggtaagaatggagccccaagaaccattctgcccattgtgacccgccctgacctcacagccatccttcccaccgccaggcccaggaggttgggggagactaacctggcaaggagcccccaatgagccacctctcctcaccccccaaaaaacataagggggagcacaaaggccacagtctcccccatggttcagaaaggtgggttgggctgggagcaggggtcctactggggtgctgagtgaaatggagcaggtgctggggggcctgggagaaggtgggtgga

SEQ ID NO: 18515 - DNA, 2300 bp, Homo sapien
agggcgacgctcggagaccagccacactgtcccaagtcccggcgaagacccgcccgcggctccgtaggtgcccggcccgcccctcgcagcctcctgacttcccttcctgtcctcagcggccgggcccacggccccgagcagccatgctgggcgcgcgggcctggttgggccgcgtccttctgctgccccgcgccggtgcaggcctcgccgcgagccgcaggtacgggcgggcgagcgggcccctagggcactccctgcgcctgcctgcgggcccagtggagggtcttccggacaccggtccccagtgccagtctggaccacccctgcatgcctggcccttcccccaccccacctccggtctgctcctgagacctggctctggctgtaaggccctcctcccctcctctcccgtcctcatcccttccctcctctccccttccttccagtgcagtgccagctcctcagggactgttctgacactgcttccaggaagccttccttgcaccccagtgctggatgctgggtcaagggcctttctccaatagtaccctgtgccctgtcacagtcctttattgctgcatggacctttcgttatttaggtctgcctgcagtcccacttccaggctgaactccctgaggtctctgattccctaggtgtcctggagtctggcccaggacctggccccacaggagtcccagcaggtgggcgctgagtgagggagtccccatgtctggtttcctctgtttgtccctcacctggtcgagtcccagaccctactgatcttggcctgtccagccaccaacagtaggctgccttccagtggggccacacccaggcctgccagagagatgcctccaagcagctgctccaggaagggccgggggaggggcctggggaggggtaagaatggagccccaagaaccattctgcccattgtgacccgccctgacctcacagccatccttcccaccgccaggcccaggaggttgggggagactaacctggcaaggagcccccaatgagccacctctcctcaccccccaaaaaacataagggggagcacaaaggccacagtctcccccatggttcagaaaggtgggttgggctgggagcaggggtcctactggggtgctgagtgaaatggagcaggtgctggggggcctgggagaaggtgggtggaggcccctggcttgcctgatgcaccagtcctcgccaggggtagctcctcccgggacaaggaccgaagtgcgacggtcagtagttcagtgcccatgcctgctggagggaaaggaagccatccttcatctacaccccagagggtccccaaccgcctgatccacgagaagtcaccatacctcctacaacatgcctacaatcctgtggactggtgagcacctctcctggggccctgcctggaatcgctggggtcctgggcccctcccagaccccctgggctactgagtgatgccccaccctgctgggtctaggtacccctggggacaggaagccttcgacaaggccaggaaggaaaacaagccgattttcctctcaggtaatgctcccaccttccctgatgtgggggtgtgggcagggagtggcagtggatgggggagggtcctctcggcctggcgggtcttccaggagactagaggccaggacgtcttccatgtagccagggccacttggccagcctccctctgacccgttgctggccccctgacctctccccatggccctgttcagtcgggtactccacctgccactggtgccacatgatggaagaggagtccttccagaatgaggagattggccgcctgctcagtgaggactttgtgagtgtgaaggtagaccgtgaggagcggcctgacgtggacaaggtgtacatgacgttcgtgcaggtgagcagccctcctcgggagtgtatgcgccacatgggctcagagcagctcccctcaccctcgccctctctccgccaggccaccagcagcggcgggggctggcccatgaatgtgtggctgactcccaacctccagccctttgtcgggggcacctatttccctcctgaggatggcttgacccgagtcggcttccgcacagtgttgctgagaatacgagaacaggtgggtgtgcctccgggagttgggggaccagggtgggggactaggaaacaagagcccctccccctagctgacctccaggtgtgcccccacctcccgcagtggaaacagaacaagaacaccctgctagaaaatagccagcgtgtcaccactgccctgctggcccgatcagagatcagcgt

SEQ ID NO: 18516 - DNA, 2300 bp, Homo sapien
tgacgttcgtgcaggtgagcagccctcctcgggagtgtatgcgccacatgggctcagagcagctcccctcaccctcgccctctctccgccaggccaccagcagcggcgggggctggcccatgaatgtgtggctgactcccaacctccagccctttgtcgggggcacctatttccctcctgaggatggcttgacccgagtcggcttccgcacagtgttgctgagaatacgagaacaggtgggtgtgcctccgggagttgggggaccagggtgggggactaggaaacaagagcccctccccctagctgacctccaggtgtgcccccacctcccgcagtggaaacagaacaagaacaccctgctagaaaatagccagcgtgtcaccactgccctgctggcccgatcagagatcagcgtgggtgaccgccagctgccgccctctgccgccaccgtgaacaatcgctgcttccagcagctggatgagggctatgatgaggaatacggtggcttcgctgaggcccccaagtttcccacgccgggtcagtgccccacgcccgccttagcccaggctttggccttctgattcctatgctggtcagggacctactggctcctggcctcacccatagcttcctgtcctcctgactggcagtgacctccttgcccctagcctgtcggtagctatcggtgaagacccgactgctggtgtcagcagtgaccctctcaccttaacctagatgatgaccttctgtcccctgacttggtcagtgacccagtgaccctgacttggctaatgacattctgggctctagggggacaagtaacttactggtcctctgtgaaccaatgatattctgacctctggcttaggctattaccttctgtcctgtgggttgactcttgacctcacagcctgtccagagactgcctgttgagtgaactcccagcctctgcctggcccaaggcctcctgaccaccccgatctctgtccccactttcccattctctcacctgcatgttcttggtgcccccacagtgatcctgagcttcctgttctcctactggctcagccatcgactgactcaggatggctctcgggcccagcagatggccttgcataccctgaaaatgatggctaacgggggcatccgggaccatgtggggcaggtgacgggcactgggtgttccctggaggggcagcagggggctgtggggtggggcagaagctgggactggcctccagctttgtatccgcacagggctttcaccgctactccacagaccgccagtggcacgtccctcactttgagaagatgctctatgaccaggcacagctcgctgtggcctattcgcaggccttccaggtgacccctgaccccagcccagagaacaggcatctcactctggctgcccctcccaaggccttcctggtgactgtggcttctcttaatctgaatcccctgttccctcccatgtacccactacccaggcttccctcccccgcctgcctcagagaatgttgccaccttccacctgggcctccccagtgacctctctgttcacagtctcctttcttccctttcttagctctctggtgatgaattctactctgacgtggccaaaggcatcctgcagtacgtggctcggagcctgagccaccgggtgtgtgtccatggtggcaggcaggcctggctgtgggaggggttggggcctccactgccctgtgggccggggccagccaactctcccctccccacagtccggaggcttctatagcgcagaagatgcagactcgcccccagagcggggccagcggcccaaagagggcgcctactatgtgtggacggtcaaagaggttcagcagctcctcccggagcctgtgttgggtgccaccgagccgctgacctcaggccagctcctcatgaagcactacggcctcacagaggctggtaacatcagccccagtcaggtgaggacttctggggtcacctgacgggccctggtgcctgccaggcgtgtgagctcgcagacaaaggccattctcctcaggaccccaagggggagctgcagggccagaatgtgctgaccgtccggtactcgctggagctgactgctgcccgctttggcttggatgtggaggccgtgcggaccttgctcaattcagggctggagaagctcttccaggcccggaagcatcggcccaagccgcacctggacagcaagatgctggctgcctggaatggtggggcagcacacctgagaccgagcctgtctgtaggatcccccttcacaaagcccctgt

SEQ ID NO: 18517 - DNA, 2300 bp, Homo sapien
ggcctcatttacacaactctgtgcatggattcggcgaaagggcaaccagggagacgacggcgcagcagccactctgccacttcccccatcccctccccccatcggccggggcgggaactgagacgaccccaaccctctgcggtggcgggaggtgcgcgggggctgcgtgggtggtgcagccttaggagagtgaacaacgcccaggggtgatggcctcagcaaagtgaggggtggtgatggaggtcatccgacccatcccgccgcctctccgcagtggcgcaagcgccccaaaatctccggagagggaactgactgacccactaggttccgccgtgtctacctctcgcagatgttggggaagtgcttcccggcgtctaatcctcgctgttcccccctccaccggcgcccagcacacccgcggcgctccgctcccgggtacccacagctttctggagtggcgccggcggcaggagagagctagagccgactgagccccagaactcggggaggtaggcggggcaagggccggggtctgcgcgtgcgtgtgcacgcgtggaaagcacaaacccacgagggcccgctgccggtagggttaaggtgagtgagtgaaggcggcagacccgcgaagttccagttccgcggacactctttccctaagccacatagggacttaagagaaactgaggcacgaagttggggggtggcggtggtggggactttgaaggtcgagtcgataaagcccagctctgtgcttccgccccctcccacacactcgagacccccacaggttccttcttaggggtcctcgctctgctccgcagcccctcctggggatccgggctctgcggtccagcgcgacctgcctggggccacgtgttcaagcacgaagcccctgcgtggagtccacgcccttcaaaaggtccctaggggcaaagggatgaagcccaggagcgtcaatgtgaggtcaggtccagcgggttagggttacgaggtcagggtcgaagtctcagaattgactcgggagtatgaccaataagcccaagagatttgtggaggccacgcccagaccatgcctaccctagcctttctcgagctccgcccgtttctccaagactgggcccctccagcctgaagccccacccccaggacatccagctccgctccttccctcccccagtcccgcagccaagctcaactccagggtgggagattaaccaggtggagacctgggatttcgctctgggaccccctggtgacaaccctcacccccgtgccgcctgtctcctttcttccccaggcccgcccagagctgagctccgtcctccggctgctgcccaaatcaggggtcgtggacaaaggatgcctggggcctgcggccctacgccaggaccccgcgccgaatactctgattcttcgggctccctccaagggagtcccaaagaccccaatggccaataggaaagtgggttcggtctgggcagcagtctgattggctccagccttcgggagcggacccaggggcaaggggaggggagaggggcggtcctgggttttggggtgggaatcggattccagctgtggttctctccctgcgctcccgcccgcactgccacggcggacggccaatgggcgcgcggctcggggccggcggcgtccggcgattggctgcggggctgtctgggggcggggccgaggcttgaagttgaagtgagggatccagctgtggtgtgcgcggggctcctcgccgccgctttcgctcgctcgctccgcgtctcggccggaggaggaggctgtggcgccggcgacagctacggcagcggcagccaccgcggcggctgcggcggcggcatctccgcctccactcccgcccgggactgccccccactgtctccccgcccctcccggacagtgagcccgcggcggggcgggggaaggagccgcccccaccccctccaagcccacccctaaagagatccctcctcccctcccccgccgcctggcgcggagccgggacgatgctgaccccttagatccggctccagctgcgccgcgggaagagggggcgcccctccccggacccccgccctccgccgctgccccccttttcgttcgccctctcggggcggcttcgccgaaggtagcgccgaatccggcaaccggagcctgggcgcgaagcgaagaagccggaacaaagtgagggggagccggccggctggcccgggaagccccaggggcgcaggggaagcgggactcgcgccgggcggggtttccctgcgccccggcgccccgcgggcagcatg

SEQ ID NO: 18518 - DNA, 2300 bp, Homo sapien
acaccaaagcttgcacttctgagccttttgctgtcctcccttgcaacacacacacacacacacacacacacacacacacacacttcctacctgggtctagatctcctctctaggaaacctggtcccttaaaaaggagaggccaagaagcagaatgtaccaagaaaagcctaactagcttcagttagttgggggtggaggggagtgtccttatgtccctccggctcagaggcgtacagggaccctcctgaagcctgtggggagtcacagataccacaaagagaaagagggaggccctggaggcagttcagagcccctctggcagcaaaaatacaggtgtctcttggtacttgggtaggatggcagtggtgaggggcacagcttaggcagtcccctgccaaaaaattgttctcaacccatcctcagccaacccaggcttctccagacctagtaatgctgatgccacacacccaactaccactcccctgggggaagctgctccccaactcccaaggtgagtgctgtcctcccacctctcctcccccatgccaggcctcaacacttgcccccgtccagaccactcagtgaaggagtctgcctccagaccctccactagcacctggagatagggcaggcgagaagagatgctagcctagaggtctgttttcagggagaggggagagaagagctctctctacctcccctgggacccttgagaaggaggacatagaggttgatgctttttcccattcgtggaaggggtaaatgattaggggcagagaggagagttgctcggaacccatcctttccagccatatcagttctccatctccatccctgcctgggagaaaggggcctggggctgggggctcaaacctcaagattgtgcctattcagcaagaacacagacctctgaggcctgcacctctctttctgcagctcagagagaaaggaagaaggggcagtggatgagaagaggatgtgatgaggggagcttcctaaagacccacaaggtgtagaggatgggggtgggggggccacaagctcatccctgctttgcgcactagaggcagcagagctgcagagagtgagggcggcaccaaccttccaccccccttccccaaagcagagtccctgctaggctcacaggggctacaagggagacctggggtctcccaccctgggtctataagaacctctgagctggaaggaaggagcccagagaagctgtccagacctgagatggcagcaacacctcccctccacctttccttcccccggtggcaggacccgccagggagcttggggccaggcgtctgtcaagtggcgctttgagctagggtctgactgggctggggtctcccctaccactccagcctgggcagacagggagcagtgctaaatccatctccctggaatgtggggcttgcattccccaaacctatctgcggagtctacgctggggtggtggacccgagtcctccttagtgaacacactgacagtattactgtcccctcaagactttcgcgggcctgcagtcccccatacctggtctgcaggagcactctttatttgtgaaaggggaggagtaacctggaccagcttaaccccatcccccacttgctaaaaaagctcttgacacagtctttccctccacaagaaaaatccagcataaaactccccaacccaatcttaagcaccctgcatcgaatggagatcgggtaggaggcacccgcggcactgggctctagcggaaaggggctccactcccagctccgggggcagacagctcccctccaccacatcttgttctcattctgcgcccctgacatcagccgccgccggaatctccttgttgtgcctccaacccgcgaggtggggggtgaggtgggccaggacctggtccccgccccccaacatctccttctaggtcagtaaaaacctcagcctcaaggaccaggttgggggatcagaccctagaatccgccgcaaactttggggcgggggaaggagggaaacccaggagattgcggtcccccctcctccgtccccgcagcttcctccccaccgcccccacccaccccccaccaaactcggaaaccaaacccagctcgctaaccggcgcgggcagagtacagctcccaggctcccgaagcttcccacatctggaggatgacgaccctcccctgaccacatctggagggcgtccagctgcgagccagcggggcacagctctcttctcctggcctggatccccacccccccaacccaggaagactgaggtgtgtgtacgcaggtggg

SEQ ID NO: 18519 - DNA, 2300 bp, Homo sapien
gaaggacaggtgaagccccaggaggagccccacgtgagtgtcctcgtcctcgtcctcctcctaaggctgaaactctacattcctgatctgtaaaatgggcttgtcagtgctctccttctcctgcttgcctcagctctccttctcccggtatcccctcagatgcggggatccctccatctctcaatcccgctgttgccctgtcttccttaacacaatcccagacgccaactcagcaccgcttgttggggctcagaaggaattctccctggcaaatctttccctggcccttctcttccctgcctttgcccacaggtctgtccagtttcaccccggtgaccccttttctggcccttgttctcaagagaaggtgtttccttccttggctgctcagcggcaggtgtgggtgggagccagtaagagtgcagaaggggcaagccacctcctatctctctgggcagccaggaggtcactagaagggaagtctccttggctataggctatcagaaccaagatctggctgggcatgggataggggtgggagtggagaagattcccctttcccaggcagtcagaccagggacttctacccctccactgggcaagttctttcagccccttctttgtctgccctcttcctttccactcatccacacataccctccctctcctgtccccctaccttcatctctgggcaaaatactttacagagctttacaccttgttacggcgtgccttggattatatttagttatgaagagtctgtcttccctgctaatctgagaggtccccaagggcagggactaactcagtcccctccaatccccctccataccttttatacactgtgtgatctcaataagctccttgatgcctctgggacttcatttcttgagaaacgtggacagggtgatatctaagctctcttccagccctggtgggccaggcttctatggcctaggcagctgggaaccttcctccaccccttccatgaccctggtcatggcttcatcagcacccactgcccctgtgttttgaccttgtctacccaccggcttcctccaactctccctcctctcccattccttttctagggcttgtggggtcataggcaccagattgctctgggcttgaggagacctggggactttcctttagggccctttgggaggtgagctccccaatcagacctcctttctgagatggagagcccagaactagcctgagcttccgtccgggactttccagccccacagttggccaggcagtgcactggctggagctctagttttgggctaggacccttgggttctggcttcagcatcggagctgaagcaccatcccttgcagccccaggcttttctatcgctattgctttcccaaggctatagcactgggttgggcactctgagggcgtggtgggggcccttagcgatcctcaccttcccccatctctcttgaggtattggggctttacccctccaggccactcaggaagtgtgtcccctttcacagagcccttgaataataaccacaatatttctaggatgttattgttttggttgttctcaccagagcaagaaatctgaggccctgagacaccctacagcttgctcagcgccacagagcttatcccagcacacgcaggaggcgccccacgtctgccgaggagactgtttctgcgcagtctccttgagcgggatgcacttcctgtatctgtcttcaaggctgcttggtgcactctcctacctacaccctacctccctttctgcaagtggcaaacttcttcaagagttcgctcaagcccccctccccgtcaaagccttccttggacctccccaacccagtcctgggctaggaggcttcccccacttgtaatcactgatgtcttgcttacctcccccagaggactgtggacaccttgagggtagggactgaagtttgtttatcactgtatcctcagcacccaggacagtgcctggagaagttggtcctcaggaagtgttgttgactgattaagcaaacacctcatttcctaagaaggagtcataggtaacaaggccactgtggcattaagtacagtcccagcagtgggcactgcccactttgcttttgagtgttcagaaccaagatggttcttgctggaagggctccggagaagcagtaacggccttgtgggttgggctgcagcagagaaatggaccaaacctcccccagccttcatggcccaagccccatcctccctccccaactgactgctgctccaggcaggatggatggagcatgtgcggtgcctcccccgc

SEQ ID NO: 18520 - DNA, 2300 bp, Homo sapien
tagagctccagccagtgcactgcctggccaactgtggggctggaaagtcccggacggaagctcaggctagttctgggctctccatctcagaaaggaggtctgattggggagctcacctcccaaagggccctaaaggaaagtccccaggtctcctcaagcccagagcaatctggtgcctatgaccccacaagccctagaaaaggaatgggagaggagggagagttggaggaagccggtgggtagacaaggtcaaaacacaggggcagtgggtgctgatgaagccatgaccagggtcatggaaggggtggaggaaggttcccagctgcctaggccatagaagcctggcccaccagggctggaagagagcttagatatcaccctgtccacgtttctcaagaaatgaagtcccagaggcatcaaggagcttattgagatcacacagtgtataaaaggtatggagggggattggaggggactgagttagtccctgcccttggggacctctcagattagcagggaagacagactcttcataactaaatataatccaaggcacgccgtaacaaggtgtaaagctctgtaaagtattttgcccagagatgaaggtagggggacaggagagggagggtatgtgtggatgagtggaaaggaagagggcagacaaagaaggggctgaaagaacttgcccagtggaggggtagaagtccctggtctgactgcctgggaaaggggaatcttctccactcccacccctatcccatgcccagccagatcttggttctgatagcctatagccaaggagacttcccttctagtgacctcctggctgcccagagagataggaggtggcttgccccttctgcactcttactggctcccacccacacctgccgctgagcagccaaggaaggaaacaccttctcttgagaacaagggccagaaaaggggtcaccggggtgaaactggacagacctgtgggcaaaggcagggaagagaagggccagggaaagatttgccagggagaattccttctgagccccaacaagcggtgctgagttggcgtctgggattgtgttaaggaagacagggcaacagcgggattgagagatggagggatccccgcatctgaggggataccgggagaaggagagctgaggcaagcaggagaaggagagcactgacaagcccattttacagatcaggaatgtagagtttcagccttaggaggaggacgaggacgaggacactcacgtggggctcctcctggggcttcacctgtccttccccccccaaccctgatcaggctgaagcagagggaattcacacatgttgggtgcccactaagtgtgccaggaaatacgctttgcctaccctttccattcaatcctcagagaaccctgggaggaagattctcttctatgattgtctctattttacggatgtgaaagtagaggcccagagacgtgccgaggtgatgtggcaaggtcagggagccacagagcctaagagggcagcagtttaagaggacataagaggcccccgctggacgatgctgcggcccccacccccgcctcacgggtacacacccgcggagcacaccccgtgtgctccccgtgtggcgcctgccagtggtctctggaacctgatggggaagaggtcagcttcctgattgagcacagaagcccttcccattttacagatgaggaaactgacctccggagaggaacgtgaccttctcaaagattccttttttactaggaaagattgttaaatccctctccctacgtcccctactcaatgactcatcggccccacggacttgttcgggagtgggagcgcctgtgtatcccagttcccccttggaaatagactcgactcctggactgttagcctcggtatttagagagacatccccctggcttggcccaggggccgctcgcaggggctgtcgccgtgccaagggcccccccacctctgccccaaagtccctcccagggaggcgctgtcgcaacccgcgggacgggggcagggagaccggacccagaggcactggggtagggctcggcagggcgggtccgggcggagcgcggggtgcggagggcggaggcggctccggcgcccgctctgcccgccgctgggtccgaccgcgctcgccttccttgcagccgcgcctcggccccatggacgccctgtgcggttccggggagctcggctccaagttctgggtaaggcgcggggctccggggtcactgcgcgggggccagggtcggccggcttcgcccggtccccgccgcctgcct

SEQ ID NO: 18521 - DNA, 2300 bp, Homo sapien
ccttcctcatggagttggtgagagaataaaatgaaatagttatacattgtagctggcactgggactttcctgttggctttttttttttggggggggggggacggaatctcgagtctcgctctgtcgctcaggctggagtgcagctgcacgatctcagctcactgtaacctccgcctcccaggttcaagcaattctgtttcagcctcccaggtagctgggattacaggcatgcgccaccacgcccagctaatttttgtagttttagtagagatggggtttcactatgttggccaggctgctcttgaactcctgacctcaagtgatccgcccacctcggcctcccaaagtgctgggattacaggtgggaaccaccatacccggccttcctgttggctgttttttgataaaacattgtcaacagtttgggacacattatcctttccttccttttatacatatctaaacatacgtgtatgcatgcgtttaacatagatgagttgataaccttcagatacagctaactgtaaaaggcctttgcagacactgaactcctgttctgtaatgaattagtcagttcccggggatagatgctcaacacctgggtatagcgaccatgatctaggctgtgctctgtgctgggctaggggagaatcagatagacatcctgtatagcctggatatctgaggccacagaggagaggatggaaactggaggcagagccgtgttgttgtggggttgaagcagagatgatcagagggagggagtgaatgacacatcaaggccccaagtcttgggtccttggaggtgggggaaggcagcgatgtctcgtggtgggagtgaggctggctgggaggactcatctgaaaatggatgagttcagagacaggcaggactgagttgggggttccatggccctgaccccaaactccttctccctccatcagcgcttctatgcagccacatcacggcaactgaagcggctggaatcagtcagccgctcacctatctactcccacttttcggagacagtgactggtgccagtgtcatccgggcctacaaccgcagccgggattttgagatcatcagtgatactaaggtggatgccaaccagagaagctgctacccctacatcatctccaaccggtcagaagccgcctccctcgctccctgctcctccaggaattcccagcaggctctctggtgttcagggtccttgtccctcctttcccctaagcagaaaactggccctgccctgcccctgccccatttcctcctcatctgatcccccataggtggctgagcatcggagtggagttcgtggggaactgcgtggtgctctttgctgcactatttgccgtcatcgggaggagcagcctgaacccggggctggtgggcctttctgtgtcctactccttgcaggtatgaagggcctggaccccagggcagggccaccactgggacagaaaccacacaggtgttccaggcatctcccgagtgcccctccctgctcagtatgggcaccagccacagggtctgttctcaaggactgtgagaaaaaaaaaaaaagaaaaaaatcattgagttgacaagtttataaccacacaccatggctggatgttcctactttccttccccaagaagcccatgttctcacattcagaaagaattctgttgaataatctctgtcctcaaaccccacatctctctcctgctcagccgtcgaccttgcctgacacctcacagttcaactggagagacccccatcagcaggagattgtgctgcaggctgagcaggtctttgtggctggagaaacaaaatgttttaaaagcccagaagagggactgggtgcagtggctcacacctaatcccagcactttgggaggcggaggtgggcggatcacctgaggccaggagctccagaacagcctggccaacatggtgaaaccctatctctacttaaatacaaaaattagccagccgtggtggcgggcatctgtaatcccagctactcaggaggctgaggcaggagaatagcttgaacctgggaggcagaggttgcagtgagccaagatcacgccactgcactccagcctgggtgacagagcgagactccatctcaagagagaaaaaaaaaaagtccagaggagttttcttgctttggggtgttgtagaaatgatcttggagcttagccccaaaggacaaacagaatttctcttgtctctgggcaagttgtaggctcatgtgacaggtcaggacagtgtagggctggcataccgctcgctcacgttcacatgct

SEQ ID NO: 18522 - DNA, 2300 bp, Homo sapien
tggcatgctaattatgtttctgtacagtattaaaatagtagcccttcagagtgtgcagaattgcttcctctgtgtacaatattgagtgattagttttacttaaatgagtctgatatgttagaagaacctgttcgtgaagaattttggttgttgatgtatattttttaagtacctcaggaattaaagtatgtgtgcagtgccttacatttacgcagatgaggatatgtttgtagccttctggagagaactagagaagccaactttttaaaaatggaaatttggaaatcctttgtgtgtgtgttaaggaaagaaaagtaagaaggaaaaagaaagtgagcaactgggattcaggcaagaatatctgctgtcataataataatttaagtgacagagcaagctgctgataggagatggttattatcctgataatattgaatcttcaggtggcatatgaagtgagtttccatagtccctgaaaaggaatatagcaatagaaaaatatgtttcagagactgagatgatctaatgagcgatactgatagagtatattccacggtatcattggagttagccagccagtgagcttaccttctggaggctattgaaattaaaactcctaggttaagttagtttttctcaggagccagaaatgaaatttaaaaacaaaatttaagcatattaaatattttgctcatcggctttgtgaaaagttgagattaccagcccggttacctggttctagctgaactctaacaggcttgtttatacattatttactaatgtttagaatctgaaatccaaaatcacttctcctctttttcaatcattattttctttggtacaggacttgtttacactgggcatgtaaacgaaaccatggtcaggtggtctcttacctgttaaaatcaggagctgacaaagaaattcttaccacaaaaggagaaatgccagtccagttaacatcaaggagagaaatcaggaagattatgggaggtgagtctgtgtttgggggaacttttgatttcctcagactcattgaagacttgtggtattattggctacgttcttaatgctggtcaaacaactgctctatttctttctttttttttttttttccgagacggagtttagctcttgttgcccaggctggagtgcagtggcgtgatctcggctcaccacaacctctgcctcccaggttcaagtgattctcctgcctcagcctcccaagtagctaggattacaggcatgtgccaccacgtctcgctaattttgtatttttagtagagacggggtttcaccatgttggtcaggctggtctcaaactcccgacctcaggtgatccgccagcctcagcctcccaaagtgctgggattacaggcatgaggcaccgctcccggcaactgttctatttctaaaagcaaattactgtgccaagatagtaattccagattgtttctggggaggtcagcattgtaaggttttatttttttatttgtaaaatttaagataatgataaaaatggtaatcataaacctaatgaagtattcttttttcttctgacctgacactgaccaatgtcacataccaaaagacaccactttcaaaagacaccttgttttgataattttgaaaggactgtgtaaatgttctgttttcttctttttaagtggaagaagaagatgatgatgatgatgatgatgacaacctcccccagctgaagaaggagtcagaactgccctttgttcccaactatttggccaacccagccttcccttttatctatacacccacagcagaggattcagcccagatgcagaatgggggcccctccacaccccctgcatcaccccctgcagatggctcacctccattgcttccccctggggaacctcccctgttagggacctttccccgggaccacacctctttggcactagttcagaatggtgatgtgtcggccccctctgccatactcagaacaccagaaagcacaaaaccgggtcctgtttgtcagccaccagtgagtcagagccgctccctgttttcttctgtcccgtccaagccaccaatgtctctggagcctcaaaatgggacgtatgcaggaccagcgccagcattccagccatttttcttcactggagcatttccatttaatatgcaaggtaacccctcatcagcaaacagcctctgcaacaggggagttggtgtccagaggggtgggatttaatgaggtattctgggtataattgcaaacttacagaaacgttacatgactaacataaggaactccctttactcaa

SEQ ID NO: 18523 - DNA, 2300 bp, Homo sapien
tactaatattcacggatacagcagttatgtagggtacatgctataatccttttaaggaagggacatttgacaaactctcataaagagaactcatagactttgggggccgggcgcggtggctcatgcctgtaattccagcactttgggaagctgaggcgggcggatcacctgaggtcgggagtttgagaccagcctgagcaacatggagaaactccgtctctactaaaaatacaaaaaattagccaggcatggtggaacatgcctgtaatcccagctactcaggaggctgaggcaggagaatcgcttgaacctgggaggtggagattgtggtgagccgagatcgcgctgttgcactccagcctgggcaatgagagcgaaactcctccatctcaaaaaaaaaaaaaaaaaaaaaagaactcatagactttggggtgcagtcacgaacaattttttttaactgcattaaaaacaaaaaacaacaacaacaaaaaaacaaaaacaggccaggcgcggtggctcatgcttgtaattccagcactttgggaggctgaggctggcagatcacatgaggtcaggagctggagaccagactggccaacatggtgaaaccccatgtctactaaaaatacaaaaattagccgagcatggtggcacaggcctgtaatcccagctgctcgggaggctgaggcaggagaattgcctgaacctggacttagaggttgcaaggagctcagagatcgccccaccgaacaccagcctgggcaacagagtgagactctgtctcaaaaacaagcaaacaaaaacaacaagccactacctactcccatgtcactgaaattgtgttgaaggactcaaatccagtgccatacacatcagtttcagatagagtatcatgctggatgtgagaattaaaatttaaattgggggaacaaatgaaaatgtaagctcaagcagggttacaatttgccatgggggtcaatttaagtgtgtagtcagtttatattcagcaccacctggtgtgcactgtgtactgtgtgaattactgtatcatactaaacaaacagacattggtttttcttaaactgtagcaagaaaaatgcttgctgtgcagatcccagcagccccaagagacggaaatgaaaactccatgcctaaatttatcccttcctatttcatctctccttgttcaggccttcctcccttcctccccagggctatttccttaatcttgaccccatctgtaaagttccatcctgtgccacatcggaggatctcttcagggcacctgggctcaacaaaacaatatttcctttttctcccactgggtataaaacagtgccaactgaggctctgagcctcattagatagatcgggcaagaagtgaagcaaaatgctgtttacatgtacaccacagctcttcccagagcacttggaatcaggaccaggacacctccaaagcctctttggtgtttttcctttcttttctccttatatggccttcatgaagagtaactaattacaatctgtaagcagtaattacagttcataaactgtgagcacaatataaatatttttcctgaaagccaggttagaagaaatcctgtctaaaatgagatgtaaaacaacaacaattgaaataaatattctaactgaattgtccccaagcactgtcaaaaagaagaagagtctaatctatctctgtaataatgggcgtattatagtaggatcgttttcagcccatttccccatcctgctgggcacgaattggctcagataaggaaaaggagccaaccaaactgggggaaaataacaaaaaaaccccaaatcccaataaaaagaacccaccaattattttggatgcctggtaaacagcctgcaccagaggataaggcttttctggccctcagctatgcttttttctcttttcatgtgtcttgtcctcctcccttgaaactgcggggtggggaagtctaaaaatagtcaatgaatcatggcatataatattgtgcagtagttacataaacagccagcccgggcgccggagccccgggtcggaacggaaaatatctgggtcagcgttgtcacactgaacagggtcccccggagccggccttcgggaggcgcggcccgggaggaggcctgggcctgcgggccgggagcagcaggggcggcccgcgggagggagcggaagtcccggggcgggcgcgggcagcggcgcgagcagggcgggcgagttccgcgctccctccccatggccgggagcgggccgcggcgacggcggcggcgctgacaggccccgg

SEQ ID NO: 18524 - DNA, 2300 bp, Homo sapien
tggagaatggcgtcttgttatgttgcccaggcaggtcttaaactcctggcctcaagctatctccctgcctctgcctccctaaagtagtgggattatggcgtgagccaccatgtctagcctctaatttcctatcttcaaaaaggctccagccccacttggtggctcacgcctgtaatcccagcactttgggaactttgggaggtcgaggcaggtggatcacctgaggtcaggagtttgagatcagcctggccaacatggcgaaactccgtctctactaaaagtacaaaaattagctgggcgtggtggcgggtgcttgtaatcccagctactcaggaggctgcggcaggataaacttgaacccgggaggcagaggttgcagtgagccaagatggtaccactgcactccagcctgagcgatagctcaaaaaaaaaaaaaaaaaaaaaaaaaggcttcatgtcccatacctcctttgagttctcaccctattttgctgctttccttcttaaaaagaggtgtccacgaccgggcgcggtggttcacgcctgtaatcccaacactttgggaggctgaggtgggtggattatttgagctcaggagttcaagaccagcctgggcaacttggcgaaaccccgtctctaccaaaaatacaaaaacttagccgggcgtggtggcatgcgcctgtagtcccagctactggggaggttgaggcgagggggtcgcctgagcccgggaggttgaagctgcagtgagctgagatcgtgccattgcactccagcctgggtgacagggccagacccagtccccccaaaaataaaagtgttgggcttgttatcaatgtgtagtgccttacattgtataaactcatttaatcttcacaatagcatcgtggctgggggccgggggaggactattgtaaaccccattttacagaaaaggaaacaaaggcacagagcggcagagctgggattacgaacccaggcaatctggctttagagaccatacccttaactgtgctaaagcattatcccaacatacgttgatatatttgtgactttatttcttcagcgattatctcccctcgccaatgcacaggtctgcgggagcatggactgtctgaaaggttctgagtttagctttaagcacagtgcctggcacataccatttgttgaataaatggatctacctatctatatatatgtgtgtgtgtgtgtgtgtatgtgtgtgtgtgtgtgtgtgtgtatatatatatatatatatatatatattttttttttttttttttttttttttgagatggagttttgctcttgttgtccagactggagtgcaatggcgcgatctcggctcaccgcgacctccgcctcccgggttcaagcgattctccagcctcagccccctgagtagttgggattacaggcatgcgccaccacgccaacctaattttgtatttttagtggagacggggtttctccatgttggtcaggctgatctcgaactcccgacctcaggtgatccgcccgcttcggcctcccaaagtgctgtgattacaggcgtgagccacctcacctggcctactggatcaatatctttttaaaaaattccacactgggagacatttggtgtaggactgaatccccgtattttagaagccgccttgtctcttcttgcctcgatttcccatcctgttaatcaggagactcagggcgggaggacaaagccaggtgcaagaggcgtgagcacagcgactaggaaaatggagtcggaagccgtaatcttcagtttcctccgctgcatgaggcaccatgtgcaccacgtggactaaaggagacactttctccattttgaagcggtgtccaggcttcaagacctaggctccaatttctcaccgtgaagaagctcgggaaaaccgggcgcttggggaggcgcgcgggcagaggctacccgtccccgcggcctctagacaggggcggagtccctacccggcctccgcgggccccgcccccggacggcggaagccgagctcgccctctccgcccgggcctgggcgtgtcccacgggcgcacggcatgctgggaaggcgtccgcgcggcggccattttgtcttgtcggctcctgtgtgtaggagggatttcggcctgagagcgggccgaggagattggcgacggtgtcgcccgtgttttcgttggcgggtgcctgggctggtgggaacagccgcccgaaggaagcaccatgatttcggccgcgcagttgttggatgagttaatgggccgggaccgaaacctagccccggacgagaagc

SEQ ID NO: 18525 - DNA, 2300 bp, Homo sapien
ttgggggggtagagatggggttttgccatgttgtccagtgtgatctcgatctcctgggttcaagcaatcctcctgcctcagtctcctaaagtgctggggttataggtgtaagccaccatgcctggcccctagtaaaacttttcgttaagcggaataagctgagttacgtttagattagcaacagacagggattttccatgtgagacttggtgcaaagagagaagttactaagaaaactgtatcaggcttgtctcccatgattgggtatgctatgatagagttaaacattggaatctcttttagaagtgatataatttattggcattttgaaaatgctatgtaaaaataaattaattaaaatcagtgtgcagatgagtgaatttaaaaaatgtaaaaaaaaaaatacagaaaagaaactaccatgtagccatctaggcactcttataaatgactgaagatctggactttgggaccaggtgtgagccacagtgggcatttattaatggcaaatgagaaaaagcaagtttattactccaggtgctatgatagaagcagtttatcttactccacaaatgaaaagtggtttctcacacaaagctgtcagcaaccagtgtaaggtgctctctttgtcaagagagtttccttttttcatccatagccctaaaatccaccacaaattgtggatgtccttaggactattaagatctaccatatttacatagggcagaagataagattattggactgactactagtcctctacgggacaacaagacgactcttcctcattgaagctacctgtgcaccggagaagcccataaggcacaaagggaggactttcccacaaggtcagttagagcccactgtcctggcacagttctcacaagtggacagacagacatgaagcaagtcttgcgcttaactacttggacattgctttgtgtattatgcaagtgttacggactaaatatgctcttttacataagatcttcagttctctgagtgggtgcccctcccataccatgttttgtttttcattaccatctctttcctagatatttggtgttacgtcttcataactgtgcagaaactatgtagagggttctgtttctcttaaaatgtctttttgtctaattaactactctgccagaccagctattcttagtaaggggaaaagtaatttttccagaaagtttctagttggctttaacattttctgtagaaattttttgttgggggaatacttggaactgaaaaggctagactatgcttgctctggtgtactacttttacctctagtctgaggtcttacccatccaaagaatagtagaggaaaaagttgtttacctttttcattcttcatttgcagctgagttgaattttaatttctctttttggaaaaacaactctcagatggcatatatattacttttcttagcaaagcacaaaagttcagttgcttagattgggatttaagatccattttctttgattaggcttatccttcttggatattcaaatatatataaaaataatgttttgcattgaaaaatatgtagttgtagtttttaaaacatgcctgttataaacattcaactttttttcaccttttggggtctccatttttacccttctaacttaataattgaacctcatgtgaacatagttttgtatgctgtcttttatacctttcccagtgctttttgatgttttttacccacaatgaaatttacttaaatattatattctgcaatgtgcttaatagcttctcaccaattgagagaatttacccactattttaccttttgcttccttgaattccccttcctgccttctctctcatatattacaaattttatccctttggtaaattcaccaaaccgttgcttgcagtctgtgggaaatgattgtctctcatctctcagttgtttcactttttttcaaaatcatgtctttattgtattttactttaaaatccatggtcaatgtcttcttttatggcagaaaagaggggatctgatgataaaaaaagtagtgtgaagtccggtagtcgagaaaagcagagtgaagacacaaacactgaatcgaaggaaagtgatactaagaatgaggtcaatgggaccagtgaagacattaaatctgaaggtgacactcagtccaattaaaactgatctgataagacctcagatcagacagaggtaagtgtattgtttctcactttgattagggctttttgttactgtttgacagtgcagcgtaagtatgcacagatgaagatggaactaagccgagtaagaaga

SEQ ID NO: 18526 - DNA, 2300 bp, Homo sapien
gttaattatcctttttttagggattttgatgtcatttcttttttttttttaataaaaaggttgaactgtttttttttttctttttggtattaagtccatcttgtgttggtacattggcagagacatatgctttaaaaacttaaatatttcggaggcacatgttggactactttgttttaattaaactgctagtatttctttgtcaaggatgtttctagttttttgctttattgccttgcattctaatgcagtttgttctgtaactcgagagccagtagcattggattgatggaagtgtagggtttatgaattattgcagctgactaccatacctcacacagcgttggtgttgtgagcggcccatgaaaagccaaattaaaaatcaaggattcagtcaaactaagcaggtactcatgccaggtactcctttctctacccacatccatgtttgaatgctattgcctgtgatctttacgcttaactgttgtgtatcttttttgttctttacaagaagtgcagaggggttttttgtgtattgcgtgaaaacttataaaacaaatgttaacagaatggaattttttttcaactgtatgtagggctgcagtggtggccagaattagatatctttaaagaattttaaatacaataaacacttcatattattcgccttgttacactcaatgcaattctcaagtctataagaggtatgtgcttaatatttcctactgtgtaggagaatttgcagtcagccataggtatgtaggaatagtcactcactggctgatacatttaaagcagcagtgtgaatagcaaggacagacaccttcaatttgtgaaatcaaagaactgatgcactatatagaacgaatttgggtttttaaagaaatattaaaagttaggtactgtaagtgttcttaaaacctgtaaacttcattctgtgggctagtggtgtgggacaaaatattcctaatgaaaggaagtaccaattagttgatttgttggtggcattccccttttgggaaagcaatgtaaggttatgtctgtgtatgtcattcacacttaggcaagcatacacaggcacatggctttaagaaccacactgatgccttgataattaaaaagaatacaagcattccatgtacacatgttaattagcagttagtgactgggccaacactttctcataaaaattggccttttacatgttgtctaattatcatttttccccaaattttgcgttgtaggactactgttcgaagatttttggaagaatactgagaacggcataaagtgaagatcgacatttaaaaaatgaggtgaaagaaagctatagtggcatagaaaaagtataaagctcagttagtttttttattattattattattaaaagttaattcaggactgatgtgacctaccagatttcagaacatgtgttaatagtatatatgccactgaaaacttaggtcctgtatcatacttttttctttaagactttttaagaaatattacttaaacatgtggcttgctcagtgtttaattgcaagttttcaatcttggactttgaaaacaggattaaacgttagtattcgtgtgaatcagactaagtgggatttcatttttacaactctgctctacttagcctttggatttagaagtaaaaataaagtatctctgactttctgttacaaagttgattgtctctgtcattgaaaagttttagtattaatctttttctaataaagttattgactctgaactagtcccctgttttaaatacaagagttacactattactagaggtgttggtgtacagttttatctgatttgttctgtttaagactaatttttatagactttctaatgttttaaataatggtgcttcaattttaggtggttatgaataaatttgaattttgcttttaatagcaaagatgtgcagtgaactagaatatatttttacatccctgagagattcatttagtagaaaattccaagtatcctgacaagcactctttagctggctagctatgggatgatgtagaaaagcattcaagagctagtttttgttaagtcctgtatcaagattaacccagctgtgtcagtttataaatgtatttgtgtatagggtgtgtagtatatatggcaagggttttttccccccacttaagtgattatttttgtgtcacatctaggaaaaccggcagcatgtttctatctatagccagcttcttcgactgtataaaagtattctctccagctacgtatatacacacatacatatatatcatagcaattccttg

SEQ ID NO: 18527 - DNA, 2300 bp, Homo sapien
tggattgtgacccactgaataaaataagaatccatgagttcacaatgataataaatgaatgaatggatgagaagtaaagctctttcttttttttattctttgtagagatggagtttcaccatgttggccaggctggtctcgcactcctgggctcaagccatcctcccaccttagcataagccactactccaggcacaactttctgtaagtttgaaactatatcagaattaaaagctacctctcacaggctcacacacaagcaaaactaatacatggataaaagggcccactaagtgcccagcataatgaatggaacaagtcatatgccaaggcctgtgtggcagttgattgtccccccaacacactttgccttcttccttcctaatcggctctgatttttagtaccagtagattttttttaactagaacatgtaatactttaattttaaacattaaaattaactaaaaggccggacgcggtggctcacgcctgtaatcccagcactttgggaggccgaggcaggtggatcacctgtggtcaggagttcaagaccagcctggccaacatagcaaaaccccgtctctactaaaaaaaaaaaaaaaaaaaaaaaattagctgggcatggtggcacacagctgtaatcccagctatttatagggaggctgaggcaggagaatcgcttgaacctgggagatggaggttgcagtgagctgagatcccaccattgcactccagcctgggcaagagcgaaactccttctcaaaaaataaaatgaattaaaagaagaacgtgtgttcccctaaataagaaaaaaatgagtgttgttgagtgaacgtgtgagtgaatgagtgaatcagtgaacggggagtgagtgaatgaatggaccgaacaggtgagcaaaatgagaatgaactgaggctttccctcaagtgccaagccttttcatctacagttcccctgcacctgtagccacacccactcaggggaggaggttcaggatgccttttttatggcggaccacaccctggcagccaggctggccaaagtgcattttctcaggagtccaggccaggggatccctgctacttccgcctctccattgccccaccctgcccttcccctgttcttgcagaaagacacaccagcatgctgggaagacagcatcggcctggcagccaggtgacccaggtccagtgccaggcctgtgcctggctggccacgtgactagtggtaaacatttcacttactaaggcctcgttttccctgtttgctcctttaagcagtttggccaaatcagtggttcacagtcttggctgcacattgaaatcagctgggaacctttcaaaagttctggggctctgattgcatccagaccaactaaatcagactttatagggtgggacctgggcatccacggtttttaaagcttcccaggtgacttcaatgcacaccatgtttgagagccggggggctgcgatctccatagctccctccagctttttttttttttttttggttttttgttgttgttgtttggtttatggtttttttttagtgtttatttatttatttatttatttattttttgagatggagtcttgctctgtcaccaagactggagtgcaatggtgtgatctcggctcactgcaacatctgcctgccaggttcaagcgattctcctgtctcagcctcctgagtagctgggattataggcgcacgacaccacacccagctaattttttgtattttagtagagatgggggtttcatcgagttgcccaggctggtctcgaactcctgagctccggcaatccacccgcctcagcctcccaaagtgctaggattacaggcgtgagccaccgcacccagccagctccctccagttttttgatgctgaggcccaccctgatgccccgtctgtttgcccgtcttttgtcattggagggttaaatgaaatgtgagcgttacccgaacatctgggttcctatctgtgcacctcctcctgtcttcagcctgcctttgaggcagcagcctcactggggactttgaccctccccacccattcttcactgaacctcctgctccagcctctgcctcctccattttgatgtctagaatcaggggatccaggatcatcaccaaggtcattttcccaggtatggaggggtctttctgcttctttcttgtcatgcacagctgctgaggaaggggctgggagtaaagacagtgaaatggggaggaggagtccattcaaaccgagaaacaaagtgtttggtttttcttacccctggtgtagaagc

SEQ ID NO: 18528 - DNA, 2300 bp, Homo sapien
ctcttgcttccttctcagtctcctttgtgccacctccgtgtcagccgctctttaatgaggtgtccccagggtcctgcctcagttctcttcctgcctctccctgctctggttgctctgctcccatggcttcaactctagttaaggtgacaccagctgctattacaggcaaacaccaaggtttcagtggcttaatgtaatagaagtgtatttcttcataggaaatccagttggcctgagttccacaaagtcacaaaagtttttttttgtttgttttttgagacagagtcttgctctgtcacccacccagactggagtgcagtggtgcaatcactgctcactgcagcctcaaccccctggactcaagcaatcctcccacctcagcctcccaagtagctggaactacagatgtgagccactgtgcccagctagttttttattttatttatttatttatttatttatttatttatttatttatttattttttagatggagtctcatcacactgttgcccgggctggagggcaatggtgcgatctcggctcactgcaacttccgcctcctgggttcaagcgattctcctgcctcagcctcccgagtagctgggattatgggcgcctgccaccacgcccagctaattttttgtattttttagtggagacagggtttcactgtgttggccaggctggtctcgaactcctgaccttgtgatctgcctgcctcagcctcccaaagtgctgggattacaggcgtgagccatcacgactggcccagtttttaaattctttgtagagatggtgtctcactatgttgcccaggctggtctcaaactcctgggttcaagtgatccagctgcttcagccttccacagtgctgggattactggtgtaagccaccatgccctgccccctgccatctttgacacatggcttcctcattggccttggacatctgtatccagtcagcagcctggagagaacaaggagaatggtttggaaggttgtgtgggtttttatgatagacaagtacctcacttccacccaccttccactggcccgaactccgcccatggccacatctaacgcaatgaaagtcgggaatgtgatctagcagttcatctggcagtagaggggctggcgttcgatatagcttagatgtttggcccctccaaatctcatgttgaaatatgagccccagtgttaggagtgggcctggtgggaggtgtttgcatcataggggtggatccctcaggaatggcttggtgccctccccatggtaatgagtgagctctcaatctattagttcatgtgggtgctttgtttttgtctgttttttttttttgagacagggtctcactctgtcatccacgctggagtgcagtggtgcaatcacggctcactgaaacttccacctcccaggctcaagtgattctctcacctcagcctcctgagcaggcccacaccgccacacctggctaattttttttttttttttttttttttttttgagacagagtctcactctgtcacctaggctggagtgcagtggcacagttttggctcactacaacttctgcctcctgggttcaagtgattttcatgcctcaccctcctgagtatctggcactacaggtgcctgccaccatgcccagctaatttttgtatttttagtagagacaaggttttaccatgttggccaggctggccttgaactcctggcctcaagtgatctgcccacctcggccctccaaagtgctgggattacaggtgtgagccacggcgcccagcctgattttttttttagagatggcgtcttgctatgttgcccagactggtctcaaacttctggcctgaagcaatcctcctaccttggccacagtgctgggattacaggtgtgagccactgcacccggcctggttatttaaaggagcctggcatcgttctggccatgtggcgtgcctgctcccccttgtcctgtggccctgagtagaagcttcctggggccttccccagatgcaggtgctggtatcatgcttcctgtactgcctgaagaaccatgagccaaacacccctctttctttataaattaccagcctcagtttcctttacagcaatgcaaaatggactaagacagcgttcgtaagcctctagccagtctctgccatgggttgcccaatagccactaagtagccatttcactcttcctcttacacatggaacacactcactgcttcccggagaggcagctgagtccacaccatcactgcctcctggggcctccgccacagttcgggatctcc

SEQ ID NO: 18529 - DNA, 2300 bp, Homo sapien
gggcccacaccacccacagggaagagtgtgagggacacagagtcagacacacagacacaccaagaggagagagagaaggaggcagatccagagccagttccaagggcctctgggagggaggagaagacttcaaagcgctcccaaacagcttataaacaagccagtgggcggggcagccagcatgggctgggggtcgctttctggaggggctggaagcttgcacggggtgtgtggaggccataggcccggggtgggcaggaggagggcccagcctaacctctctgtgactcggtttcctctcccgcgctagggagctccctcctggggctgccgtggggtcagcagcaacgtgcaggtgaaaacactgtgtgggctccaggccgatcagatgttatttattattctgagctgtgttttggtgggagacttggaagggctggagggagagtcagagtgctttgggctcctctctttcccgatgctgctttgagagttctcagagtagaacgtccaggaatggggcccgggaaggagaagtccgtggcttgagacaggaccaggttgggtgtgggggctttctccatcagccccaggagtgggggtaggatggccaagcttcccctgccctgccgtgtgcccctctcctgccctcctcagcaccccccaacctctgctcggtgcctcccctcctccgaccccctctcatctctcccacaccctctaatggtctcttgggactgcccagaaatcggcctcctctccttggatacttgtcctggcctaatggggctgtgacagtttttctaagtcctgcttataaatgtgtcactgtccatgtccctttgtgctatcaaaggaggctgcgcaaaccgcgtttgtccaagggctgtgtgaaggcccccgcgcggagcagctggaacacgggctgatgaaattacggggaattcaaagcagccggcgtcgcccgctgtctggcttcattacggggactggcctcgaagggaagtttattccaataatttagaggattaggatctgacacccttcattagcgatttgacataagcagaaaagacagatcctgcagaatggccgcacaacgggaagggaccagctcaggcggggagaaggcagcacccgcccggctgggaaggggaagggtctgggtgtggaagcgagggtcccgtggccgttttacagtcctgtgagatggcgagctgtgttcttgaaggggaaagtggacgtggggaaggagcggcctgggctcaggcctcagtttccttagctgtaaagcgagattaccttcaggatcccttccgtatctgatgcgtgtgggggccactccacctactgtccccgggacacagcagctcctcaaggcccttgtggtttggccttggaaaggtacctctctttcggggctctatgtgcctccgccccctacccccaggatcgagtgaccaactcgaaaacactcagactgcaggctgctctgtggcattttagatagaagccatttgctgccaaatgggggaggaatcgcccccagcccctggcagcttctggctctcttcccggcccctccacaaatatagcccctgatgtttcaaaaatttcttgtccagtctgtgaaaaccagagtttgggctgtgccttgacagcagttctggcagatggatgggggaggggtgattttaaaaggcccctgcccacacccagcaagctggtgtccctgtttcctgtaccgtggtggggtagctgtgcgacatgggcaggttgcttagcctctctgtgcgtcctttcctccgatctgaaatggaggtgcagtttgttgtgaggattaaatgagatgatgcgttcagagaagccacacgtgtgaagagcccagtgcatctggcagctggtaccaccaggactgctcactctgtgcgaccttggacaagtcgctcgccctcttcgaccacagaccttctcctttgggaagtgggggaggccagacaaggctggcagtcagaaggagctcactgaagagcagccactgtggtcgtcagcgagggcagctggactccggcacaatcctgagacactgtgaccgcggaggttttctcggtgtgtcgatggaagagggaggaatgtgatccgtcccagccgccggcggggccagagcatatctggtatgtgtctctggaatgatttggggaaaattaactgaagttggaacttaagacgcaaactgccctggacacagagatacagagctgtccgtgcgcacaccccccacaaagggccggggccggggt

SEQ ID NO: 18530 - DNA, 2300 bp, Homo sapien
gagtgctttgggctcctctctttcccgatgctgctttgagagttctcagagtagaacgtccaggaatggggcccgggaaggagaagtccgtggcttgagacaggaccaggttgggtgtgggggctttctccatcagccccaggagtgggggtaggatggccaagcttcccctgccctgccgtgtgcccctctcctgccctcctcagcaccccccaacctctgctcggtgcctcccctcctccgaccccctctcatctctcccacaccctctaatggtctcttgggactgcccagaaatcggcctcctctccttggatacttgtcctggcctaatggggctgtgacagtttttctaagtcctgcttataaatgtgtcactgtccatgtccctttgtgctatcaaaggaggctgcgcaaaccgcgtttgtccaagggctgtgtgaaggcccccgcgcggagcagctggaacacgggctgatgaaattacggggaattcaaagcagccggcgtcgcccgctgtctggcttcattacggggactggcctcgaagggaagtttattccaataatttagaggattaggatctgacacccttcattagcgatttgacataagcagaaaagacagatcctgcagaatggccgcacaacgggaagggaccagctcaggcggggagaaggcagcacccgcccggctgggaaggggaagggtctgggtgtggaagcgagggtcccgtggccgttttacagtcctgtgagatggcgagctgtgttcttgaaggggaaagtggacgtggggaaggagcggcctgggctcaggcctcagtttccttagctgtaaagcgagattaccttcaggatcccttccgtatctgatgcgtgtgggggccactccacctactgtccccgggacacagcagctcctcaaggcccttgtggtttggccttggaaaggtacctctctttcggggctctatgtgcctccgccccctacccccaggatcgagtgaccaactcgaaaacactcagactgcaggctgctctgtggcattttagatagaagccatttgctgccaaatgggggaggaatcgcccccagcccctggcagcttctggctctcttcccggcccctccacaaatatagcccctgatgtttcaaaaatttcttgtccagtctgtgaaaaccagagtttgggctgtgccttgacagcagttctggcagatggatgggggaggggtgattttaaaaggcccctgcccacacccagcaagctggtgtccctgtttcctgtaccgtggtggggtagctgtgcgacatgggcaggttgcttagcctctctgtgcgtcctttcctccgatctgaaatggaggtgcagtttgttgtgaggattaaatgagatgatgcgttcagagaagccacacgtgtgaagagcccagtgcatctggcagctggtaccaccaggactgctcactctgtgcgaccttggacaagtcgctcgccctcttcgaccacagaccttctcctttgggaagtgggggaggccagacaaggctggcagtcagaaggagctcactgaagagcagccactgtggtcgtcagcgagggcagctggactccggcacaatcctgagacactgtgaccgcggaggttttctcggtgtgtcgatggaagagggaggaatgtgatccgtcccagccgccggcggggccagagcatatctggtatgtgtctctggaatgatttggggaaaattaactgaagttggaacttaagacgcaaactgccctggacacagagatacagagctgtccgtgcgcacaccccccacaaagggccggggccggggtgggagtcggcttacagggcacagcgcggcgcaggcccgccctggaatggccgtgaacttgttgtttttccacgtcatttgctctcaaatgtactatcaagccgggcgatgctaacccggtggctgcaggtccctcctcgtaacaagcgattgtgtgttctttagaggtggccaaaggggaggagggggcccggccccaaggaggtgggggaaagggaaacaagccctccttcagagtgagcttgcgtgtcctggagccagctccccgcaaagcacatgccatttctggcccttgaaggggttaaaggcctcctggagtcaaaaacaagcaggtgtcccaccgtgccagatacgctgcctaaactgcttccagcttctttttttttttttccccccttctgcaataagtctgtgatcagccacgggacagaggcgccagcagcctgcctgtg

SEQ ID NO: 18531 - DNA, 2300 bp, Homo sapien
aaattaaagacactgagtactaaatgaacttcatcctagtaaataattatgaaccaaattattctatatagtttcggccttaagtatactaagagcatacaatataataaaatccagcttctctgggccttttgttttcaatgtgtatttttctaaatctgaaaatacctattcggcagcaagtataacaaaagcaaagacacaaattaaaactattgattattctgtttaaggccagggtttctgagttttagtctgattttaaaaaacctccgtctgtccctctctccctccctccctctcacggtaacagccggagaggcaagtatggtaaggtcgacctttaaacgtttgctggatcagcactgggtggggataagaaaagatcaagggcaaacagaagatatttgcgaaagggatctatttgcacactgaagttgatttaaaagtacgtttaaaaatcaagttggtcttaattcgtctgttctattttccatattcgtggtgacaaagggaaaaagaatctctggctgcccccaaactacaaacactttccaagtcaaaagcctgagtgccggcagaggcagctgattaagcccaattgcttgaaggtgcagccgagcgaaattcaggctcggtggaaggtagttacaaagcaacgccttaagacaggcaggagtgtgaagaattacataaacagccagttagatctcattagatttctgctcacagccctcggagcccaagcgctacagcagcagcaacagcaagaggaggtggaggtggaggaggaagagagtacgagcctcctcggagaaggaggaggaaggcccgggaaatggaagagcaacctctcccggctgggcacccagcaccgagcaggtcggggcgccgggtcagccgctcccctcccccgccgtaacccgacccgctgctccccgccccgtggcccccgccccgggctcctgggagccggccagagcctgggggagcaccggttcctcggcaccattttcagcctcgcggccaccggcccctcgaaccccagcgttccaccgcgagctcgtcgctcctccgggcaccccaaccccccaattcccgtcagctcgccccgggccgcccgtccccggccaactgcccaggacgagcccgacgcgccggcggcccctcggagccgctcccctcgggtcctggcgctgccccctcggcgcccagggccgcgaccccgccgtccccgagctcccgagggcccagggctcgacgccgctgcagcccctcctccgccgcctgggcccggggctcccgtctcctcgccgaccccgcccggcgccccgagatacttacgggctgcttcggggcggcttggaccacagacccgcggctgggcggggagcagcgcggcagggcgggggcgcgggagggtcgggagcggcgagctcgccgagtgcaagacgttgccgctgcggggctgaggacagaggacagaggcctcgggcaggccttgggagatcgccgttagtggctcggggtggcgggcacgggggtcagacgagcgcgctcacttctccacacagcccggtgcccggcccagcgtccccgtagtgcgcccgctacacgccgggccagagcttcgctccttctgccgcggcgcgcgccccgcctctcgttttatggcctcctccccgcccccatcccctccgtcggggtgcgcgcgcccgctccgcgtcacacagctccggcggcgcagccattccccgcgctccccgcccggcaccccggtcccccgccggccggctccgcccctgccctgccccccgacgccattggccaagtcccgcctgcccctgtccggacgcgcggcggacgcaggggtggggaagccgcaccctccgggctccaggagggccaatgaaccgacgatcggagcactggggacggaatgaagagaacgtctggaaagggactgtgggggcagacgtgccaatgagagagaaaggggtggggtagggcggctgacgcccggtttaggcggagagcgccgggcagagggggagggggacgaagctggtggcgaagcggctcaggagaaccggggctggaggagcggcaagagtacccagaaagtgccctctccgcgggggtctgcggccaaggaggatcctgctcgtggaatagctaccaaatcggcctccagcccaccccaggggcggggtagagaaagggcaaactgtgaccgggacttgtgcacccgattaattgaatattaatcaccccaaggcctaggccaaccgccacccaga

SEQ ID NO: 18532 - DNA, 2300 bp, Homo sapien
cttttggtaaggcattccaaggatatcctgtctagtttcttgaaatttctgtgcttaattagaaaactaaaaataactcacttttattacagatggacttgtcattacagaaaaccaaaaacaaacaaataaaaaaagaaaactgaacaaatcatttatatttgacgctttgatgacatttcaatgcagaggaagggacattttaatttaaatgctttcacagttttgccatactttcacatttcaattccactcctgtttgcaactaaaaaacccaaacactcaaaaaaaaaaaaaaatcacattaatcagaatttaaggagtcacttagtaaaactatgttttaggaatctgtacaataaacatgaaatcagtcacctgaccactccccaccctcagcccattccacaaacccatcttcccaccccttctcctacgcattgagccttcagaaataccctttctcagtgcggttccttctaaaaaggagaggcgggagagtcagggtggagaaggcggctccaaccagattttgcgtccacaaagccaaaagcttctaggcctggcatgtacggcgggtttgtgcccgaggagcacagctggtctacacgggcccgccccgtagacaccctactcctcggtgagctgcggtttaacttccttatagcaggttgagagtgcaggccccaacgtttggaggggaaggcggcgccccaactggtgtttttccaggaagtgctccaagaatggagaggagaggggaaaggggaaaggggaaggccaggcgatgggcgtttcattcattgcttctttctccccgtcccctccttcgctccccccagactttccccttttcccagtccgagtttgacgtcggtctcctggataccaggcagccaatcgcctcgttgcgaagggaccagcgcagccaatcaggcgtcgttgctacctgtgagtaatatttttagctgagagggacgctcgattccactcccgatgtaatttcgtgtatttctctggggcaggttgtgaaaaaggcacttacccgccccccaccacgagtccctctcttaccccactccctaggtacccgcacatatttcagccaagaatgatcttaaacgcgctttacaagcaggcaccgcgtttattctgtgcacctgcgatccagcaagccctagaaatgcacgcatgcgtgtgtgtgtagacatggacacagatacatacgcagtttggcctcgtgtcgccacactctgggcacggcgtgggctgggacatttggaataaacggatccgagtcgcagccggggtcgcaccgggaggcctgaggctgcggaagcagttaaactgccggcggggcgggagctgtggcggcctcccttccccacccccagcccggctccacgtctttgggttctgcagctgccactctctgggtggcggttggcctaggccttggggtgattaatattcaattaatcgggtgcacaagtcccggtcacagtttgccctttctctaccccgcccctggggtgggctggaggccgatttggtagctattccacgagcaggatcctccttggccgcagacccccgcggagagggcactttctgggtactcttgccgctcctccagccccggttctcctgagccgcttcgccaccagcttcgtccccctccccctctgcccggcgctctccgcctaaaccgggcgtcagccgccctaccccacccctttctctctcattggcacgtctgcccccacagtccctttccagacgttctcttcattccgtccccagtgctccgatcgtcggttcattggccctcctggagcccggagggtgcggcttccccacccctgcgtccgccgcgcgtccggacaggggcaggcgggacttggccaatggcgtcggggggcagggcaggggcggagccggccggcgggggaccggggtgccgggcggggagcgcggggaatggctgcgccgccggagctgtgtgacgcggagcgggcgcgcgcaccccgacggaggggatgggggcggggaggaggccataaaacgagaggcggggcgcgcgccgcggcagaaggagcgaagctctggcccggcgtgtagcgggcgcactacggggacgctgggccgggcaccgggctgtgtggagaagtgagcgcgctcgtctgacccccgtgcccgccaccccgagccactaacggcgatctcccaaggcctgcccgaggcctctgtcctctgtcctcagccccgcagcggcaacgtcttgcactcggcgagctcgc

SEQ ID NO: 18533 - DNA, 2300 bp, Homo sapien
aaaaaatacatatatatggattgcaaataaaagggaaaactgattcacatctctgaacattgccagtcacgaggtataaaatgttctttatccaagttctgcatatggcttattattatctaacatttactttggaattgtgcaggggagtggagggctaactgctaattgtgcagggaattagacttatggaggaaaaaagaatttgatattaggctccaagtgtatcacaatcaagaggtattcctctctctgagcaaataacagtcactagaaactacagcctttgcctttcacatccctacattctacacaattcccagtgggcccttacaataaaggtaatcgtttggtaaaaaataacttccaatatcttcataaaatacagttcttgaaagtgccttgaattattacctaatccacacaagaacacacacatgcaacaccttgatttctgagatagagacatcctaagttttctaattcttaatatgcttccttgtaaattgagaaagggttacaggagaatagctatcacatggtgtataattattaatactcattttacttcttttttttttttttttttttttttgagacagagtctcactctgtcgccaggctggagtgcagtggcacagtcttggctcactgcaacctctgccttccgggttcaagtgattctcctgcctcagcctcccaagtagctgggactacaggcatgcgccaccactcccagctaacttttgtatttttagtagagatggggtttcaccatgttggccaggatggtctctatctcttgacctcgtgatccgcccgcctcggcctcccaaagtgttgggattacaggcatgagccaccgcacccggccgactcatttcacttctaaggaatcaaccttttacctttatttgaaaataagacaggcagggcaaggtggctcacatgctcgtaatgccagcattttaggaggcttgaggcgggaggatcccttgagccgaggagttcgagatcagcctatgcaacacagtgagacccctatctctattttatttaaaaaaaaaaaaaaggcgggagtggtgatgcacacctgtagtcccagctacttggaaggctgaggtgggagaatctcttgagacaaggaggtggagaccagcctatacagcatagcgaggccgtttctattttattttcttttattttttaaaaattagccgggcgtggtggcgcacacctgtagttccagctacttggaaggccgaggcaggaggatctcttgagaccaggaggtcgaggctgcagtgagcagtgatcgtgccactgcactccagcctgagcaacagagggaggccttgtctcaaactaacaacaacaaaaaaaccccataatgttcttattgtgatttttatttatttctttttaaacggtcatgcaacataaatcatagcacacacattttaaaattattattaattttttttgagacagagtctcgctctgcgcccaggctggagtgcagctcactgcagcctcccgggttcaagtgattcttccacctcagcctcccgagtagctgggattacaggcacccgctatcatgcccagctaatttttgtatttttgtagagacagggtttcaccgtgttggccaggctggtcttgaactgcagggattacaggcgtgagccactatgcctggcctaaaattaattttttaaatcatgctctagtcattgagttattgaaaaccaagtaaaccagttctcttctaaacatttctcaaaaaaaggcaatccagttacgtctgaggaaacctcagtgtggtttcctgtggcttttcacatgggtttgtagtggagggctatatagtctccagaagacactggcacacagacatttgtaattaaaagataactagataatgttgaacaagcctactaaagcaacgtggtctgataggagaatgtttccttataatttgctcactttctattatcttgatgaacaaaatccaaaccaaatcttgcaatttctttccattagccgaggaggaagattttgatttcagtaaagagattatagtgcgggttctaggagtgatacggtgttcatgacattctaagtacaaagaacatttatataaagtactctgagagcaaatgttattagagtactttaaatacatttaaagcatgggttgcatatgttattatgcagctctgcttactaaaatagaatgtgattttatatatataaccaattgtggcagacactgttgccagctcacccgtttccca

SEQ ID NO: 18534 - DNA, 2300 bp, Homo sapien
acccctcgtaaacacatgccaagcacacactcccctgggcagccacctacctactgaggcacacccagcacaccagactcccacacatatgtgtatgtgccactccctcatacgctggtgtgagctgttgggcaccaccagctacccacggccacagctactcctggtccaccatggcccagcctcttgggctgcatcaggcagatgcacctggcctgagccaggctctggtgggagggtctctggcctggggggggtctctagatcagaggcacaggcggccagacttgaaacgcctcatctcagccaaccccttcactgctcatttgtggaaactgaggcccagagaaggcaaggagtggtcaggggctggtcacgtcacacaggcaaactcctcccaagcgcctccaagtgtctgagagcgtggcagaaaggcgggcagcccaggctccctccgccctcaatgcgctcctcaaatgtcctgactcagtgggtcctcttccatgagttcttccaggatgacgcccaagactgggtgagcttttcaccctctgccctgggtgcaaggtcatttgaagctaggcagggggcacacccactgttgggcctcagccttcacaggctcaggatgttagtgtctcacatagccttggccttgctcagcaaatacccagcgcaggctgcagtcccacaatgcactacaagcctggccctcccactccctgcctcagtctccctccctaagactcacccatcagggccctcagcaactgcctagactgtggctccatcatggggccctaggctccagggaaggactctctttcccttggactgtcagctccacaggataaggatttttgcctggaaaggtgcctggcacctagtaggtgccttaaaaaaaagctgttgaggctgggcaacgtggcttatgcctgtaatcctagcactttgggaggccaaggtggatggatcacaaggtcaggagttcgagaccagcctggccaatatggtgaaaccccatctctactaaaaatacaaaaattagccaggcatggtggtgggcacctgtagtcccagctactcaggaggctgaggcagcagaattgcttgaacccaggaggcggaggttgcagtgagctgagatcacaccactgcactccagtctgggcgacagagcaagactccgactcaaaaaaaaaaaaaagttttgaatggtcctggcgtgcagtggctcatgcctgtaatcccaacattttgggaggccaaggcaggaggatcgcttgaggccagaagttcaagaccagcttgggcaacatagcaagacctctacaaaaatgtttacaattagctgggcatggtggcacatacctgcagtcctagctactcaggctgaggcaggaggctcacttgagcctgggagtttgaggctgcagtgagctttgatcccaccactgcactccagcctgggttgacagagcaagaccctgtctcaaaaataaatacataaaataaaaatgtgttgaatgaatgggccaatcttgcgaccccagcctcctttcatgaggcttctccagaccagaatcaagagttctgggagccgttgggaaaaaccatcaggcaggagccggggtctgccgtggatggctgtgggaccccgacgcaaccaccttcccctatggccttcagctgccatcgagcaacgacggcctggctgttggaggatgcggtttgcagcctgtgattctgggaccacctgtgcaggtgctgccccaaccagggctggctggcccccactggcttgggagagggcacccctttgggcagacacgggctggggagccctatattgtaaataaggcggtcactcagaatagaccaggacattggcaactcgggaagccatcaaacacgagtagctcctgctccccgcttcccccccacccgcactccaccgcccgccactcacatgtggcggggccgccgcaggagcgcagggaggctccgggtcaacatcctgcttcctgcagggcctcccgcggggcgggcgggggagggcgcacagaggggtgtttgttcgcagcgggcggcggggaggagatagatgctaatcgctgcggatcgcccgccccagcttaaggtcaggaggtaacgcgacccgcggttataaataaccgctcagggcggcggccgagggcagcgcgctggacccgcgcccctcgccagccgccgggccggcttgattactgccctccccggcccgaccgcgggcacctgaacgccgacagcagagcacggcg

SEQ ID NO: 18535 - DNA, 2300 bp, Homo sapien
ctctgtcacccaggctggagtgcagtggcatgttcttggctcactgcaactttcgtctcccaggttcaagcaattcttctgcctcagcctccaaagtagctgggattacaggctcccgccaccacagccagctaattttttttgtatttttagtagagacggggtttcaccatgttggccaggctggtctcgaactcccaacctcgtgatccgcccaccttggcctcccaaagtcctggggttaaggcatgagccaccgcgtccggcctagcattgttttcttacggtttttttttttttttgtcacaatacataaatgcattctaattgtttagggggacaaaaagcatacaggaaattttaaggtgaaagccctccttcaccctcccccaaatcacatttctttccctagaagtctcaaagtcaaccatttggtgtttgttttttatatcaattctatctatctatctattctttctttctttctttctatctatctatctatctatctatctatctatctatctatctatctttatctgtgtatctgtttatatctatctaattagctagctatctggctgtctatccatccatccatccatccatccatccatccatccatccacacacaggttgaatatcccttattgaaaatgcttgagaccagaagtgtttcagattttggattttttgcagattttggaatatttgcatatacataaataatgaaatatcttgggcatggaacccaaagtctaaacataaaatttatttatgtttcctgtatactttataacagtgaaaaatatgatataccattagtgcagtaaaaaaaatactgtgttcagcgtgacttatggtatcatatcggcacttaaacactttcagattttaaagcatttcagatttcagatttttggattgggaatgctcagcctgtgcctcacacacatatacagcagcgtgggttccttttagtttaattatattttggtatttttgtttgtttgttttgagacaaggtctcactctgtcacccaggatagagtgcaggggcgcaatcatagctcactgcagcctcagactcctgggctctagcaagcctcctgcttcagcctcccaggtagctgagatcacaggcacacaccattatacctgactaatttttctttagtttatttgtagagacgggatcttgctatgttgtccagactggcctcaaactcctgggctcaaatagtcctcccacctcagcctcccaagtagctaggaatacaggcatgcaccactattcccagctaatttttgtatttagagttgggatgtcaccatgtttcccaggctgatctcaaactcctgtgttcaagagatcctcccacctcggccttccaaagtgctgggattacaggtgtgagccaccagcgcccagcctgattaattataattgtgatcttatttcaacacagtggctctgcaacaacacaaaatccggagataaaatctttctgttaggccaggtgcggtggctcatgcttgtaatcccagcactttggaaggccgaggtgggcagatcacttgaggtcaggagtttgagaccagcctggccaacatgatgaaagcctgtctctactaaaaatacaaaaattagtccggcatggtggtgtgcgcctataatcccgctactcaggaggctgaggaaggagaatcgcctgaacccaggaaggggaggttgcagtgagccgagattgcgccattgcactccagcctgggcgacaagagtaaagactctgtctcaaaaataaaaaataaagaaataaaaaaaatctttctgttgagcactgttacatagtgtggatgcgctagtattgctgttataaggtgatatcctatatagtgctgaagtccaatatcccgttcttagttctttattttttgcattccaggatgaaaacaattgtgtatataagagtaatcatgtttaatatataatatttgggcttgtcttttaatagtctgctaacttgtgcaaattagcacagttttaaatatgaaattctatgtagcaaaagtaactttgtgattggacaatctctcctagaaatcttttgatgcacatcccaggaaggagagccaagtgcgacagcttgcgtgggtgggggatggcgtgtgggtctccattcgcttggattctacgctccgtctctatcatgcacacacttatcaacatctacaggatgtggacattgagccttatgtaagcaaaatgttaggtaagcttccaacgcgttttatcttta

SEQ ID NO: 18536 - DNA, 2300 bp, Homo sapien
tttttgttcctgaaaattcttcctgacacaaggaagctcattatttctgacttgctgatagatgaaaggtgtatttctccaaaactgttgtgtaaatggtggtaaaatctataaatttaaaataaaaagtatgtcaattaaaaaattttaagatactatattcatgtgattctgttttcattctttgtggataacatttgttgtttggactagtcttcattgaggaacagtctggttaatttgttttatttcatgcatcagagttcagctttttgtttatttgatgataaataacatcttaaaattaacttacatttcctaatatttgtacatgccaaataaaatttctacaacaaaagcaagctttgtaaagtgaatttaaactttttaaaaattttattttgttacttaatatgctacagtgcatattttaagttataaagagattgaaatgcatcttaatacagctaaagtttagtgacttccaaagctattctatgtacagcgttaagaattcaagtaatattccttaggaatggtgagaagggacattaaaaaaaaaaagaattcaagtaatattcccaagaaagacatcaacctttgcttgcctcttaatatttacaccctttaaatactaacacactatttcttgttttttaaaattcatttttttcttattcatatcatgttagtatctctagcaaaggccttttgattttatgtcttaattccaaatttaggctttttaaaagtgaaactatatattatcaagaatcaaataggacattagaagttcttggcagtttatgtactttatattcttgaagtttttactttcttattcagcttgtctgtcatatgattccttatctaagactcaaaaagtattctaattttttacatttgtattaatttgctgctgttataatagatgattataccaagtaatgataccagtaacagtcaaaggagaaagtattttaacattctttcaactaaatataccgaaagaagaaacttttcttggtattaaattaattaaattgaaagtgatctttattctgttaattccttttaaaatggaagagatcagcacataaggatatggtttcttcagaagtttcacattaatttctttgttgtgtctcattttagtgaatggctttctcaaatgccatctattatttttaaccaatggtcttttatgacttctttcccagtgtctgtttactaatttgtgttctttatatcaatattattttaatagcatcacatattgtaaaaaaagtgggttttttttttttttttgccatcctaagcaagatattagctacttttgtggacaccagcatccttaaatgtaagcatttgcatattactttcccttaaaatttttttcattccttaatattctcttacttggaatcgagtagtctgatagataagaaaattgtaccaaaatgttttccttgttataacactatgattttattccaggtattagccttaaatattgtgtattttttctttctttaaaatagatgatccataattatatggaacatttagaaagaacaaaacttcatcagctctcagggagtgatcaactagaatccacagctcatagtagaattaggtaagctttgttatatattttgccttgagaaaaagtaaaataaataatatgtttgtttctgtttttctctgttctttaatcctggaacaatagttaggctgattcaaaaagctctccactgtggttggaatgctgcaggagagaatagcacagaaaagtagaaacggtttttaccattaaaaagataaattatgagccatccatataagcagcacattgagtatttagattgttttctgatacttgatggagattatactaggtttaaaattttgtaatttatgggaatgctgaaatattttatttctcccgtgtaattggtttgaagtcctttttgttacagagaggcatgtttgaaagggttagctagccatctgtttggtgtaggagtgtgaataaattatgtagatcttcaggcattgtagccaatgagctaagccaggactcttagtggaggggaaaatagttaataggctggctgtcgcttggggttgctgcataaatgctaggagcagcagctctatggttatgaggtggggagaacggaatgacgtcatcgcttgggagctgctgcaggatggagtggaaagctgctgctgatggcattgtttttgtggcagcaagctgaatgacagatcctcactacaaagatacccctttggcc

SEQ ID NO: 18537 - DNA, 2300 bp, Homo sapien
atggagtctcactctgtcgcccaggctggagtgcaatggtgtgatctctgctcactgcaacctccgcctcccaggttcaagctattctcctgcctcagcctcttgagtagctgggattataggtgtgcaccaccatgcccgactaatttttgtactttttagtagaaatggggtttcaccatattgttcaggctggtcttgaactcctgaccttgtgatccacccgcctcggcctcccaaagtgctgggttacaggcatgagtcaccacgcccggctgatacttttttctttaaattttttgatgtgtatgataatattgtggaaagaaaaagtaaagccttgccctatgttttttggctcttctgatcccccaggaaaagagaggcatgcatataggtagaccaggtgagtgacagccctcaggaagagaaaataaaagaggagagattcagatcaagactttttctagttttcaaatatgaaaggttaagaagagaaagggcatttgcggctcacagccaaccagctggtcggcattcctactacccaaatatctaaatgacataagggtgaatgtggggtgagggtgagaacgggaaaaaacacaggccgcaaattcagtcccatctggcacttcataagacttagtattttcatctttgtccttccaaatttataggtttactcttgcccaaccttcatattgtttttatgggtctccaggtgggtcatgcgtaggaaactttaggggactacttcatacttggtgggaagtacttaaacttgtaaaccccaagctaagggtagttatgatcccggtgggtggccaattctccccttaaacctatgtttatcctgcctttcctcccccttttcttaaacgagtcgggacggagagctgagtcacctgagacacagagaagggacttttgagagtgtcttccgtcccatttgcggacgttagatgagcacaccgggatccttgactcagcccgctctaggcgtgggcgttgtgtcattccccacacgtgacactctcccaggcggcagaaacctcacttgtcatgggacttattcactccagtgactccaccccttacctcctctgttccccaacctcccacttaccctttccgccccacttcaagacttgaggagaggagggtggctggagcctggaaatgtccccgtcccaagttggccagaagtagcagacacactatgtgggaaagtgccacatgtaacgttccagtttcacccttctccagaatgctatcacccttcctgtttattttttaataacttgagatataattcacacgccatatgattcactcacttaacgtgtaaagttgaatgtcttttagcatatttagagttgtgtattcatcactataatacattttttagaacatttttattatcccaaaacgaaatcccatacctattagcagtcactcccatttcccctcatctcacccttgctcttccatagcacaaaacagttctattctattcgagaccacctttccacttgggcagaccctggttatggttttttttccctccctttctgtttccagtttttttcggagcccggaattctcaatctgggtaattggtttgagtcccggctcagcccgtttcccgttgtagctgcgtgaccttgagagcaacgccactttcctgggcctagtttctttgtctgtgaaacgaggtccaaatatctacctctttacgcctgttgtggggatgaagtgagtaggtgctttgtgagctttaaaaagccatagaaatgccagctaagttaactcgtcactcttcccgaacccctccctttcccctgggacccgccccgcgaatcccgctgtggatggatacttctccccacccgccgaccgcagtctttcccattggcgcccgcaccgtcttcgcggcgccgggtgttgacgccatggcttcctccgccagcgcccgaagacgcttggccccgcccccggccgcgcctggcctcccgcggcgccccgcccatcgggccgacgcggcgccggccccgccccgcggatgacgtgtggcgcgcgcggccgggccgccccggcagttggtgcagcggcggttggggtgagagcgcctacgccacccctcccctcctccggccccggcccccaccccgccgggcccagccccagccccggcccgggctccagccctagtacccgtcccagcccgagtcgggtccgtcccgtgcgggcaggtgccgcccctctgccggcgacgccccgggccgcccgcccgtccg

SEQ ID NO: 18538 - DNA, 2300 bp, Homo sapien
ctgtagtcccagctactcgggaggctgaggcaggagaatcacttgaacgtgggaggcagaggttgcagtgagctgagatccgccaaggcactccagcctgggtgacagagcaagactgcatctcaataaataaataaacaaataaataaataaaggccgagcacggtggctcatgcctgtaatccctgcactttggtaggccgaggcagatggaacacttgaggtcaggagttcgataccagcctggccagcatagtgaaaacccgtctctactaaaaatacaaaaattagggccaggcgcggtggctcatgcctgtaatctcagcactttgggaggctgaggcgggcggatcacgaggtcaagagtttgagaccaacctggccaacatggtgaaaccccgtctctcctaaaaatacaaaaagtagccgggtgtggtggtgggcacctgtaatcccagctgctcgggaggctggggcaggagattcgcttgaacccgggaggcggaggttgcagtgagccgagatcgcaccactgcactccaccctgggcgacctggcaaggctccgtctcaaaaaaaaaaaaaaaaaaagaaaaagaaaataccgggcgtggtggcagacgcctgtagtcccagctacgcgggaagctgagtcacgagaatcgcttgaacccggatggcggagtttgcaatgaaccgacatcgtgcaactgcgctccggcctgggcgccaaagcgatactcggtctcaaaaagaaaaaaaagaaaacaggagaataatgaaattttacttatttattttatttattttttatttttttgagaccgagtctcgctctgtcacccaggctggagtgccctggcgcaatctcggctcactgcaacctctgcctcccgggttcaagcgattctcctgcctcagcctcccgagtagctgggactacaggcgcctgcaaccacgcccggctcatttttgtatgtttagtagagacggggtttcactatgttgcccgggctggtctcgaattcctgagctcaagtgatcctcccgccgctgctttccagcgtgctgggattacaggcgtgagccaccgcgctcggccaaaagttttaaatttcagtaagttccaatttatcaactttttccctgtatagattggtcttttggtgtcgtctaaaaactatttgcctggccctaggtcctgaggattttttttaactttttttttccccataagtgatttattgttttacatttaaatctatgattcattttgagtaaattttgtataaggtgagaggtttaggttgaggttctttgggtctatattcgtccaattgctccagcatcatttgttgaaacggctcctgattccatttttgtacctttcccccgttcatttccccttagagcagtgggaatgtttttttgttagtgatgatgtcatgccttgtgcaaaatctgtattagcatctcacaacataagatttggctctattctaacggcattttccaccactcgatgtccaccgtaatacttggctctcgaagaatcactgggctggctccctcacttcatgcaggtctattctattatcacttactcagagatttctctggccttttcttcacagcacttacaaaatgcgatctattacatattaatttgcttatttgcttcttgttttcctatactcccatccctcccagaagctccaagagagcatactgttttatccctagggcctagaataatgcgtccacgtagtaggtactcaaaattttttgcttgacaggctagaaaaggtgaataaacacaaagcgggagcgaaaagtctacttctaggtcaggcactctttggacttcacgcaacgtgtgagcgccacctctcgggaagccaatttgctcgcgaacgaaggaagtgagtcagagaacccgggggtggagagaagaaagcaagcagctaaccggaaaggtctgaaaaagctagcgccggaagttaaactgcagaaagttgttccctagaatgactgcctactcccaagaggaagcgtgggcgagcggtgttctgcaaaatgggctctccggcagcggatctgcgcagaagcgttccgtgcgtgcaagtgctgcgaaccacgtgggtcccgggcgcgtttcgggtgctggcggctgcagccggagttcaaacctaagcagctggaagggtaagaggtgttcgggatcctgagaggaaaaagaaaggagtgtagtcgcgggagtgggttaggtgaggagttagtgaagagatgagttcagctcta

SEQ ID NO: 18539 - DNA, 2300 bp, Homo sapien
ttcctctcacatcccactggctagaacttagtcatatggctgcatctagctgaaagagaaattagaatttttttttttgcttttgagatagggtcttgctctgtcgcctaggatggagtgcagtggtgtgatgacagcagctcactgcagcctcgacctctctgggcccaagtgatctcctatcttagcctcctgagtaactggggctacaggcacgtgccaccacgcccaactaatttttgtattttctgtagagatggggtttcatcatgtttcccaggctggtctccaactgctgggctcaagcgatctgcctgcctgggcctcccaaagtgctgagattataggcgtgagccactgcgcccaccctgagggtttttcttttttctttttccttttttttttgagacaaagtctcgctcttgtcgcccaggctggagtataatggtgcgatctcggctaactgcaacctccgcctcccgggttcaagcgattctcctgtctcagcctcctgagtagctgggattacaggtgtgtgccaccactcccggctattttttgtatttttagtagagacaggttttcaccatgttggccaggctggtctcgaacttctcacctcagatgatccacctgcctcaggctcccaaagtgctgggattacaggtgtgagccactgcgactggccacctgagggtttttcttatctttccttttcatctggcttcggtagaggcaatagaggggaagagacttctcaggatgggggagaagagggtagttggggtgggctgcctttacagacagatgatggcgagatgaatttttttttttaatttagtttttttttttttttttttttttgagacagagtcttgctctgtcacccaggcgggaatgcagtggtgcaatctcggctcactgcaagctctgcctcccgggttcacgccattctcctgcctcagcctcctgagtagctgggactacaggtgcccgccaccatgcccagctaatttttttgtatttttagtagacattgggtttcactgtgttagccaggatggtctcgatctcctgacctcgtgatctgcctgccttggcctcccaaagtgctgggattacaggtgtgagccaccgcacctggccccctttttttttttttttaatttttgagatggaatctcaatctgttgcccaggctggagtgcagtggcacgatctcagctcactgcaacctctgcttccggggttcaagcgattctcctgcctcagcctcctgagtagctgggattacaggcatgcgccactacgcccggctaatttttgtatttttcttggggacggggtttcaccacgttggtcaggcttgtctcgaactcctgacctcgtgatccacccgcctcggcctctcaaagtgctgggattacaggcgtgagctaccgcatccagcctgaatttctattaatacttttacacaaagcgtggcctgtttgttttggggcgtgagatgagcataccaggacttgggggaatgaacatgtgtgtagtgaagctggagggttacagcctccccagttaaggacagtcttcccaggaaggaaagaagaggtgaaagcagaggggtggtcctgactgtaccctgagtagccatcagtgacctgaccaaggggagcagatagctctcccctggacagagaaaagtccgtgcaatttcgagacctgttttcacagttgacatttggtaatccaaatgagagtgtgtttcagatcgaagccaaaaaataacagtgcccccagatgagggcacatgacagtcattgtcaatgtgtggtgggctaatgctctgtaactagaagtttggaaagccgataaggtataacagaggccagattgtcatccatctggccagtgacaggtgatcagcgcagtgctaggggcactcgggtgatggcatgattgctgtggtcagctcagagtcctgaggggaagcaagcgggctctcaccatctcagggcagtaccactgctgtgcggctgtcagtcagtgctgcaggcgccgagaggaggggcttgtgaccgccccagggaagctgggcatcaccaaagggagcttgtttgccagggacactgcaagtaggaagtgtctacaggtcgatgacaggcctaatctctatgacagggtctagactttcctcagggtccaggggcgcacctcagggtgaactggaaaactcgaccgcactttagtgccaggtgggcagggatccccatgtcagggtgggagtggggcggctgattggg

SEQ ID NO: 18540 - DNA, 2300 bp, Homo sapien
agagacttctcaggatgggggagaagagggtagttggggtgggctgcctttacagacagatgatggcgagatgaatttttttttttaatttagtttttttttttttttttttttttgagacagagtcttgctctgtcacccaggcgggaatgcagtggtgcaatctcggctcactgcaagctctgcctcccgggttcacgccattctcctgcctcagcctcctgagtagctgggactacaggtgcccgccaccatgcccagctaatttttttgtatttttagtagacattgggtttcactgtgttagccaggatggtctcgatctcctgacctcgtgatctgcctgccttggcctcccaaagtgctgggattacaggtgtgagccaccgcacctggccccctttttttttttttttaatttttgagatggaatctcaatctgttgcccaggctggagtgcagtggcacgatctcagctcactgcaacctctgcttccggggttcaagcgattctcctgcctcagcctcctgagtagctgggattacaggcatgcgccactacgcccggctaatttttgtatttttcttggggacggggtttcaccacgttggtcaggcttgtctcgaactcctgacctcgtgatccacccgcctcggcctctcaaagtgctgggattacaggcgtgagctaccgcatccagcctgaatttctattaatacttttacacaaagcgtggcctgtttgttttggggcgtgagatgagcataccaggacttgggggaatgaacatgtgtgtagtgaagctggagggttacagcctccccagttaaggacagtcttcccaggaaggaaagaagaggtgaaagcagaggggtggtcctgactgtaccctgagtagccatcagtgacctgaccaaggggagcagatagctctcccctggacagagaaaagtccgtgcaatttcgagacctgttttcacagttgacatttggtaatccaaatgagagtgtgtttcagatcgaagccaaaaaataacagtgcccccagatgagggcacatgacagtcattgtcaatgtgtggtgggctaatgctctgtaactagaagtttggaaagccgataaggtataacagaggccagattgtcatccatctggccagtgacaggtgatcagcgcagtgctaggggcactcgggtgatggcatgattgctgtggtcagctcagagtcctgaggggaagcaagcgggctctcaccatctcagggcagtaccactgctgtgcggctgtcagtcagtgctgcaggcgccgagaggaggggcttgtgaccgccccagggaagctgggcatcaccaaagggagcttgtttgccagggacactgcaagtaggaagtgtctacaggtcgatgacaggcctaatctctatgacagggtctagactttcctcagggtccaggggcgcacctcagggtgaactggaaaactcgaccgcactttagtgccaggtgggcagggatccccatgtcagggtgggagtggggcggctgattggggctggaaatgtaggtggggaggcggcagccagggagcagggcatcctgcgagaagagcatcccgctaaggagtctgaacgccatcctgtaggcgggggagtcatcaaggcagggcagaggcaggaccagatggccgtttgaggtgctgagcaaagctcccggtttgcgcggagaggtgagatcgaggccccttgggaggccgaggcttaaccagggctcaagcagaggggagggaaggctggatttcagaggtagggaggataaggaccgtgggtgcacgacggggagggagagccaagtcaaggttaatgccggtgctcgggcggatggtgaaagcagcagatggccttgaccggggtagagaactcgagcacaggagcaggttctgtgtgtgtgtgtgtgtgtgtgtgtgtgtaggagcttttggggtcacgggaagtactgagaggtgaggagtgggatttgggacgtgcgtagttgaactcataggacgtccaggtggagaaggaatcacttcctgtctctggatccgtctcgatctctgcctggcgagggcgcgccccggctgggcgtggacactgttctccggccgcgtcgggccgggcgggtggggcgttcctgcgggttgggcggctgggccctccggggtgtggccaccccgcgctccgccctgcgcccctcctccgccgccggctcccgggtgtggtggtcgcaccagctctctgctctcccagcgcagcgccgccgc

SEQ ID NO: 18541 - DNA, 2300 bp, Homo sapien
tgcccgccaccatgcccagctaatttttttgtatttttagtagacattgggtttcactgtgttagccaggatggtctcgatctcctgacctcgtgatctgcctgccttggcctcccaaagtgctgggattacaggtgtgagccaccgcacctggccccctttttttttttttttaatttttgagatggaatctcaatctgttgcccaggctggagtgcagtggcacgatctcagctcactgcaacctctgcttccggggttcaagcgattctcctgcctcagcctcctgagtagctgggattacaggcatgcgccactacgcccggctaatttttgtatttttcttggggacggggtttcaccacgttggtcaggcttgtctcgaactcctgacctcgtgatccacccgcctcggcctctcaaagtgctgggattacaggcgtgagctaccgcatccagcctgaatttctattaatacttttacacaaagcgtggcctgtttgttttggggcgtgagatgagcataccaggacttgggggaatgaacatgtgtgtagtgaagctggagggttacagcctccccagttaaggacagtcttcccaggaaggaaagaagaggtgaaagcagaggggtggtcctgactgtaccctgagtagccatcagtgacctgaccaaggggagcagatagctctcccctggacagagaaaagtccgtgcaatttcgagacctgttttcacagttgacatttggtaatccaaatgagagtgtgtttcagatcgaagccaaaaaataacagtgcccccagatgagggcacatgacagtcattgtcaatgtgtggtgggctaatgctctgtaactagaagtttggaaagccgataaggtataacagaggccagattgtcatccatctggccagtgacaggtgatcagcgcagtgctaggggcactcgggtgatggcatgattgctgtggtcagctcagagtcctgaggggaagcaagcgggctctcaccatctcagggcagtaccactgctgtgcggctgtcagtcagtgctgcaggcgccgagaggaggggcttgtgaccgccccagggaagctgggcatcaccaaagggagcttgtttgccagggacactgcaagtaggaagtgtctacaggtcgatgacaggcctaatctctatgacagggtctagactttcctcagggtccaggggcgcacctcagggtgaactggaaaactcgaccgcactttagtgccaggtgggcagggatccccatgtcagggtgggagtggggcggctgattggggctggaaatgtaggtggggaggcggcagccagggagcagggcatcctgcgagaagagcatcccgctaaggagtctgaacgccatcctgtaggcgggggagtcatcaaggcagggcagaggcaggaccagatggccgtttgaggtgctgagcaaagctcccggtttgcgcggagaggtgagatcgaggccccttgggaggccgaggcttaaccagggctcaagcagaggggagggaaggctggatttcagaggtagggaggataaggaccgtgggtgcacgacggggagggagagccaagtcaaggttaatgccggtgctcgggcggatggtgaaagcagcagatggccttgaccggggtagagaactcgagcacaggagcaggttctgtgtgtgtgtgtgtgtgtgtgtgtgtgtaggagcttttggggtcacgggaagtactgagaggtgaggagtgggatttgggacgtgcgtagttgaactcataggacgtccaggtggagaaggaatcacttcctgtctctggatccgtctcgatctctgcctggcgagggcgcgccccggctgggcgtggacactgttctccggccgcgtcgggccgggcgggtggggcgttcctgcgggttgggcggctgggccctccggggtgtggccaccccgcgctccgccctgcgcccctcctccgccgccggctcccgggtgtggtggtcgcaccagctctctgctctcccagcgcagcgccgccgcccggcccctccagcttcccggtaaggcggtgggggcgcatcccctggcgactcctcccgttccctcttccgcttgcgctgccgcaggtgggcccggtctgtgggcgccccccgatttcccgcaggtcccgcgcggcgtcggagcgggagattcccttgcagcttgcgccccgcgggccttcgggctccgcagagggacgccggccctgcgcggggcggaagcggccgggaagccacgtgtcc

SEQ ID NO: 18542 - DNA, 2300 bp, Homo sapien
gttagcactaaaggtataaacctcagtcacttgctctttgaacattaaattatcttctcttaccatataaatagcaatgcttggcaacctgcatgagtaaataaccactggttctatctactgtaagaaggaatcaagtatccaccacagcctatattttaacatcttgtgggatataattttttattaacatattaatttgcatattgctgttgtagtctatgccagctctgctacccatattagataactacattgtagcagaactccagaaaaaaattctcatgttaaaattcttgtatgtttcctctgctttaataattttctaaaccctcaatgtttacttaagcagaatgtgtagtatgcagtccagttaaattgtggtggtgaggggatgaaaaagaatcctatttacttaacttttcttgttttagggtaagcctccaacaaagaaagcaaaagttcttcagaaacaacctttagttgctaagctagccgcatatgctcagtatcaagctaccttgcaaaatcaagcaaagacaaaagcaggtaatattggtgaatctgacagaggtgaaatatatgacattgattcatttagttttaattaatgacattgtaattttgaattctgtttaactagctgtttctatgtcctgtcagcacattacagctctaagcttcctaatagttgttttgatttcaataaattactctagaagagtatagttgcatgcataagttcaagtgcttttggcagtctccttaatgtttttatttggtttattatttacttttcatgtacagattctttgaattgtgaagatattaggcaaagaaatgggatgttcagcaggcttcaaagggattgagggaagaagagtagtaagaggagattaaggaaaggaccatttccaatagatttttttttttttttttttttttttttggagacagagtcttgctctgtcactcaggctagagttcagtggcgtgatctcggctcactgtaacctctgcctcatgggttcgaacaattctcatgtctcagcctcccaagtagctgagactacaggcgcacgccaccacacttggcttatttttgtatttttagtagagatagggtttcaccatgttggccaggctggtctagaactccagacctcaaatgatccacccacctcagcctcccaaagtgctgggaatacaggtgtgagccacagcgcccagccagaagatttttaatagaagtaaatagaaagtgaagcaataagtgagtaaataatgaggagagcaataagagagtaaatagtgagaagggcaataagtgagtaaatagaagaggcaataagtgagtaaatagaagtaaatagaaagtgaggtaattaaaagtgatatggggtaggtatctcactgaggtacatggcaagaactgaatggaaataaaagcacaaaagcagccacaacagtgtttgtcattctgtacacttctctcaacttctctttgttccccttaaccaaagagcttgtacctcacttcctcaggagcatgtgtcatgtatagaacagttaagaaactcctggccaggcgtggtggctcacacctgtaatcccagggccaagacaggtggatcacgaggtcaggagttgaagaccagcctggccaatatggtgaaaccccgtctctactaaaaatacaaaaattagctgggtgtggtggcatgcacctgtagtcccagatgctcgggaggctgaggcaggagaatcacttgaacctgggaagcagaagttccagtgagccaagatcatgccactgcactccagcctaggtgtcagagggagactcagtctcaaaaacataaagaaactcctgtttgtttgcaaatatgatataagccaaagctcatgctatttagagaagttatttgatctttacataaagaaaacgttctttaaatgggataaattaattttatgtcctttcacacattttaacaatgataaccttcttataaataaaagatttgagaattataatacatctaaatttgtttcattttagcagtctccatggaaggtttcagctggggtaactacatcaatagcaatagctttatagcagctccggttacctgttttaaacatgtaagtacagaatttctcaccttattttgaagtacttagtcattgtttaaatctgaaggtacaataacacctaagcatcttatccttagaaggtgtttgtttttatgtcttgtaactgaaatgcttcttttattattatacttaataatagttaa

SEQ ID NO: 18543 - DNA, 2300 bp, Homo sapien
agaattaaaaatattgtaaactctaaacaagtattaaaatggttcgtaaatttcaaatctcataaaagatagttacttaaaaaaaaaaaagaaggagtaaaagcatttggaagagaggcccttggaggaaagactagcttccgaggaacacaggtcaaatacgggtgtgggcggtaatcatctaatcatccctctaccaggtgatgcttctaaccacttcagttttagacatccttagaagtgatttaggtaataaacaaatgtgttttgtgatacaagaaccacggagatgacgctgaaatttctaacttcaaaaagatgcactcctaagagaaaacaggcacgaaattcccatattgtaattctttagcttcctgtagaaaaacatcttcaggcatgtaagccagcacacttgacactgacccagcaaagttttcggctagccctcactatctctcaaccccccttcctccacttccctgctgttctttcttggcacacaaaatataggccaatgagcagtgggtgggtgaggaggatgtgagagaaaatttgagaagtaaaaaaaggagcaacttaaccaggacatgaatgagactgaagggtctaataagggtaggcagacaacaattagaactactgaaatatgggctttcctgggcagtagtgagctctcagtgcttttaggggtgtaagcagggttcagactacctaccacttgtcagagaggctgcagaggggacggctgctttggatgacctctaatgtctcttccgactctgaaatgttaggattcttatttcacaaaggagaacgcaatggtcacagaagtccaccgacttgaaacccttttaaatatgcagccttggaggctgcttcccaaacaccactcccacctctcccgcacgtgcccaccccgccccctttcaatatttccacctccacgtgcaaaccgcctcgcggcactgcccccaaggcagatagacaccttcccctgcaaagcaacgaaactgtgctccccctccccgccaagaagagaggactactccactctcccaccctgggtggctaaaaaaggaaaagtctcggatccagcctttcccccctagccagagcagggggcgggggcaggacgcagagaaaaactttcttctcgaatttttcttccaaagggtggaggagatggagagaaccccaacgagtccaaggctgacggggtggggggaggggaacccctgaatcgtttaacggctggaagggggaggggggctccggaggttgagagggcgtgggatggagaagcaggccagggagcggggtcagggagctgcggggttcctggggtcggagagctgcaggcgtcccccccacctggcacacaaagcggctgccgcgctcggctctcaccagatcctttgtgttttccatcagggcctcatgggtaggggttgtccgtgctccccgagcccgcggcgccccctccccgggctgggggcaggtgcctctccccgggactgcggcgactacagggggcccccggctgggcccagaccggtggcgggtgcagcagcccccggatttcccccctttaactcgggtggccccaggatatcaacaacattagcatagccctccctccccagcgcgcctgcgccgtgacccgcgccccgattggcccacttccctacataccctcctctctcgcttccaccgtgggaccctctgcaggctccgtactccaaggaccgtaccaagacgaagggtggaaagcgtattggggcttgtgtcaagtcaagtggttacagccaagaggaaaagcagaagttccattcagccgtcccagtgtatagtcggggtttcttgcgctcctttcaatatgttgcagctgcgaaattgtgttggaaaaattttccactccagtcacgccgcttccccctacacccggaagattggccctcccggaggaactcccacacggggcggggctgggtaggggagcgggagttacgtagagggagggagtgctggtcacgtggcaagaggctgcgcaggctccttccggcccccggggcttcggcggcggcggcccgcgaggggcctgggcgcatgcgcagcgaggttccacgtgagcgcctgcgtttctcctcaaacctaacgatgccgccggagcggaggagacgaatgaaactggaccggagaaccggagcgaagccgaagcggaagcccggaatgaggccggactggaaagccggagcggggccaggcgggcctccccaaaagcctgccccttcatcccagcg

SEQ ID NO: 18544 - DNA, 2300 bp, Homo sapien
tgcactccagcctgggcgacagggcgagtctaaaaaaaaaaaaaaatctaaacctagaccacagaatatcccttgaagtgagtttgagcttcccaaaaccaatgatagaaatgtccaagtggtttctacttgctctactactagtctaatagccttcaaacccaacagctcccacctccgtacactgttccttttccagacgacaaaaccgtcgcacagttcagcatgtttccagtaatagttctgtacttcccaaaaagattgctgccacttctcctacaagcacccgaaggcggctctggtaagcagctgacattaactaggtcagcatttgtgtaataaacatggcctgggtaattctcggtgagctttcctctgccccctttatctaaaatttcacaggcctctacacacgcccatctccctttcccgaatgtccttttttctcttcagcacttgtcaccaacaaacctgaagtttactcgtttatctcctctatcttgtctctgccactagcacacaagcgccaaaaggcagggatttttgtcagttttgtccattgctgtgtctcctccagtgcctagaacaatgtccgggactctctcaagaaaagcctggtatagaatttaaagggatagcaaaatgtgtgcaaaaagtatgatcaatcacgcagggtttgccattgccagaaagggtatctggcaactaacaggttcaccaatatttgctaaatgaacggaatacacgatcattctcaaaacatggtgggtctcatagtcacatggggacatagttacaacggagatgcccaggcccgtgcccacgaattgattccatcaacgaaatcgaattcctgaatcacaaggaactgaggcaggtgatcaaaagaccaccctcagtttgggaagaggctagcggagtcgagcagcagcgaaagatgctcacgaccacagttcgcaaagcagatacccgagcagcggcgcctccaggggcggagaaagacgcggtccccgccctccaggcactttcagtctggagcagggaggcgagggacccgcagctgcgaccctccgcgcccgcgttctcgggctccctcccacctgagcgctccccgccgccgcaggtcgcccaggctccgccccccggagcttcaccgcccaccgcgcgccccgcccgagtgcgcccagcccgcgcgccgcggcctccctcaccctcgggcctcgcagacgccgcagcaacgcgtcctcgtcgttctcgacgtcgccgaagaccagctcctccaagcaccgctccacggccggtttgtcctcctccagcctcaggcggttccgctgccggagccgtctctcttcctccgccgccgcgactgcaatcgcagcggccgccgcgctcggccgggccggcggtttccgctgggatgaaggggcaggcttttggggaggcccgcctggccccgctccggctttccagtccggcctcattccgggcttccgcttcggcttcgctccggttctccggtccagtttcattcgtctcctccgctccggcggcatcgttaggtttgaggagaaacgcaggcgctcacgtggaacctcgctgcgcatgcgcccaggcccctcgcgggccgccgccgccgaagccccgggggccggaaggagcctgcgcagcctcttgccacgtgaccagcactccctccctctacgtaactcccgctcccctacccagccccgccccgtgtgggagttcctccgggagggccaatcttccgggtgtagggggaagcggcgtgactggagtggaaaatttttccaacacaatttcgcagctgcaacatattgaaaggagcgcaagaaaccccgactatacactgggacggctgaatggaacttctgcttttcctcttggctgtaaccacttgacttgacacaagccccaatacgctttccacccttcgtcttggtacggtccttggagtacggagcctgcagagggtcccacggtggaagcgagagaggagggtatgtagggaagtgggccaatcggggcgcgggtcacggcgcaggcgcgctggggagggagggctatgctaatgttgttgatatcctggggccacccgagttaaaggggggaaatccgggggctgctgcacccgccaccggtctgggcccagccgggggccccctgtagtcgccgcagtcccggggagaggcacctgcccccagcccggggagggggcgccgcgggctcggggagcacggacaacccctacccatgaggccctgatggaaaacacaaaggat

SEQ ID NO: 18545 - DNA, 2300 bp, Homo sapien
aaaaattagccaggcgtggtggcgcacgcctgtaatgccagctactccagaggctgaggcaggagaatcgcttgaacccaggaagtggaggttgcagtgagccgagatggcgccactgcactccagcctgggcgacagggcgagtctaaaaaaaaaaaaaaatctaaacctagaccacagaatatcccttgaagtgagtttgagcttcccaaaaccaatgatagaaatgtccaagtggtttctacttgctctactactagtctaatagccttcaaacccaacagctcccacctccgtacactgttccttttccagacgacaaaaccgtcgcacagttcagcatgtttccagtaatagttctgtacttcccaaaaagattgctgccacttctcctacaagcacccgaaggcggctctggtaagcagctgacattaactaggtcagcatttgtgtaataaacatggcctgggtaattctcggtgagctttcctctgccccctttatctaaaatttcacaggcctctacacacgcccatctccctttcccgaatgtccttttttctcttcagcacttgtcaccaacaaacctgaagtttactcgtttatctcctctatcttgtctctgccactagcacacaagcgccaaaaggcagggatttttgtcagttttgtccattgctgtgtctcctccagtgcctagaacaatgtccgggactctctcaagaaaagcctggtatagaatttaaagggatagcaaaatgtgtgcaaaaagtatgatcaatcacgcagggtttgccattgccagaaagggtatctggcaactaacaggttcaccaatatttgctaaatgaacggaatacacgatcattctcaaaacatggtgggtctcatagtcacatggggacatagttacaacggagatgcccaggcccgtgcccacgaattgattccatcaacgaaatcgaattcctgaatcacaaggaactgaggcaggtgatcaaaagaccaccctcagtttgggaagaggctagcggagtcgagcagcagcgaaagatgctcacgaccacagttcgcaaagcagatacccgagcagcggcgcctccaggggcggagaaagacgcggtccccgccctccaggcactttcagtctggagcagggaggcgagggacccgcagctgcgaccctccgcgcccgcgttctcgggctccctcccacctgagcgctccccgccgccgcaggtcgcccaggctccgccccccggagcttcaccgcccaccgcgcgccccgcccgagtgcgcccagcccgcgcgccgcggcctccctcaccctcgggcctcgcagacgccgcagcaacgcgtcctcgtcgttctcgacgtcgccgaagaccagctcctccaagcaccgctccacggccggtttgtcctcctccagcctcaggcggttccgctgccggagccgtctctcttcctccgccgccgcgactgcaatcgcagcggccgccgcgctcggccgggccggcggtttccgctgggatgaaggggcaggcttttggggaggcccgcctggccccgctccggctttccagtccggcctcattccgggcttccgcttcggcttcgctccggttctccggtccagtttcattcgtctcctccgctccggcggcatcgttaggtttgaggagaaacgcaggcgctcacgtggaacctcgctgcgcatgcgcccaggcccctcgcgggccgccgccgccgaagccccgggggccggaaggagcctgcgcagcctcttgccacgtgaccagcactccctccctctacgtaactcccgctcccctacccagccccgccccgtgtgggagttcctccgggagggccaatcttccgggtgtagggggaagcggcgtgactggagtggaaaatttttccaacacaatttcgcagctgcaacatattgaaaggagcgcaagaaaccccgactatacactgggacggctgaatggaacttctgcttttcctcttggctgtaaccacttgacttgacacaagccccaatacgctttccacccttcgtcttggtacggtccttggagtacggagcctgcagagggtcccacggtggaagcgagagaggagggtatgtagggaagtgggccaatcggggcgcgggtcacggcgcaggcgcgctggggagggagggctatgctaatgttgttgatatcctggggccacccgagttaaaggggggaaatccgggggctgctgcacccgccaccggtctgggcccagccgggggccccctg

SEQ ID NO: 18546 - DNA, 2300 bp, Homo sapien
gaagaagggcattctgggcccaggggaaagactgagctttttagttttctccagatgggtttttttttttttttttttgagacagagtcttgctctgttgcccaggctggagtgcagtgtcacaatcttggctcactgtagcctctgcttcccaggttcaagcaattatcctgactcagcctcctgagtagctgggattacaggcgtgtaccaccgtgcctggctaatttttgtatttttagtagagatggggtttcaccatgttggccaggctggtctcaaactcctgaccttgtagatctgccttcctcagcctcccaaagtgctgggattacaggcgtgagccactgtgcccagtctcagatagggttatcttagttaatttgggctcctgtaacaaaagtcaagacagagtggcttgtaaacaacagacattgacttcttatagttctggaggctggaagtcagatcagggccacaacaactttctggttagggccctcttctgggttgcagactgctgacttcttatcctcacatggcagaaagagctagagagctctctggggtctcttttatgaggcactaatcccattcatgacagctccacccttatgacctaattactcccaaaggccccacctccattatccccttgggggttaggatttcaatatatgaatttttgggaaacacaaacatttagcccatgacaggggccaagggagtgaggtgggatcagaaaccaaggccctcagatgtgtgtgtggcagggagggtggtgggtaagaaactcatcagtgcggtttctgcacacgccctgtttatccaggccctttgattctccccaagagggaggagaccagcgaggagaccagcattgggcagaacagagaaaagaggtggcaaattattacccattaagttccagagccacagaagcagttataaagtagaaagatttgggaagaaggtgtgatcagcagaaagcagattttcttcctccccttctgctgggacagatgaagatgtggcgggcacgggggatggatgtaagagaagctgtggtagggagggctgactaggaaaaaatggatggtggggaaaacatactagttagctcttcaaaatttatcccagtgcagaggagtgcaggtgaacggacaggagataaagagagcagatgaatctcaggggccagggacaaaccagtagtcagggcagtgggagcctgacaccaaaggggtgtgtctctgccggggtctgtggacttcaggctggtgttgggtccaggagggtctgaccctgcagtggtggaccaaggtggggctgagggggtgaagggtgagagcacaggccttcaagaaggtaaagagtttgcccatggagaagaggacatagcggaatctacaagaggtcctatcagctaccccatgcttgcttctaggaacaaggacacgtggtcagaggcacaagggagtaattgtcagggatccaagtcacttgcagaggcctttctgaatggtgggttctgaggtggctgtatccaggtgtggcgtctccacccttggccttgcatggagaacccaggaagcgaagctacaagggcaaagcagaaggatggggatgtaggcagtgactgtgtccccctaaaattcatattgatgttctaatccctggtaccttggaatgtgaatgtatttggagatagggccactaaaaatgtcattaagataaaatgagctcatgtggtgggtcctaaccaatatgactggtgtgtttacaagagattaggacacagaaaacacacaggcagagagatgatcatgtggacacacagcaagccaaagagagaggccaccaaagaaaccaactctcagagttctagcctcccaatctgtgagaaaataaattctgttgtttaagccacccagcctgtggtactttgttatggcagacctggccaactgtgaacaatggccatttgatttcttctctcagtagattccaggcatgctgtcattgctttgcagatgcttactgagcacttgctgggtcctgcacccagctggctgctagggatagtgaggggcacgaggcactctctgcccttgcagagctcactggaggaataaacctttgtagaggaaggtttgatgggctttcctggaagaagtactcataggaaaacccaaaagctcaacagatgctgtctccttggttaacattaggagctatgatctccatcttcccatggcattagaggtttagatactgaggatcagagaggcaagttcagc

SEQ ID NO: 18547 - DNA, 2300 bp, Homo sapien
gcctggccttgagctgattggacagtgcacactcacactgagaacgggtctccttctcagcccgctggctcacatgtgagtctcctctggaaacactctcacagacacacccaggaatgatggacgccaccagccactgaggcattcctcaacccagtcaagctgataccctaaaattaaccatcacagtctcagatcttaagaatgcccaaggacatctattccggctggccagtatgctaaagttgattggtgccattgggaagagctgatgagatgcactagagatgacgcagctttagagttaggaatcggtgtccagatttctgcctcttcctgccttctgatgctgaacttgcctctctgatcctcagtatctaaacctctaatgccatgggaagatggagatcatagctcctaatgttaaccaaggagacagcatctgttgagcttttgggttttcctatgagtacttcttccaggaaagcccatcaaaccttcctctacaaaggtttattcctccagtgagctctgcaagggcagagagtgcctcgtgcccctcactatccctagcagccagctgggtgcaggacccagcaagtgctcagtaagcatctgcaaagcaatgacagcatgcctggaatctactgagagaagaaatcaaatggccattgttcacagttggccaggtctgccataacaaagtaccacaggctgggtggcttaaacaacagaatttattttctcacagattgggaggctagaactctgagagttggtttctttggtggcctctctctttggcttgctgtgtgtccacatgatcatctctctgcctgtgtgttttctgtgtcctaatctcttgtaaacacaccagtcatattggttaggacccaccacatgagctcattttatcttaatgacatttttagtggccctatctccaaatacattcacattccaaggtaccagggattagaacatcaatatgaattttagggggacacagtcactgcctacatccccatccttctgctttgcccttgtagcttcgcttcctgggttctccatgcaaggccaagggtggagacgccacacctggatacagccacctcagaacccaccattcagaaaggcctctgcaagtgacttggatccctgacaattactcccttgtgcctctgaccacgtgtccttgttcctagaagcaagcatggggtagctgataggacctcttgtagattccgctatgtcctcttctccatgggcaaactctttaccttcttgaaggcctgtgctctcacccttcaccccctcagccccaccttggtccaccactgcagggtcagaccctcctggacccaacaccagcctgaagtccacagaccccggcagagacacacccctttggtgtcaggctcccactgccctgactactggtttgtccctggcccctgagattcatctgctctctttatctcctgtccgttcacctgcactcctctgcactgggataaattttgaagagctaactagtatgttttccccaccatccattttttcctagtcagccctccctaccacagcttctcttacatccatcccccgtgcccgccacatcttcatctgtcccagcagaaggggaggaagaaaatctgctttctgctgatcacaccttcttcccaaatctttctactttataactgcttctgtggctctggaacttaatgggtaataatttgccacctcttttctctgttctgcccaatgctggtctcctcgctggtctcctccctcttggggagaatcaaagggcctggataaacagggcgtgtgcagaaaccgcactgatgagtttcttacccaccaccctccctgccacacacacatctgagggccttggtttctgatcccacctcactcccttggcccctgtcatgggctaaatgtttgtgtttcccaaaaattcatatattgaaatcctaacccccaaggggataatggaggtggggcctttgggagtaattaggtcataagggtggagctgtcatgaatgggattagtgcctcataaaagagaccccagagagctctctagctctttctgccatgtgaggataagaagtcagcagtctgcaacccagaagagggccctaaccagaaagttgttgtggccctgatctgacttccagcctccagaactataagaagtcaatgtctgttgtttacaagccactctgtcttgacttttgttacaggagcccaaattaactaagataaccctatctgagactgggcaca

SEQ ID NO: 18548 - DNA, 2300 bp, Homo sapien
tttttttggcaggggccacccctttagcacctgggagcacatattccgccccacccgccactcccctgctcgcctctgtggggatgcaaattctaaattagagcactagcaatggcagtccagatgtcacaactcaaaacaccaagaacagacagagccatctttatctaagtgtgacacctggatgtgtctcagccgaaagaacccccagactcccccacatcagaatactgggaagtctggttacagtgaatgatgaggaccccttcagggatgggaggatacagcaaaggatcacaggagcctgggagggagatggagaaggggaaaggcacgagcaacaactcttctccctattcagagccaatgtgtgtggacaggtgtctcgaggttggctgaactacccctttctctggttctctgcttcccctaaaggcatctctggctggctgctcaggaaagggaggctctagagtagatgactgacctgattttccagaccccagaaagatctctgggactgcacggtggcctgacttggtgtttggaatgggtggcaacgcttctggatagggggagatcattagtattttagtggaagaggtgctgatgggctgcagaatcctttgtttgtcctggctctaccaccaacatgtggtgcggctctggtaacccaccatttttaatttccttgtctgtaaaaaaaagggaaggggggaggctagatgagataattccaagattccttcaaactctagcacattaggattcttgtttagctctgtcacacccaaggtaacttgactcaccccctattagaggactcactcttttcctcgtgtgccgtgatgtgaaaactcttggaagcctcgtggtgccggcaagcatgccttggggccctctggcatccatgtctcattcctaacagcgccttggtatcctttgggataattaccttttgtccagtgtctttagtctggaagatctctgacttccaataaacatgaaggggacatgtgacccaaaccctgccaaagagatgcttttttccctagaatttgaaccttgagcaaatgcgagaaggttgcaaacgtcatccattggtgatgcctggacctgccactcctgcggtaggaccatttctgttcttcctgtctccaggaactgtctgtgccccctagcagcatccaggcctgggtcccagccttccagtggattcccagagcctctccttccctggtatccctttttgcttaagttaggcaaaatcactttctgttgtttgcaaccccattgtggcaagaaatgtgctctgtgtttcagaaatttctggaagtgctgggaaatgcaggccatgccacccagtgacattcaggctctggagtgaagagacctaagccaaattggatgtgacatctagtggctcctttgcttattggtgtccttggataggtctcccaaactccctaagcctgttttcttttctataaaatggagataatattgagccacacagaatggccatagagaatgaagaaacatacacacagtcagttctcaatcatcattggctttgattgtgattacaataatgaaagcttggataatagtgctgtgttggatctcatctgtctctggggtccccaaataaggagcagagactgaggataataataatgatgatgacaacaaaaacatggcactcttgtatagtagtaagtatatcccgggtactgtcctaagtgctttatgtattaactcactcaatcctcacaacctccttatgtggtaatgtactcttactacctctgcttaacaaatagggcattgaggcatagagtagctaacttgttcaaggcctccagaagttattggtctgctctgatgttttctatctgacagagagaaggctgagcagacaggccaacatcacacacacactgcagaattcatgtgcttatgtgctttctctgcatgcctttcctggtcttggggagggcctcattgctgcagtggggaagggagatgcttcatcagtaggcatgactcatagccgagcctgtgctcctggatttgttctgaagtgagattctattgtgtttattgcaaacagacaggcagctccgtttcctgttggttctgtttccttcctattaaattactgaactgtgaggactggggagggcgggtaggaagggagatgaagcagggttaagaggattctgttttcagcaagtagtgaattccccagaagcttttcccacttagtccggatgcatccatacgatgtgaagttgggc

SEQ ID NO: 18549 - DNA, 2300 bp, Homo sapien
tatgaggtggtatctcattgtagttttgatttgcatttccctgatgattagtgatgttgaagagatcaagacccagatgagaccaaagtcctagatgaagacaccaaagaacaagaatacatcaatagattttacagcccatgggtgctcaggaagtccaggggctctttggtactttaaaaactaccaccttttttttttttttgagaggtactaatctagctagtctttttattactcctacatattgtgagggcaaagtgactatgttttctttttctagtttgggaaacctagtgagtatggagaaaggggcatttaggactggcccagaaagtcagagacaggagccagtttgccccattttgagtcctgtttggtcaaggtgaaagtctgcctatgcctaggggccctaggggtgagagactgggtttttctttgttctcactggactaaagaactgaatgagaggcacagttggggaattaagagtggaaaggccaggggaggtcatcttgtccaaatcatttgtcgataaggactcagccccagggaggggagttgacttgcccagtgtcagagaggatgctgtgatggggtggggcctagaaacccagttgcctgcctgccttccttgctcatgcttctccttctcttcctcaacacatcgtaggcatttatctatgtgcagtctgctgggtatctattgctttcgtttgctgtcactctggtgtccttgttgtgattgatgctaccaccaccctgtaaaggaaggcatggtatgactcagataaacttttaataggcaggtcgtacaaatgctctactattggtaccatttatagaaaggtcattgcaggtattgtgcaggctgctttaagtaactacatagtgtttaagcctcataactcatggaggcaattattaacctccccaatgtacagatagagaagtaaagcaacttgcctagggtcacgcagcaggcaagaggcagagtaaagttgatttaccatccatattcttcagctgttatactatatcgctgcctgccattgcaggttaaggaagattctacctcagaagcagcagcaagccatgtaaagattgccacctgcttaccctaaacctttgtgaatatttggttctctggaaaaataaggttgctcagaaataggtctagatgccatcatagctaaggctgccgtgtgtctgacattgatgcaaaaagtaaagtaaaagataaaatccagttaagtatattattttgaatatgaaataactgggtgttttgaatttttcattgtcaatccatctagtcactaggctgaagtttttcatatgcttgggaatgttctcatttgcacagactctccttgcctgtgctctcccccttccaggagagtgtgacagaaaggagagatgaaagttatttttaatttggccactgaacaaacatccaagtgttctcttccaggagctaagcctatatgttttctcaacagggtattaattacctggctctgggaatggctagacaggctgttctggatgccctgccagccccgtatgcaattgctcctgcacccagcaggactcagagacttcagcagggagcatcctctttctcaataaagtcagacatgggtactgggtaacttgttaaacacatttattgatttcttgacagtaaccaaacacagtgagtgaccattataaacaagaaaagaaaggcattcgttttgtactttgtgagatctggctgcacctggagagaaaacatacccctttcccaggaacttacaaggcaaagtgcattccttcacgggagcatcacaggggggcatggcagttttgaaacgcaagaagtctgtcgcctgctatctcaggctgaagctcacctcatgtgaatgattgagccatggagtggaattaaagtcatacttgcttagcaaatgcattcctgattgccacaaactcagtaaaaactggctgcaaatgaacaaaacatgtagatgaaggaacaagtgaaatcaaagaatgcagttgcatggagccagggcttagcctgtaaggaaggagaacagaccaaagccagaaaaatgaaattaactcgttaaacacatttattgagctggtaacaataaccaaacacaatgtatgacctttggaaaacaagaaacagcaaatggatcatttctgatcttggcaaatcctactacagatatgtgacaaagagggaaataattccatttccttatagtctgtggtgatatatatacaatgtgtagctcttcaatgtc

SEQ ID NO: 18550 - DNA, 2300 bp, Homo sapien
agaaaaaagaaaaaagagagaaagaaagaaagaaagaaagaaagaaagaaagaaagaaagaaagaaagaaaaaataataataattcttcatgcagtctactttcaaggcacggagacaaatgcccccatatatttcccaaatgggctaattctcactatccggaattcttttaatgttctgaagtttcatgcttttccctgctgagcctggaagctctctacataagaatgctggatttatttcatctgggcctagatttttaatgtgttgaccacctagagtccttggcctttgtttcacagaacagatctcacggccacatctccttctttaagagtaggcaggtctgtcggcggttcctttttcgaatccctagagtcggtgggactacgtagctctggctcccgcagccgcccagcccagacagctcagagagctgctgatctgctctgcgttctctctttttcctccctcttctccccgccactcagcaaaaagacccgccagactcctgggcagttggagtcccttcaagaaccctgggagcactgtaatgtaactcctttagctcccactccgcaccctcagatgtcgcacagcctgggtgctgggatcaacacgggaagattcactagattgactctgtgcggatgaacgggcaccctttccttcccctcctccatctccacttatctaccctttgtgcagttcttagaccgaggtttatactgaaatagcttctaaacatcaaatattaaaagtggataaaaaatccccgcggggtatgtgtgtgtttgtgtttgttatgtgtgtgttcatccgcgcttgtgcaaaatctcctaacgtcacagttcccaatcgggacaagcgcgccgagaaatcctggatcttcccagggattccctctacgctccctcctcttcttcaataaccccaaagaggtaggtttgagctttcgcaaaccaccactgcagcgatggaagcagacaaatctgttgagattttgtctttcccctttcgttcccagccctcttaggcaagcagttctgagcacagggttttcttcaattcccctgcatccacactgcaaccgggtgcaagtctttcctaggttatagacagcccgcctccccacgagaccttctgcggactggctgcccctggcctcggcctgggtgggtgggtggtgctcgcgccgcccctactttcccctggggccctggagagccgcgcgctgggtgtgtgtgtgtgtgcgcgcgcgggtttggtggggaaatctccttcagtggaagctgctgagtgtcgttggcggaaagtatcctggagcccagcaaaagcctccaaagcactagagcttccctaaagaaaagcagaataaaagaaagacaagaagggaagcccgttcctctaaagcccgggtttccaatagtcccggatcctcctggagttgggcgaaggcgcagttggcagcagccgctgctggcacccggacttggaaaggcggtgttcccccttttcgggaggagggaggcagggacttgcaggcaagagttgcacctggtctaggaacctgcagagaaaagaactctggggtaagtagtgttctggcactggcacggaaaggggtaaagggtggggggcatgagagggacgaaatggagagggcagggaatgaattatgcaaaaaaatctccaatatttcgcagcggagggagagcacagcacagcactcccaggatgagtcctgcctgggtctcccgcgccgaacccgcagcacgaagttctttttaagaagagaaactcgaaaatcctggagggtaacagaggcagccagggcggggcggagtgcggaggcggctgccagggactggggccgaggcggcggccaaggtggcctgaagctgtgacacccagcctcctcctcctcctcctcatggccgcgctcagcctcacctccccgcccgggcctcctgcctccgcccccgggtgccgggctgcggagctgacgctgggacgcccggcggcggcgaggacgctcacctggccaagcctccttctcctcctccccctcccgcccccacctgtcctcctcctctctgagttgggaagcgtagggatccgtaggcgaggaaataacgacccctgcagttgtattgcggaaaatctcgacagcggcgctagttgcgggcgatggaagccaggcaactgggggttctggggagttcaggaaaatagcagaggagcaggaagggcgcgcgcgacctggagagtctgtgtgcccccaccgcgccccagtccc

SEQ ID NO: 18551 - DNA, 2300 bp, Homo sapien
agtgcaaaataacctccccaagatgatatttttcattttacagagcatataaggaagtggtgtgacatgacttctgagtttagactttccagctatggtctctacactactgatttgcagctgtggagccttgggcaaataactaccctggtattgttttattgtcagtaaaagggaagtgataatgacatttatctcaccatcacattatgatgattaaatgagataatttatgtaagggattcagaatcttcacacatagtcttcacacataacaatcaatacacataatacttcacacacaacaatcaatacactcaaactttttttaaactaacaaatactgtcatgtgagttgccttttttaaaaactgaaagcacttagtggcagatcacagattaaatattctttgggaatgctggaggtgagtatgcagactgaaagggtggaaataaagtattattttactggcattggctcttaaagcagaatatagagggatatatggtctgcagatttttttgaaagcaaggataatgcattttcaattacaaagcccaagcatcttgccacagtgtttgacacatataagacacttaataattgcagaattcattagtaaatgagtgggtagtgacataaaaattcaggcaccatgcttctgcttccagaggagagacctcttctgccagcctatctccccacccaagcagggatggtaggtcgctgtccacggttctgaactctcaccaggctggaatctgctcatctttgtcagactgcttttttttttttctttctccctctctcctcaaaaaaagaaaaagaaaaaagaaaaaagagagaaagaaagaaagaaagaaagaaagaaagaaagaaagaaagaaagaaagaaaaaataataataattcttcatgcagtctactttcaaggcacggagacaaatgcccccatatatttcccaaatgggctaattctcactatccggaattcttttaatgttctgaagtttcatgcttttccctgctgagcctggaagctctctacataagaatgctggatttatttcatctgggcctagatttttaatgtgttgaccacctagagtccttggcctttgtttcacagaacagatctcacggccacatctccttctttaagagtaggcaggtctgtcggcggttcctttttcgaatccctagagtcggtgggactacgtagctctggctcccgcagccgcccagcccagacagctcagagagctgctgatctgctctgcgttctctctttttcctccctcttctccccgccactcagcaaaaagacccgccagactcctgggcagttggagtcccttcaagaaccctgggagcactgtaatgtaactcctttagctcccactccgcaccctcagatgtcgcacagcctgggtgctgggatcaacacgggaagattcactagattgactctgtgcggatgaacgggcaccctttccttcccctcctccatctccacttatctaccctttgtgcagttcttagaccgaggtttatactgaaatagcttctaaacatcaaatattaaaagtggataaaaaatccccgcggggtatgtgtgtgtttgtgtttgttatgtgtgtgttcatccgcgcttgtgcaaaatctcctaacgtcacagttcccaatcgggacaagcgcgccgagaaatcctggatcttcccagggattccctctacgctccctcctcttcttcaataaccccaaagaggtaggtttgagctttcgcaaaccaccactgcagcgatggaagcagacaaatctgttgagattttgtctttcccctttcgttcccagccctcttaggcaagcagttctgagcacagggttttcttcaattcccctgcatccacactgcaaccgggtgcaagtctttcctaggttatagacagcccgcctccccacgagaccttctgcggactggctgcccctggcctcggcctgggtgggtgggtggtgctcgcgccgcccctactttcccctggggccctggagagccgcgcgctgggtgtgtgtgtgtgtgcgcgcgcgggtttggtggggaaatctccttcagtggaagctgctgagtgtcgttggcggaaagtatcctggagcccagcaaaagcctccaaagcactagagcttccctaaagaaaagcagaataaaagaaagacaagaagggaagcccgttcctctaaagcccgggtttccaatagtcccggatcctcctggagttgggcgaaggcgcagttggcagcag

SEQ ID NO: 18552 - DNA, 2300 bp, Homo sapien
cagaatttacttaaatttaaaggcttctatttaatgcatttttttttactgagttattttctgtattaagatggtgaatttctcagaaaaacatatagcaacctactctagaaatgtagtagcctagaaatgactcaaaaatgtatggctctttcttctagcaattgctagtatggaatcaatatgttggggactattgtgttcactgctgtattccaagtgccagaaccagaactgacatctagcaggtgccaaaattctatcattagaaacgcttttgattacttctgattcccagtgatcttttccttatcccaactaatgtagttgggttctaaattgcattgtctaccattaaattttaataccacctttgattaacttccagctgtcatatgtgtacttctgttctctttaagtgcaaaataacctccccaagatgatatttttcattttacagagcatataaggaagtggtgtgacatgacttctgagtttagactttccagctatggtctctacactactgatttgcagctgtggagccttgggcaaataactaccctggtattgttttattgtcagtaaaagggaagtgataatgacatttatctcaccatcacattatgatgattaaatgagataatttatgtaagggattcagaatcttcacacatagtcttcacacataacaatcaatacacataatacttcacacacaacaatcaatacactcaaactttttttaaactaacaaatactgtcatgtgagttgccttttttaaaaactgaaagcacttagtggcagatcacagattaaatattctttgggaatgctggaggtgagtatgcagactgaaagggtggaaataaagtattattttactggcattggctcttaaagcagaatatagagggatatatggtctgcagatttttttgaaagcaaggataatgcattttcaattacaaagcccaagcatcttgccacagtgtttgacacatataagacacttaataattgcagaattcattagtaaatgagtgggtagtgacataaaaattcaggcaccatgcttctgcttccagaggagagacctcttctgccagcctatctccccacccaagcagggatggtaggtcgctgtccacggttctgaactctcaccaggctggaatctgctcatctttgtcagactgcttttttttttttctttctccctctctcctcaaaaaaagaaaaagaaaaaagaaaaaagagagaaagaaagaaagaaagaaagaaagaaagaaagaaagaaagaaagaaagaaaaaataataataattcttcatgcagtctactttcaaggcacggagacaaatgcccccatatatttcccaaatgggctaattctcactatccggaattcttttaatgttctgaagtttcatgcttttccctgctgagcctggaagctctctacataagaatgctggatttatttcatctgggcctagatttttaatgtgttgaccacctagagtccttggcctttgtttcacagaacagatctcacggccacatctccttctttaagagtaggcaggtctgtcggcggttcctttttcgaatccctagagtcggtgggactacgtagctctggctcccgcagccgcccagcccagacagctcagagagctgctgatctgctctgcgttctctctttttcctccctcttctccccgccactcagcaaaaagacccgccagactcctgggcagttggagtcccttcaagaaccctgggagcactgtaatgtaactcctttagctcccactccgcaccctcagatgtcgcacagcctgggtgctgggatcaacacgggaagattcactagattgactctgtgcggatgaacgggcaccctttccttcccctcctccatctccacttatctaccctttgtgcagttcttagaccgaggtttatactgaaatagcttctaaacatcaaatattaaaagtggataaaaaatccccgcggggtatgtgtgtgtttgtgtttgttatgtgtgtgttcatccgcgcttgtgcaaaatctcctaacgtcacagttcccaatcgggacaagcgcgccgagaaatcctggatcttcccagggattccctctacgctccctcctcttcttcaataaccccaaagaggtaggtttgagctttcgcaaaccaccactgcagcgatggaagcagacaaatctgttgagattttgtctttcccctttcgttcccagccctcttaggcaagcagttctgagcacag

SEQ ID NO: 18553 - DNA, 2300 bp, Homo sapien
tgactacaagtttaggactcataattctggttatcaacaatctatctagccagctttatataaaattaaactgtaggaacaaatgcaatatactagggaaactatataaaagagaaaagaactgaaaaaaagtcctgaaattgctatgaaaacctgtatgaacatgttggagagaaagagggagtaaaaggaaacttttctctctgattttggcactattatcatggatctgctcatccattgtctgtctaaaacattactagctaagatgaaaaccctatggctagcctggagggtctagagttttcataattttgagagagacccagctttttcaaaggtaacggttaaaaaaacaaagcaaaacaaactattatgtgggctcagtggctcaagcctatatttctatcactttgggagggtgagaagggagactcccttgaggtcaggagtttgagaccagtctctgtgcaacacagcgagacctcatccctagcaaaaaaaaaaaaaagaaaaaaaaaaaaaagaaagaaacaaagaaagaaaatagcaaagcatcctgacacatgcctgtaattccagctactcaggaagctgagatggtaggatggctttaacctaggagtatgaggtggcagtgagctatgatcaggccactgtactccaacttgaatgacagagtgctaatgacaaatacagtgtattaagaatatctacatcatggccttgaaaccaagaaagaacaactgatttaaagcacaactttaagtattgataatttggggaaataaaacatgatattttttagaagacaattgcctaaagccctttctcctctccctccacctgcatacaacctcctcttgaaatgagcactgcttacttatctaatttatccagtatcctccttccaccttcttttcaaaatctaagctttactagactgactgaacagaaaagttagtttatagtagaatttatttctatagaggcccttattcctagggaaggttgtaacttgctacttcatgttactttggagctataattatgataaaattcaacagtccaaaagacaacatgcacgggtgttgctagtgagctgaacgtaaggcatcacccttactctgagcttggcctgtctaaaagtcaatgtcatttattttataagctaattcttatgcatgaaaatattgcaatcttggcaaaatatatttttgcatccgatggtcttagctgccttccagccttgcttaacaacttctaaaggacacacacaagtactgcaggggtggggggagtataagattaattatctctttccacacaatgccttttctttctctcccaattatggataatgaggccagaagtgtaattactgaaggagtttggaaaggtaattactgaactaatctcaaaaatggtggtgaccacagcacaacaaaactcactttatagctgtcagagccacttggaatgtgatacacatgttgtgtttgcaaacccaggtgctgtacgaaaggtagtttcatattagcaaattaccacaacgacctgctacattctactcattttgattttgtaatgagaaagccgattaaactgtaataactttaagttgtgactcttaaacaagttacacgttttgaaggaggtgaaaaaacaaagatggcgggtttgaggagcctttctgggatcctgttgaatatcgagtcctgagatttgcaaatagctctaccttcatctattcccactgatcactggagagttaaagtttaaggaaacttcatagcaattctcaaattaaagcactgagctttgagactgccagccaaggcctccttttatgcttaggcataaatgtacacgggacatataaattaaatttcaacgccatggttcccgttgcttctctgttacctgttctttctcgccatgatccggagagcacgccacatcctcctccaaccccttcaccctcactggcagagaacaatctctccatccctttgtgctcccgtaccattcactcctaagccctaggttctgccgcctcatctcatccctttgtgacgtagtggccccagtccgggccccggcgcgctaggctcacaaaggcaggcacagactgcaaccctgctcagtgctccgggcgcttcaggctggcttgggtcctgctgctccaaccccaagggccctggagcgctccctgatacctccatcactcaccatggccagccagttctgcctccctgaatccccatgtctctcgcccctgaaacccttgaagccacatt

SEQ ID NO: 18554 - DNA, 2300 bp, Homo sapien
acccattagccatccttatttcccctttccccccaacccctgccatcttgtgcattcttgattatgcttaatggttaaacagactctgtataacaaataagggctttctttaatctgtgttgcaatattcttggagtgcccagggctcagacataaaaccaatactaagtctatctctcaccagttatttgagacatttctgactttagaataaatgtcaaagtcttaatgtttgctcctcaaaaatacctactgtcctaaagtagtgttagtggctttgttctaattcagatcaagtctatagtttttatggatattttaagaacacgtacaagcttatatacatgcatgtacatctgtgtgtgttcatctccagactttcaacctaaggggttttgaacatattaatttgatttgtatttcaagaggtgaatgaagctctgaagtattttaatgttcttctctgtccttttattttctattcgaatatattctgagaagtgtcttcttatttaagtcagctgattagtccaaagggacagatcgatgctgtataaacgctaatgtgttgcttagagaacttcatttcaaaagcacaccattcaagttcatttatgcatgtattgtttatttgaatgttgtgaaaggccaaatcacatgaaactttaagaggacagtgtttccaatcatttggactttggcaagtgcaattttgttcagtttaccatagcttagtttagtgctggtttcagtttgggagaaagcactctgtatggggggaaaacagccaagacattgctgatgacattggcagtgtagccattttggcgggggatcctggtcccaatgtcccatttattaactgtgatagaagtgacaagttattcatcttttattcccctttttcctgttggtacagggggaaaaatagcctgaatgatccctgtggaactttgggaggatgctatatatacttcaatatgtatagtaacttatttgaataacatttatatccatagtgccaaagatggtctcaaaacgttacctaatctagctgatttcaggcaagagctattcaaagactaagaccattattttacccataatctgacatatctctggagaaagatactcaataaacattctgcaaaatcagctcaaatgatagttccttttcttaaagcttctttatatctaattcaaatctcttgcatttgtaattcatgtgtatttcttacatgctattcatggccaaaggaaaaaaaaatttaagttgtttttgatgttgataaactagctatatacaacataaattttgacgtggaaaaatttgttatgaacagtacataggcaaattacaagctgaggaataaaacatctgaaacttagagataaatgatatttttaacatataaagattgctcttataagtcagtttgaaaagaccaatagcccaatacataaatgggcagataatctaaacagaaagttaagaggaaagaaactatacattgttctgaaacatacagaaaaatgctcagtttcactcttcatgcaaataaaaagaatactgagataccactttttcagctttgagaatggcaaaaaataaaaaagagaaatttggcccttcacaagggccttttaacccagaaaatctgtttcttgggatcttacagatacaccagtacatgtataggatgatatatctacaaggttattaattgcaacactttttataataacaaattgtggggaaaagcaagagagatcagattgttactgtgtctgtgtagaaagaagtagacataggagactccattttgttatgtactaagaaaaattcttctgccttgagattctgttaatctataaccttacccccaaccccgtgctctctgaaacatgtgctgtgtcaactcagagttgaatggattaagggcggtgcaagatgtgctttgttaaacagatgcttgaaggcagcatgctccttaagagtcatcaccactccctaatctcaagtacccagggacacagaaactgcggaaggccgcagggacctctgcctaggaaagccaggtattgtccaaggtttctccccatgtgatagtctgaaatatggcctcgtgggaagggaaagacctgaccggcccccagcccgacacccgtaaagggtctgtgctgaggaggattagtaaaagaggaaggaatgcctcttgcagttgagacaagaggaaggcatctgtctcctgcctgtccctgggcaatggaatgtctcggtataaaacccgattgtatgc

SEQ ID NO: 18555 - DNA, 2300 bp, Homo sapien
aagaaatgaatgcctgaccagaaaagttctcaaactccactttctaacccagagacttctgtcacctaatacagagcttagcacatagtaattgtaaatattaactgtggtgagcaaacgagtaagtgattaagtgaataatttaatgaattaacatgagactaacccaaaagttttataaatccagtgagtttgctatttggatcatttggaaatcagtaatgttagttttcttttattctctcattcttttctagtcttttgactctgtcccacatcagtctaactgaagagctgttgtctggtaggcgaaagactgtagatttagttcttgattgaacgttaactctgggttcttgagcaactcagcagatcccaaggctgcccctctgtcctctgaatcatagcctttatttgttactcccgtaggacttaatcacacaatagctgtaccagcttattgtcttgcattagtgttatctttcagattatcacataagtcttcatctggggaggacttttctcccctaattcattgtgaacaacagcagtgtatggctcacgtgtattttctttgttacttctcattgtctaacaaagtcacctttgctaaacagaaaggagtaattcgataaataaccccgagatttgctgagaaattgttctacattcagcagacactttggctctggccatgtgccagtgcaacgctgagctgtacacccaactcatggtccttgccattagggagcatcatccagtggagtaagaaagatattaaacaagtacccattatgcaatgtcataagtgccataaataagtataaaggattataaagcagaggtgaagaaacttaataaattgcctagacttttaagatctcagctttaccacttaatggctatgttactttgacaagctattttaacctctctgacccagagtttcctcatctataaaattagaataatagcagtatccaatttacagggccataaagaggattacatatgttaacatatgtaagatgtttagaacttttagaactgtgcctgataccagtaaatgtgatctattatattcattgttattagttatttttattatttcttgtgaagtacaatgatgatatgataaataacatgcctagattatggtatattttaaatacatattttaaaaatagtttttgaaagtgagatgaatctggaagtgttttaaaaagcactgtataagtccaacttttattatttacagaattataattctgttgttctttgtaactcaaatgaatccagtatacaccggatatcaaaactcaatttgcactaaccaagtacattacattcatctgtcattggaatggacctgataagtatccgagtttctactttctgagttattgctgcagcatgctaactcacgaaaccttccagttgctgagaaaccttgagtgctttctttgctgtttctgtgtgtgcagagattcaaaagcaagattcagagctgagttgtttgtggaactggcgggctggtaacactgttgagtatatatattcataagattttatgctttagaactgaattttgagaaaagaatttagtgcaggtaagtttgaattaaagatataagggataattagatatagggaagcagtggcaggagaattacctggcatctgctccctgctagccagaggaaccagttttaagtcttataaagagagaaaatagctctagaactcacatgatgaagtctgataaaggatatgtgagattctgggaataaatagtgcttcttcaggacacgttatgaagtgaggctgaattagaatgaggtccatttttatccccccaatcccatttccaaattcatattcccttgccacaaattcaatgcacattgacttcacggccaccatggatggcagctaactccatggagcctggctgtaaaagtgccgagccacagtcaggagccttgacaagaaagaagaggcaaagaacacacaccaacctgctcctgagcacatgcgtgcacatgacaaaatcctgagcactcccagatataactaggggaaactttgaaaggggctactggccggacgcagtggctcatgcctgtaatcccagcactttgggaggccaaggtgggcggatcacctgagatcaggagtccaagaccagcctggccaacatggtgaaaccccttctctactaaaactacaaaaattagccaggcatggtgatgggagcctgtaatctccgctactcgggaggctgaggcaggagaatcgct

SEQ ID NO: 18556 - DNA, 2300 bp, Homo sapien
cttagcacattttacataaataaatgttgactaagtgttcttggaattgaaattgtggtaagattttactcctggtgtcattttacccctgtgggattctgctccttctctgacctcaacttagctgtgaattctattgtccccgctgctagactttactaacattaaccacgttgattttcatgcctggagagaagagggatcatgcagaacggaacagagtacaggaagagaaggctgcaacaaccaccacaacaccctggagggcacagggagagagaaaaacttctgccaggcattgctgagatagaacacaggtagcactcatcaaccttggttctgttcacccaagcatcaagtccagaagacactccttgctactgtttctcctctttctcggtgcctcagtcctgtcatgtaaggaaatcagacataggagaaaaaaacaaaaaaaaaaaaagaagaagaagaagacgaaaagaaaaacctcccacatagaagtatgttaaaaatctatctctctggatgctcggttcctttctcgttctcattaactgatagaaggccactgacaccaacattggcctaagctaaaattggttttctttttcagagattgtaggttgattctaggttgcagaaaaggcaaaatattttgctagaggcatggaatacagattaggttggtgatgtcacaaaagaggttttcaacagtgtcagcagaggctatagtgatgagtaaggaagttgataaacggcaacatctgaaatagctactcgccctgaataggcaggtggagaatattagttacacgtgggacaaatcccattatgagacatatcatcacaacaagaatatttcattctagattttagaatcccaggttttggctcactttggtcaagaaaaattataaataattgagttacagataattaaatgttagcctcctggagtgcatggcaattggttttgacctctatattaaaattcacaagaccacggacataagtcaaaacaggtccccttcgtctccctagtcaccatctccagggctaaaaaacagacttgaaatgggtggcagttagactacaggaaacaggatctacaagcaccaggagctcatctatggctatctgacatcgcctggggacacctcactctctggcaggctcctgctggctggagattgttaacatcgccaatcagatgttaattgaatgcaaaggaataggaaataaattctggttctgaaggggcagctggaaaggtgttgggcttctcagattccaacctacattacaaagcaggcctaaagccaagcatactccttgccagaagaaacggaaagcccctctcccgtttttagaatcaggctggaaaacacggctcccagaaggtggggttagaaaacaagagcttgcgaggcggcgccctgtggtccctcgaggaaatagtagagagacaaagagggcctgctcctgggaagccctaaattcgaagccaatccttcctcctagacatgaccacaactttaaagggcagggcgcacacctcccctcccggatctctaggacaaaggcaggtcgagggtaaatatttctagttattcagtatattcagtggctaactatttattttgtgggtaccagacaccgacataatcggttacgtccttcccttaattctcataattctgaggtttgtgttattaaccccctattatctttggtctacccagggcagccaaagaggcgcagagaagaatgacaaggtgcccagcaagcggcaggatcaaagcctgggtctctaattcccaggctggagattctgggctgcctgctcctcctgcacggggcgaaaagcccacctgggatccgagcgggcggccgcgccactctcgcaggctccatacacccgccactacccgcctgtaccacctgcagccggcagcgcagcctcctcgcgggtcccgcagggcgcgctgcaggtgcgctgggcgtcccgaagccccgccctcgcgtccctgccccgcgcccagctcctcacgctcggtgcccgcgccccgcagcggcagcgcagaacgcaccgcctctgccagagcccgggaagcgctcgggcgaagaggaggagccaagggtaccgagcgggtggagtcgggagccggagagcggtggaggcggatttcctgggcccggccctctggcgctaccatggcgtttggcaagagtcaccgggatccctacgcgacctccgtgggccacctcataggtaaggaggcgcggggagagacgcccag

SEQ ID NO: 18557 - DNA, 2300 bp, Homo sapien
tctagatttgctgatttggattcagttctgcttatgatttaaccaactggtagttttagaattcatgcttgggcttggtctctgatgaaaagtaattcacattctatactcatcctcaaaatcaactattgcacattcccacataaatgctggcattaggagactatgccagaaaagaaaagtccttttgtcttctgcttcatcatctaaaagaaaggtaaattgatttccacgggcatggtggctcacgcctgtaatcccagcactttgggaggccaaggcaggagggtcacttgagcccaggagttgagaccagcctgagcaacatagggagacctcgtctctacaaatttaaataaataaacgtgcgcgcgcgcgcacacacacacacacacacacacacacacacggaaagagtgaactccagctaagaataccagtcatggtgttaaaaaaacaattcccaaactttcctgcacgctggaatcacctaaaacatacttgacaattactgatgcctggttcccactgtggccttgtgataaaatgggtaatgtgtgtggatttttagaagctgtccaggtgattcccaatgttgctgtacaatgaattttgggagccactatcttaaacacttactgaatcacttgtggcatgatttttaaaccgaaattcctgtccctaccctagacttcctaaccagaatctctggggtaggggatccctggaacgtgtatttaacgttaagctccataggtgatcctaatggccagccaaagctgcaaattattagctaagaacaaaggagaaatctctaaaatacgtgaaacttgtctttgcctgtggttctcaaaacttgccctcaaaatcaactacaggacttaactaaaatatagagtgctggtcccactccccttcttctccccgccccacccccccaccccgtgtttctgactcagtcctggagtcgggccctagaatttgcacttttaacaggttcccgggtgatgctgatgctgccggtcctgggcgccacactcccagaaccgttgcaatgtacttaacagtttccaggttaagtacattacagttatatattaacaggggtggggcgagagagcctcaaaggcctaattcatgcctctttgtacggaggaactgctaatcccagtttaagcccaagaaacacgagtagtccaatttccagagttacccttggcacataaaccacatgtggtttgcagagtgaatgtatgaataatacattttaaaagcgtgtgtgcgcaggagggtaaggcagactgctagatacccggttagaggctgcggacctttttttttttttttggcgaggtgcagttcatagatcaggggtttcactctgcagcatggtataagcacaatcactaagaactggatgctacttgcagttttgtcaccaatttctttggtgactttgggtgttaagtgactgttttgaacctctctcctcttaggtagataatatcggaaacctcttccacctacgacccgcagagcgagggcttgtcccgggatttgtcttgcacccccacctctcgcgtctgcgccaccctgcgggcggcgccggcccctacctggcaatagagccgataaaggggtacggcagcgtaggacgcccccagcatgcccacggcgacagcggccacgtaagtgagggtcgtcttgttctgccgccgccgctcctcctcctgcgcgcgtgtgaaagggttcgagctcttaggccgccgcggcggctgcaatgctggatgccgggctcgaaggctgcagcgcttccatgtcccaagccacctcagtcctctctcggcacctcctgtcccactccactctggcctaagaaacggctctaccctctctgcagccctggttggagacccagggtggatccagcgccagccacagaaaggaacgcacctccatccaggacgccagagccctcccataaccctctgaactaacacccacccgcctctcagggacgagaggtcaaatctcgcgaggcgtgctccgtctcgcgagatctgggttgagcctgccgctgccttggctaccaggctcctcaggtggcagcgcttgcagtcgggctacggaggccgggttgccagattacgggtaagtttgcgttttgctttgtgactgttactcccacttcgcttctcgccagaacgtctcttaacatttaggaaaatgcgtttcgcccgtccgcgtgcaagcttgccatcacttggggttgcgcctgtgatctttatttaaactccacc

SEQ ID NO: 18558 - DNA, 2300 bp, Homo sapien
gagtccaagacaaagactgtatactgacatatatttatactgctacctggagctacaaagaaggggtgcctggagaaacagaatggtgagtggaaatgtactgttggtatcaaggatttcagtctatgctgtaagaaaattaaactttgagaaatctcatcctagaagagctgagaatctggtacaagaaccaaggtgcatgcagatgaaaaagattttcaaacactgtcatcacacaatatgaataaatttgtagaatcatggagacctgaaatttttgagacagtatgccagagtatagaaagaagtcagaaggtatttatattttattggttctgcaattttctggccctgtgaccacaagttaatcaattactcactcaaggtgaccatcatcactcatgtggactactgcaattgcttcctaattgttctacttccattcctccccctacctttaatccattctccacaaagtaatcaatatcttttcaaaaatgtgagtcagatcacatcacttgtatgtgtcaaacattccaatagcttcctattacttttagaataaaatccaaacccttggacatggcttaaaaggctggtattaccaggcctttgttacctgttctgaccccatttcctaccactttccactctgctatgttgggaacacagtggccttctttctgttcttcaatcattctatctctttccttcccctgggcctttgcttggcctggaattgttattgagtaggtagctccttatcatcgttcagatctaaactcaaatgtcacctcttcaaaacgtccttactttactaccgcttctcatgactgtcaatcatactatgttattacattgtcttcactgcactgattgttatctgaaattcccttatttcggtaactgttacttgattattttctgagtccctcagcagaaaggacactccatcactgaagtgatctcccgacttgttctgtgctatagtgccagcaggtcgattggtgtcaggcccacagttgagagggcaataaataaataaaatgtcgaatgactagttaaaatttctcaggcctccaagttcctcatccacatagtggggataattatacctgctctggccattagaaatggccacgtagcaagtagaaatacagcctaacttttaactacattcttactatgcctcagtcatcatgaaagacgttatatgaatattattcatttactgttctgatttccattttacaagtaaggacaccaggtcttagaggacaagtaactgacctaagggcacagggccatggtgaggacccgggtaaaaatccagaaccccctaacctcagaacctgagctcttaactgctattttatagtttctagaaagatgcttccttctaacacagtaaaatccgctatgctgtctgcccccctcgagttcgtcctgtgggacaactgaagaaagctattacatcctcccacggggttcgtttctttcagtctctccttaaatggccctcctatcctggtcactctctccagaacaaacttcagcgtgacagcctccctcctgctccagctgtggtgctttccactgggcaagttgtaaggggcatcagagcaggggaagccgactgcccacgggctgagaaaatgcaggtgtcgtgggtgcccatgagggctgcggttaacacagcaaggcttcctgagagaggtgatacttgaactaagtccagggcagtgagcacaggagccagcggccaagggaccccaggagaaaagaccgcgggagagcgtcgccggggctgccgggtcgagacaaaggctggtggagtttaaataaagatcacaggcgcaaccccaagtgatggcaagcttgcacgcggacgggcgaaacgcattttcctaaatgttaagagacgttctggcgagaagcgaagtgggagtaacagtcacaaagcaaaacgcaaacttacccgtaatctggcaacccggcctccgtagcccgactgcaagcgctgccacctgaggagcctggtagccaaggcagcggcaggctcaacccagatctcgcgagacggagcacgcctcgcgagatttgacctctcgtccctgagaggcgggtgggtgttagttcagagggttatgggagggctctggcgtcctggatggaggtgcgttcctttctgtggctggcgctggatccaccctgggtctccaaccagggctgcagagagggtagagccgtttcttaggccagagtggagtgggacaggaggtgccgagagaggactgagg

SEQ ID NO: 18559 - DNA, 2300 bp, Homo sapien
ttaccctgggaaaccagattacttgacctggtaagagtttcatgtctggaaacatggggaagtgaggacatgcggagaatcatgagcaggtggagcactttgggcgtgctgagtaatgtcagtggactgttacacaaagcttaggtaacgcatctttcatgcacctggaatctgcaatctaacagatttctaaccaggctgagaggatgctctcagtcctgccagtttatggacttacagggatgtaaggaactcaagacagggaaatagcctctgtctccaaaaggatagcggagatgaggtcccttttttattttttaaaaaaacaatataatataattgatggattcagaccgttcacgagagactattacctccacgcccagctcaggcaccttctctagaatccctttcctaataatgtaagtgcccctgtcacctccatctatccatttttgttcttttaagcctattttatattatttgcttatatgccaaaccctaaacgatgagttcttgaaggttaaaattatgttttattcatcttttttcactagcccccgcatagtcgctggcatacataccgtggtgctcaataaatgcatgtggcattaactaaaagtttgctgtttctggaattcgtctgaaacctgaaacactgcaacaacatctcacttagaatgttgccttacccttttgccataattttagagtgaggaagtagaggtcactagattacgtgtccttttatgaagaacctacagctcagggcagaaaggcacttgccggaatcaccctgccagggaactctgaaccccgctgcgccgccgctcctgatctctggggtttcaggcgcctcctctcttacaaccctctcctggggaagtaaaccccatcaagacaccaccacatccttccccagcgactcagcctggggtcacaaaggcctttacgtcccactgaaaaacggttttctttcatttgtgcccattcgttcttgcagccccttccccagatcgaagactagggtcttagtaaggagaggtaaggagggaggggaagaacctgcctggccccccgcggagctctgcagggggcgtcgcggctgcacgccagcgcccgcaccaccccaggcgggaagggagttatcacacagggggtcgcacgcagatctcggggaccgtgggtgccacgaggtcaaactggcagagggagacgctgcagctgctgtaacagcaaggaaagccgaagcccccttaggggatactttacaaaattattttaatcaccgtgcaaacctaataacttgacccaagcgcaatcacctgtattcacccagagtaaatattcctaaaatcccgttcagtgtgtctgtgtctctcccgcctctttccgtttcaggcaaatgtctaccccccctctccccccaccgttaacacctctctgcagcgtgggaaacagtgcccagcagctcagtcctccgcttcccgctctgctttttgcatcccattcggacttataggaagtagttattttttggtggtggtggaaactgggcaagaaagaagacgctaagcttggccggggccaggagaaatattgagaagggtcgttaccttccatccgatctaaaccaatcatctcaaacttggctactctttggaaccacctggggagctttaaaaattatggacgccctgatagcaccgcagaggttctgatctaattgatctgggatgcggcctgggtatcgcgatttttttaaaactcctcaggttattcccagcttgaaaactatggatataaatttctcattcctcttcccacccagaccaaaaaaaaaaaaaaaaatctaagcctaagttgatggcccagggaatctggcacctgctcccctgcaaccagccagtgctgcaaggtccccgaaaatcggcgcgagcggcgacgctaaacacgcggcggcggggcgagcgggccaggcgggcggtgccgcgcgtggccccgcccccgcacgcctatgggcgcgaggtgcgggccctgacgtcactcttgtcagggccgcggcacatgggcggccggatgcgctgagcccggcgctgcggggccgcggagcgctggggagcagcggccgccggcgcggggaggggggtggggtgggacggcgcaccgcctccggtgctggcactaggggctggggtcggcgcggtgtcttctgcccttctgcagccgtcgacatttttttttctttctttttttcaattttgaacattttgcaaaacgaggggttcgaggcaggtgag

SEQ ID NO: 18560 - DNA, 2300 bp, Homo sapien
gctcaggtccctgctggagaacccgctgaagctcccccttcaccacgaagacggtgagcgctgccgcggccccgctccgggaagggacgacgctccgggggtccccctccgcggccgggcacgcccgctggagcatcccccaaccccgctcccgccctgtcccgcggcgccccggccccgcgctgatgaaattgaggagctcacccagcacccttcctccccttcctcctcctccatgaaaggggagggacccctcctgagctacatttaaaagagcttcgggcacccggcctccctgggtcccgctcctgcggcgcgggtgggaggtgtaacttgacaggtcaggatcgttccctagaacgaggcacacccgcacgcagagcgagcccgcctgcggagggcagagcctcccgggctggggaggagaaaccctggggcctggttctgtgcggggcagggggcgggggtcggcttgagggagggggtttcactgcgtagcctgggttttggggttgtgttacagcttctgttactggttagtatttggaactcacgaggtgtgagagaagactcgttttcttctggtgaagggtagctgagaaagcggggtgggggctggggccggtggggggagtggtctctcggcgggaagccgtgcacgcctccagcgttgacactttcccggtgcactttttctggtgggaggggagagcggagcaggctcacgtgtaaccgcgcaggagcctcctctggcttgagccctttcttggtaagtcccaaaccttcccaagacaaccttggccttagcagtagaggaggggtacgtgtgatgaggccccaaacccggctaagtgatgccacggatttgggttgatgcgatttcatgccttcggtatcacagtagcaaatgcgaaccgtgcggctcacagtgtaaagttctgaaaggttatttggctacaaatagcttgggagtacttgcaccttcttttctaggagaggacaacctgttgcattgcaagagtttgcaatctgcagatgatagccagggacccctccctaactatcctttaaggaagagcatttgggaggaaggggctgcctgcaggcttttgcatctgtgggtgttttaagtcagattttcagatgagatggtagagggttagaatggatggcagtggaggctgtgtttctctgaagatgaaactcagaagcaaattccttaatcccagattccacccacgactgaatactagaattggcaagatccggaatgcttgttaaagacctaatgggcgagcagtacttccaggtagcaaatagctgcatacttccaacataaatgtatagaataactcaccttttccaatagctctgcttttgaaaggttttgtaaatgcatactctttgtaaattggatcatactcaaatgtttggagaagagaaggaagaaaacactttgtatttttttaaactccttttgtaaaaatcagtgtgccccagtggctttagaagcaaacacatgtgagctcagaaagttctcattctctgccaacatgaggcattggtcaagttccctcaagtctcagagcctccgagtctttgttgtaaatggaggtaattgttattttgcaagtttattgtgagatttttgagataatatatggaaagaaccaggtatccagtaggtactctaaacatgatgttaaagaagggtggaaggtccctgctttaccaaaattaagaccactaactcactggctttgtaagtctgaatgacctcctattgctgctgtgatgaattcctggaagataattcaagcctggttattggctgttgttttcttaaaaatgacagcagttgtatataatcacagatgttatattcctattttaggtttaagttattactcttctcaaataatgtgctgagactgttctctggtttttatcctagatcagcctgtagccctgccccaaggactagtgccttctttccaaagtaaataggaagatgttgaaaaacaggcagagatccacgtcctgcctgaacttttaactctagatctacaaaagacagcagccagagaaggaccctgccattcgtgagaaatagtcttataacaggccaggaaaagtgataaaagagcggtattgtttttcttttctttctttttttttaagtccagctttcccttcttctgcagcatttagtaaagataaagacaaggaaaagaagctggatgatgagagtaacagcccgacggtcccccagtcggcattcctggggcctaccttatggg

SEQ ID NO: 18561 - DNA, 2300 bp, Homo sapien
tttcttgcacagtagctttagaaagctcacaaaaacccaacaaggatgttgctttgcagaagagacaatcaaggttcagaaagattaaggatttactcattaaagaaccccttggggagaggaggaattattattctggaatgcttatgtaaagtcttgcttgcaagccggaggataaactgaaccttctccttctgaaacaccataacatacctttatggtttccttacccccaaggtcactatattgcctttaaatataattattaatgtctattgttaaaaattcaatggtagcagtaactgactgatctattagcaaatatgacatggaagaaatctaatcaagaacttctttgggcagggcacagtggtttccacctgtaatcccagcactttgggaggccaaggtcggtggattgcttgagctcaggagctcaagaccagcctgggaaacataacaaaaccctgtatctatagaaaatacaaaaattagccaggtgtggtggtgcatgcctgtagtcccagctacttgggaggctgaggtgggaggatctattgagcctgggaggttgaggttgtggtgaaccatgatcgcgccactgctctctagcctgggccacagagcatgaccctgtctcaaaaaacaaacaaacaaaaaaacttcttcaaaatgcattttgtttatttaatcccatgagccaggaagaatgagtaaagggtacagttagctactcaaggtcacctaaaattcaaaggctaagagaagggcaagcaagacttggcagagaagcaggagagaaatccaaatttcttgaccagtgttcttaattagctaggaagggaaaagtatcaagactctttctgagccccacgcttggtcctcccatgggaaatgagattagatggtggtgaaggtgctgcttgcagcagctgttattaagcacttgctgtgtgcgaggcactgtgacaattactctgcatgcattggctcatatgaccttcaacagtcctatgaggcaggtccaatgattattccaaagttccggatgagaaactgaaagctcagagcatttaaatgacttgcctgagatcgtgagcagctaatgagtggcaaagtcaggattcacactcaggctgttttgtttattcaattctgtgctctaaaaaacattactgctatattgcccgtatagactggtgtctcaaacacaggacattctgacagacattgtgcatggtgagacagaggcacctaagtctgagggaaatttaaatttatagaaaaacagtggtttagtagctttaggacaagacatttgctgggggagggccaaatactataatcaatattagctgtgaccaatattctcacccacacccattacagaatcaaacacaggccctgtacctctctaatatgttattttctactttttttcatcttattactttctctactaccttccctcttacctccattttcattgctgagacataaaaaatgattcctgggtaaaagtgattagtgctaattggaagagaggtttctgagaaacctaataaatcacggctgtcttcccctcctctggctttctacattaggatgttatcaagggtttttttcttcccacctcccccaccccctttccttctcctccacctaattctgtctttatattgctatttttctagtctggtaggcacagtgctgaactggaaagactctgccaagacccttggcaggagctggcctccaggaatcctgcccaccgcagcagtgcagagaagacagggcctctgggcagacaggcaggagagagggccaggtttggggtctggctagaatgttggacagaacaggtttccctggcatctgaactgccctccagagctcagctttctcatgccagggtcaggattacaattgcttgctggcacttgctgtcattctcctgggaagggaagcgagggggaggagggaaaaaaaaaaaaaaaagcaagccagcacaccacacagcgttgggcaagctccacagggcacagccacgtgcctggagcacacggtcatgcaggcaggcagccagggttgccagggctcacacgagagctgggggactgggcacccagacagtggctgtttccacattggcaaaacaggagttggtaacccagaagccatgctgcggggttaacatcagggaaccgattcgtcccaacccagaaggaagagaaaggtcaggctgtaagtgttggacatgatgggaaagaaaaaaaatgcatgaaagcatgtcctatttt

SEQ ID NO: 18562 - DNA, 2300 bp, Homo sapien
ggtttttttttttttttttcctttcctctccttttacaatcacatttctctcgttttacaaaacataggtatacttcctacccaggctaaatcttactctagctctgggctccagttccaggcataaaaatgtttgtggcaccagacaaagggacaacaaggaagtttgttgtctgtgaagtctttttctttatcagttatccacaaccactcctatccatcttcctagatttgtagtcctgttaaaattttatttttcatggataataattatttaaaattttactatagacatggttttgatcatgcatgtgctagtaatgaaggtaaccataactcatacctaaagataaaaaatttatgagccttgttttattttttttgaaaataaaaataagaatctcagtctatagctgttgttttatgactgagaaatacgatggagggacaatataagactttgaggcataaaaatatattacataagagacaaactcagtgaggaaacacaatgtaaataattattttgattaaaaaaaagtggtgtacaaattccaactctatttttcaaatggatgttggttggtagtaaatcactagggttttaatagttcatcagatatattaaaaagagtcatgtagtagcttatttttaaatgccagtacttagagcagctattacatcctttgcaactatttaaacttgtgattaaaaaaattttagttgtcaactttataatgtgcaatgtggattcatggtttaaaaagaatttttgggagcatgtgagcaaaaaaactgaaagaccagtgctctaagaaatggtaggcctcatcttgaagtgagtacctgaataactggggctggggatgaagggggcactgagtggccagggagagaatttggattcgggagaggataatgagtagaaaagctgatctggaagtagaggctgcttcccctgtgatatggtttggctgtgtccccacccaaatcttgtcttgaattgtagctcccacaatcctgtgtcatgggagggacctggtgggaggtaattgaattatgggggcaggtttttcccgtgctgttcttgtgatagtgaataagtatcacaagatctgatggttttataaggggcagttcccctgcacatactctctcacctgctgccatgtaagatgtgcctttgctcctccttcaccttctgctaggattgtgaggcctcctcagccatgtggaactgtaagtccatcaaacctctttttctttatgcattacccagtctcaggtatttcttcacagcagcacaaaaatggactaatacaccctgagagcaattgaacaattctggacagtgttcaaacgcaggataaatggagggaagaggtaggcagtgatgttctgaaggtccaacccagtaggcttagcctaaccagggtgggaggtctgtccagaaggtggacaaacctcaaagtcaggtatgtgaggggtgatgagcctagattacagttgggaacctggcaaagatgtcaagacctcaaattaaggacactgggcttcagaagaaggtcctcatattagggttaggctaatcagcagttaggccatgcaacaagaaaccccagtatctcaatggtttaatacagcgaggctttttccttcctcgtgtaacagtttgatgacttagtgtcatgccagacccctattaatctcaacagggaaggaaccatgtttgagaggctgaagaagaaacccagagctagcaaatgagatataaattattattagaggaaatttacatgtagggatggtccagtggcagtgggccagacagaactacaaccacttgcaaatagtatgtagtttataaaatagcatttccacttcgcaccctccccttaacaacctccacctgacaaccttcatttaacccaaaacagaggactatgatcccctgtatggctcgtggtccttgggacaggctgagggttcagatgttcgtcacagataaagaatgaacctccaggctggccactcccagattcctgagcttggaactctgaacacacattcagctgtgtctgccatacagggtcattctcagagtatgctgaagttattgctgtcaggtgcgtttgccatatactcagggacctgggtcccttccttcttagtctccatcttctccaggagccagaaaaaaaggagagagagagcatcaggtggcactgtttatgggcctttcatggaagtgacacctggggttacttctgcttatgttcctttggacagaattcagttg

SEQ ID NO: 18563 - DNA, 2300 bp, Homo sapien
tttctttccttccttccttcttttttttttttttttgacaggatctcactctgtggcccaggttcaagtgatcctcccatctcaacctcccaagtagctgggactacaggtgcctaccacaacacctggctaattttgttgttgttgttgttagagatgaactcttgctttggtgctcaggctagtttcaatctccaggcttcaagcgatcctcccacctagacctcccgaagtgttgggattacaggtgcaaaccactgtgcctggccctttaaaaaaaaaaaaaaaaagacttttttttttccagagaagttttaggatcactcaaaaattgagagtaaagtacagggatttcccacacatacatagcctctcctgttatcaaaatcccccaacagtgtggtacatctgttacaattgagcttccttgttttattttttaacccttcttatgttattacacatggctatttttcatctatctttattagctatctcctttgttaccttcccctcccgcactgatgttttagcccagtggcccaacatagctgataagaagcagactttcattccaggttcattttcccgatttagtgttgagggtgcgggtagatgaagttttgttttgtttgttttgttttagagaagtgtattgctttaaaacagggagagatagtctgacgtactgaaaggaggtgggtctttaaagttagcgaaaggtaggtaggagccttacttttgcctttggcaagtttattgaccactataagcctcagccttatctgtaaaataagttggataatgcccatctggaggagctcttgggaagattgaagcatggaaagcacctctctggaaggttcaaggaaagggaactagaattatgggtgacagaattccctggctttccaatgctttactgtaggtcgaatgagcactcctagcaggctggcctcatgccacttcagagtctctagcctgcaggctgggggctgggtatggacacgatacctggaagggaacacatataacttccatcagtgatcctggaaaggctcgacaaatcacccattcattcattctgtgtgtatgtgtgtgtgtgtgagagagagagagagagacagagtctcactctgtcacccaggctggaatgcagtggtgcaatctcggctcactgcaacctctatctcccaagttcaagtgattctcccatctcagccccccgagtagctgggattacaggagcccgccaccactcccggctaatttttgtatttttagtagagacaaggtttcaccaagttggccaggctggtctcgaactcctgacctcaggtgatccgcccaccttggcttcccaaagtgctgggattacaggcatgaaccacagcacctggcccattcattcatttttatttgaacttctcttccaggaagccctctgagtttaggtttagcgacaggaccctgattcaagtcaactcgtttatttgaaagctgcctggataaaaataaaataaaataaaaaataaactggaggataacataaaaggatccttgcagaggattcctccttttgtggatctcactgaatctcagagttagaagacgctcagagatctcaactccctcaagggtcagacaaggacaggtttttcattctgccctggatcctctcacaatagcctcgcgggagctggccctcaaaatgatgaaggaataaatgaaaggagggatggagaaattaatgatgaagaaaaaatgaatgaggtagggctgcttgtttgctgctattttcttcacaatgcttttaagatttcctggtccatctcctccttcaccacttctctccctccctcgatctcttctccaacttgtctcttacagaagggcgccgcgttcccgcgctcctccccttcccctcgccccgcccctccccagcgaggccccgcctcgctgcccgagcccggcgggaatgaatggcagcgtagccgccgcgccgctcggggtgccgattggctgaccggcgcgctgacgcgccggcgaccgcgggtgcacgcaggcgaacagagccggcgggggcggagccgggctccggggcggggcgcaggagccccggggcggaggagccggggaggcgggaggcgggaggcgggaggtgttggggccgttgaagcggcctccctcccgcccccagccgcccggtctggccccagccctgtcccgacccccggcctggcccactccgaccctacccggccgaagggttccgctggacacgcaggcggcctccggag

SEQ ID NO: 18564 - DNA, 2300 bp, Homo sapien
ggtattggaagtgatgacagatttgtgctcctaggacacagacacactcactgcgcctcattatagactcagtcaagggcttactatgaaaaaagctgccattgtcctctctctagacgttcaatgtttgcacctttagctttggtaacaggaaagcatgcttttcaacagaataaggtgatattcagagcttcagtgcagttattgggctatcttgcaggcaaagtggtactagaaaatagaggggaattgccctcaagggccagagtttgcaggtgagaagacagctctgttaaggagcttctcaagaacctccattgtacgtagccagcggcccccatcttaccatcttccgggggcaactttggcaagttctgaaatgccctggttctaagtattcctgaccctcaacaccaagtgacggtactcctcagatatgaaagctgtctctttaggtctgacatttttaaagtgtgaggatcatggtgaccaaggcctccaggtacttgccatgactcccccaacctcagggacttttcaactttattttttataaggacataaccctctctctggctttcattccagaataaacaacttctggtccctctctttttgtgacaagtcatcagggtattgctacaaggcaaggctggagagagtgtgctgtggtagaggagaggcgagatgtttgagaacatccaagccctttgccagctattagagaaatctaacaatttgagagaaagatggaaaacaaatctcttccaagagttaatttggatttgtggttcacagtattaattagaagaggttattaacacttgtgcagatgaaaaaatggaggatgtaaacttttaactacagagtgtaggatgagctcccagtattatcttttctcctcaaaaagacaatcttgggctttatatgtttcaaggttttaaaaatttcacagtttgtctgtaagaaagcataaacctataaagtcacttacaggtttatggggtgggaaatagatgtttaactttattgtttaagtatgatgtgtcaagttgtatatgtttgaatgtttaaaataccttgatccttaaagtgggccaaggaacagaggtctcaacataggtagggagcttgttacagacttactgaatcagaatctaaatttaacaatctccccaaatgatatatatatccattaaagattagggttcaaaccaagggtgtctctgttactgggtgatctttgttaaattacttaacctctctgagcctgtttcctcatttatgaactagtgagaattaacattaatatgtgacatttcttaatattgtgccatgtccacagtaggtgctctataaatggtagcaattatcatgatgatgataatcttggtgctgctaaagttacctccttgcaaaagcagtaaacaatcatgtttaaatcaatataactggctttcccccttaaccacaaacatttgtgcctcccaccctcattcctaaatgaattaacactcaacaagtggggttttaagcttcagatgactatcacgcacatataaagaataatggaaaacctaggaacatggatttttgctggcttagagactgaattcagctgcctgatgacttcacagctgtttctgccaccctagagtatctgtcccctcggctctgtcccctcagccgggtctgcaacgctgactctgggattttcttataaaaatgcctgatggacgggaggaagatctggaggtcggcgggggaaaaaatgagtcattcaaattcacaaagcagtccgcttagtaaatgctgcaagagaaaaagtaaaagctggctcctgtctctggggaatctgtagaaatgattcggactcatcatgtcactgagcaaagctgggggaagccaaaactcagaatctgctggcaaggaaaagaacgaaggaaaaaaaaaaatgttagggaggggcaaacccgagggggagggaataaaaagagagagggagggaaagacaagcgtcatttaggaacagaggtagcctgaaagaagcaggaactccaggatcccaaaccagagcagaccctatagtaaagtatttttacatcttttcctttccccagaagagatccctaacctattgttttattgacagccttgctgttagaggctctttcccagaagttggacgaagaggctcaggcgttgctgtttcttgtcttccaagtcaagtggttactctggtaatggattgcctctctccgaggtgagtgtaagtaatttggggacagatcttgattttc

SEQ ID NO: 18565 - DNA, 2300 bp, Homo sapien
agagagagagagagagagagagatacagagagactgagagagacagagaaagagacaatgaaagagagacaaagctcttcttgaaggtaataaataataggagaggcatcccaatgcaaaacctgctaatttcctataactgatattaagagtcaggaagcaaggaagcagctggctgtcctagcacagagcagaaaggaagaaggacagaagagggtgcaaagaatgggatttgcagttcctcaagaacagaaaatcagacaggtctgtagcagagaaggctcctttaggcctggttgagtctttagcaggaggcataacagatacggatgagagcgtttgacctttaggatattcatagtgtgctgtacagcattatgttaagagaattcttttaacaattatgttggtctcattccatactggaggttcaatcattttccataagatttctcacatttataatgttctgcattaatgaaatcctccagctattgttaaagtggatgatattgtgtgggtggccctgaactttcaatgtttccagagaaggcaaatatgagagcagcaacctttaggtcacattactataaccagggttcttcctgcactttatactttcccatacctgcataatgacccaaatatgcaaggagggcactattacccccattttccaaataagggaaactgaggcacggagctgttgacttatttgtccacagtcacaacgttgcaagcagtagagccaaccaagattggctagggtttctgacatctagtccatcaataacgctttgctcaagaaatgtgtattttatgtctaactatgcattagatgttgtgctttagtgtaggggacacaaaggttaattctgtacactcgttactcttaagaaactctcagtcttttagattagagaagataaacaagcaaacagccactttccacactattttttgagggctatgatacatgtaagcacagagcagtattttcagccaggaacattttcacgccagggtgatttggcaatgtctgaagacattcgtggttgtcacaactgtgcaggagaggaggggttgctactggcatagagtgggtataggccagagatgctgctaaacattctgcaacgaacaggacagctcttcacaataaataattatccagccccaaatgtcaaaagtactcagattgagaaacactggcataaacattacgggaacatgggggaagggacctcatgctgcctagtctgaaaatagaggaggacttaccagggaaggtttctagaagcaggtgatgcttgaggtagtcatgaaaagatgagtagacatcatcttgagcctccaagagtaggaaccaacaaagcatgacaaacataaaataatgtgttgtttgtgatttgtaatttgatccaagctggagctgagactggaaagaaagggagaggccagctcatgggaagacttgtgtgtcatgtagagattctagacctcagatgagggggaatcatggatgggttttaaagaggggtgaggccggatttgcaaacttgatagctttctgtattagcattaagcagaggatctcaaacttcatatggatgcagataaaaaacacaagtttctgacctttcaacacacacacacacacacacacacacacacacacacacacacacacactatcctgatgcagtaatgtagtaggtctggggtggagcccagaaacctgtattttttgcaagcaccctgtgtgattctgaggcaggtagcacaaatcctccctggtgtacaggacatatttgacagtggtaagattgtaaccttaccaaaaagaaaataagaaaatttggagaagagaggaatatacagtgttacgtttttctctgcttatgagaactgtgtgcttataaaggaatccactgcactgatggaggtcacacagcagcacagcagcttctttctggattccgtgggctgggaagggaggtgctctaaggaaatgcacagtccatgtgatcagagcacaccctcttggcagcctcaggggagcccagttgcttctacaaaacccgtgaaagttctctgtccaaaagccttgttggtcccgcggtacatgcttcctgttcccagagagattcacccttgggctttcctatcagtcttccctaaagttggctgctcctgtgtcctgtcacataaaactgtgaaccgaggtctccgacttacgtcatgtcagtcacagcagggtgaggctccacaagtgtgagttctggcccctgctgctttcc

SEQ ID NO: 18566 - DNA, 2300 bp, Homo sapien
atgtagtagaatctaccatctaggttggtttaagtgcactctatgatgtatgctttaggatgcaattgcccgatgacacatttctcagaatatatccctgtcattaagcaatgcatggctgcatttaaatcacccatcttctccagagtaggagttgagcaaatgagtgaggtcaaacatttccctaatggaagttcctccactgggaaacactgcatggggaggtggggagaggaccaatcatccattctaagaatattcaggagctggtgttgctggctttcattctctcttccctttctgaaacctggaagtatcctttttcacttttcagctaaaccatgtatttacaactattttcaacacgttttaaccaacatttccatgtttgaagccaggagctttagttgccattttgccagaagttgtttcagagagttttttttcacaaaggaaacaggctattaaggcaacttctcaagaacaggccttcctggatccctttcctagctgtttttagactttagagataccataaaatatttcctaacattattctttcattaactgtaataaaataactgagtgtaaatctcagcatattcaaggatatatttatttttctcctgagtttattaggcaacacacttttaaacacatacaataaatacaatttgaagtgcgtgctttatatcttgcatgatgtcgtttgtgttcttatgcttgtctccattagtctattgccatatagtaataaagctttatcaaatcaaacctttataatggattccttgaagatacttgaaaatacttcatagccaatagtttttacacaattggtttttcaagcaatgaatttccatttaaataaaatatggatttacaatacatagaaaatttacaaggagttataaaacagtgggaaagtatgtctagcctaaacttttgtgcatttagtctaggaaaatttcacatccctctttccacacctataaagccaaacagaaccaggactgacttgaggaaagcaattatttatctctgctgtgtctaactaagcaagctgccaaatgtgatcatttgcctgattggaaaatcacataaattaagactttgccatcaactttctttcaagtaaggaaagaaaagcatttcaatatagtaatgcaaaacaagtggaaattgttattgaacatttacttggacgggcactgtggaaaattattccttgtccaaccacctcctcagctgtaactggtagcacaattcttgacccattttacagattaggaaacatgagtttccagagtttattggcactcacgtggctgttacatcgttttgatgttcaaacgacctactttattcaaagtcaggtagtacagtctgctggtgggaaatacagtattactcaagggacttcaaaggaacaagaagatgtttgagttgcacagtgagctaaattatgcaagttgcagaaatcctaggtggatagtacgacacctttcagatcagtttctaccctcaagggtggcaacaaccttgtagatccattatggattaggtttctaaactgttttggtgttatgaacccctagagtcttctggggaatccaatggacctcgtctcagaataatgttttacaatgtatagcagaaagaagagaaattatattgaaatacacttctggcatttgaccccttaggatttttccagcatttctactctgcccacctctcctctcatgtctaccaaagagactttctctactttattcagaaaggtaaatgagagacactcaaacaggtctgtaggttatgggagtagcagggagtatgggataggctactgaggagctgtttttgaggtgacatcactgtctcccttcctttttcccttccctctggaagcctccttacttctccagctcttccttccttccccacatcaagtccaatttttctccttttacttcttgtctatcctcctcactccttgctcagccccgcccgcttttctaggcccgcccctccagggccccaccctcaggccgctcctccagtctaggccccgccttctcctcagtttcctgccaatgacgctggggcagccggggcagccggggcagcccggtcaccccgcccccaggcccacactaagggtgtccgcggcctgccctccaggcggaggagcccggactgcggaaggatggagctggccgccggaagcttctcggaggagcagttctgggaggcctgcgccgagctccagcagcccgctctggccggggccgactggc

SEQ ID NO: 18567 - DNA, 2300 bp, Homo sapien
attctctcttccctttctgaaacctggaagtatcctttttcacttttcagctaaaccatgtatttacaactattttcaacacgttttaaccaacatttccatgtttgaagccaggagctttagttgccattttgccagaagttgtttcagagagttttttttcacaaaggaaacaggctattaaggcaacttctcaagaacaggccttcctggatccctttcctagctgtttttagactttagagataccataaaatatttcctaacattattctttcattaactgtaataaaataactgagtgtaaatctcagcatattcaaggatatatttatttttctcctgagtttattaggcaacacacttttaaacacatacaataaatacaatttgaagtgcgtgctttatatcttgcatgatgtcgtttgtgttcttatgcttgtctccattagtctattgccatatagtaataaagctttatcaaatcaaacctttataatggattccttgaagatacttgaaaatacttcatagccaatagtttttacacaattggtttttcaagcaatgaatttccatttaaataaaatatggatttacaatacatagaaaatttacaaggagttataaaacagtgggaaagtatgtctagcctaaacttttgtgcatttagtctaggaaaatttcacatccctctttccacacctataaagccaaacagaaccaggactgacttgaggaaagcaattatttatctctgctgtgtctaactaagcaagctgccaaatgtgatcatttgcctgattggaaaatcacataaattaagactttgccatcaactttctttcaagtaaggaaagaaaagcatttcaatatagtaatgcaaaacaagtggaaattgttattgaacatttacttggacgggcactgtggaaaattattccttgtccaaccacctcctcagctgtaactggtagcacaattcttgacccattttacagattaggaaacatgagtttccagagtttattggcactcacgtggctgttacatcgttttgatgttcaaacgacctactttattcaaagtcaggtagtacagtctgctggtgggaaatacagtattactcaagggacttcaaaggaacaagaagatgtttgagttgcacagtgagctaaattatgcaagttgcagaaatcctaggtggatagtacgacacctttcagatcagtttctaccctcaagggtggcaacaaccttgtagatccattatggattaggtttctaaactgttttggtgttatgaacccctagagtcttctggggaatccaatggacctcgtctcagaataatgttttacaatgtatagcagaaagaagagaaattatattgaaatacacttctggcatttgaccccttaggatttttccagcatttctactctgcccacctctcctctcatgtctaccaaagagactttctctactttattcagaaaggtaaatgagagacactcaaacaggtctgtaggttatgggagtagcagggagtatgggataggctactgaggagctgtttttgaggtgacatcactgtctcccttcctttttcccttccctctggaagcctccttacttctccagctcttccttccttccccacatcaagtccaatttttctccttttacttcttgtctatcctcctcactccttgctcagccccgcccgcttttctaggcccgcccctccagggccccaccctcaggccgctcctccagtctaggccccgccttctcctcagtttcctgccaatgacgctggggcagccggggcagccggggcagcccggtcaccccgcccccaggcccacactaagggtgtccgcggcctgccctccaggcggaggagcccggactgcggaaggatggagctggccgccggaagcttctcggaggagcagttctgggaggcctgcgccgagctccagcagcccgctctggccggggccgactggcagctcctagtggagacctcgggcatcagcatctaccggctgctggacaaggtagcggccaacccgctggaggaccgcggggcctagaatgcgccggggtcgacctccccgcagggagtgcggggcggcagtcgcggaagggacaggggcgcgtcttctccggctcaggaaggagctccgcccggaccctgtctcaagctctggagctagcgcaggggcggtgcctccaagtgactgccgtgcagatccaggggagttggaaggtcacaggagttcagcctcagg

SEQ ID NO: 18568 - DNA, 2300 bp, Homo sapien
tgtctaaaatgctgggtttgtggctatgtgccagttgtaatttgtgcattttttggtagtaggttttgttggatttagattagtctttttataaaataagcagcatggtagagtggagaaagtgctgggttggggctatttccagcctgtctactactaggaaacacgcccttaaatggggcctctttagagtagatgggctgacaaagccaagggtattgaaaagaagaaataagcacgtaccatgcaagcctaactgggcctttttgcaactctgagtttctggggtttcatagccacaatctgaccaacagcaccactgagagagctggtttttatccattaaataaaagcattacttccgttactctcagctacacttactgcagtaagcctaagtaacattaaagaccaagtcaccttcatcttacatagattttaaactttttgaagcgggcagatactataccttcaccttgacttgaatcttcccttgagcttaatgcagctgacactcaacaaaacactcacaaattgactcattgctgttcaattcttgagtatatgtatcatgcacttcctatgtaacaagcgttttactaagtattaaagagttttttttaaagaaaaggaatgaagcatggtgccttccatcaaggagattccattctggtagagggccattcctgtgattatgtacacatgcagcaacaactaaatccatttgataagcattctgaggaaaaactgtaaaaagtactatggaagctgaggttggggatagtaatggaaagttcctggggtaactgatgccagagctaagccttggaagatgagtaatataagaagctcaccatcttgcagggaaatatatatatatatatatgtgtgtgtgtgtgtgtgtgtgtgtgtgtgtgtgtgtgtgtttaatttttctgagtgcctcactgtaactcagtacgaatatcctcactccatgttaagcccagatcacctgcagagatacctattattacttcttttcatttacttgtctttttttttcctattgtatagtagcagcaacatttagatagagagttcccttgaattctctatttttaaaaaagcaattagacattcatgatcaagggtaatggggctctgggctcaagtcctctattttgttcccattcatctgtgggtcaataggtaagccacatctgctgagcctcaactgcttcaaagtactcatccttgctggacaggcaagttgctggaaacaagttttccttcagcaaccattcaggtggcaaatgttttattgaacatctacactgtgccaggcactaggtgaggaatcagggtccaatcaaactctccaaaccactgctcaacatactcctcctttgacaaatgggttttcaaaataagcatgcacataatgtgcctcctttggcacacttcccaagagatttcactctgaaaagaaaggccagcctcagcccttaaagtgcaggccaaataaaaacttgcttgactatcaagattatattatcatctcccctccagttcccaccagacttctaggaaacagccagacagctcctccaaccaatccagtagccaaaataatccattccaaagcttcaactgagcatcttaatgaaataattgtttacctgattagtattcagcatccgcagaaggaggctaaaacccacccctttcaacctttcctctctcagtctcactctctctttccttcccaccctgtctcctttcagatatactttcgaatcccacccctttcaggggcacaaagaccaactcaaatctgatcgcagcattatcaatcaacttattccctccccaccgggcacctcctaagatatttttcaccatttctttcattctttgaaaacgatttctttgtcaccaagcctgtgtggcacttcccctgcctctcctcttgaccctgcactgtaatctggacactcctggagccaagccgtgggagaggcagccatgctcagtctccctggataaagccagggttcccttggcaacgggaccgtgtggacattcgcaaaggggtttccctccaccccccaggtcctctttcaactcaagagctcagtcctgtgtctctcatggaggcgtctctaaccagggtaggaaaacaatagttctaaatatcggtaattggtgtttggaggccattgttttgcattcaacaggcaggaaaatgtgagttgagtgggcgagtgaattcgggcgttagctggtgagcatccatggtcaggcagagggaaagctgg

SEQ ID NO: 18569 - DNA, 2300 bp, Homo sapien
caactaataataataacttcttccagttagtgacacatgtgagatcttgtcgggtcaaactatagaatccatctaagaaattcagtccaataaaaatgtatcaacctcttacctgtataaagaggaattatctgtattatttatgggcccagaaatttaataatttaacaatttgtcaatccatgagccccactcctaaccaccttcacagatagtaaatgaggaattaggtggcttgctaaaacacgtagagattttttaataaggatgttgattggagatattgagtagttggaggaatgaaaattggagaaaagcaatctggatgaggaatttgggacaaggatatagctttgactgtcacaaatggagacatcttacccaagcaaaacctccatagctaccttcccagctcccatttcatggatttatcatatgttcttaatttggttttacaacttggccttctgatagtaataataacagcagtaacaacaccaggtggaattggagagagtgctggagagaggaaatacaataagtctggttggctagttcaatggcttaagactttcatcattttcttgcttctggttcacgctgacattaggaggactttatctaactattttatatatattattttatttaacctttatggcaattctttgaaatagccactagtaatatttctatcaatctcagagcattgaaccaatttgcccaaatcacactattattaagaaatggtagagcttggaaaaacatcggtcactgaagtaactaatctgacctatccagatcagtgtgggtggtgtggaaagatctttctgtaggtctgaggacaccatgatttgagtgcttagtcttagagatgatctggaatcacttgaatctcagaatgcaaatagttcatatcaatcatagggactttcctgccatttcctattaaacctactacactaaaaagtacccctttcaatataaccacaataggtccaataaattatggatttggaagcaagctgaattgtctggtgggctgccacactgaacaaattgcctgcacaattggccttccaagcataggcacagtctaattgtccctccccttttaccaacatcttgaataaatagaaacttggcattggtttcaatccccctcctcgcatctcccacaaaagctttctatttcttggaaaagaaaactgtccatttatcctaataagtatgagttgagaaaaccataatctttaggagaagtttcatttaaaggaacaatgtgtcagaacttggccaacaagaacaaggtacaatgtcagtgtgaaccagaagcaagagaatgatgagcgtctaagccactgaatgagccagccagacttaccatgttttctgtctccaagattggacctgggagacaaagtgagcatcaagtagtcttgaaattctaggatactaaggagcagggagctgagcatgtgatgagatacagcagctagcatgaatgttttttctttctgggctacagcctcctgtatccccaagaaaagtctcccaataaatatatattcatctgtaggctaggcttctctctcttttttttttcaatcagtggcttcaaacgtgactcctttttcattttgaattgattactgtacaattttttaacattctttttttctttctttgtttcagaggctactctttaaagacaggcattttacttgcagcaaaatgtaagtacatttcctccttgaaatggtatctacttctcagctgtaattcctaaagcctcctaatctttaaggctcccatctcacattgctgcatttttaaagtctagctcagcacacacagccaatctaacatttcatactattgatttgtataacatcatggaacatttcagaaaccaatttggaagcagattgaacttaattgtggttgtgacaatattacgtctaaaggtagataaaagtgaggagtaaaaaaataggcaatattcatttatatattatgaccatgtgacactaaacatttaaatattcagttctctcaaatgactaatttattattcttttcccagttgctcctcaccgtgtggtcacagactgtttcttgtttaacggcatggtggtaaccttaataattccttcctgtgtgtactgcgttatggccactctgtaaacccgtattctctccagaactaatctcctgtgtattatgtttctttattcttagtacttccagtgtctatacccaaattacaaatcccctctattctgaaagaccaaagaaaa

SEQ ID NO: 18570 - DNA, 2300 bp, Homo sapien
aatagaggttttgcagaaagactgtagtatgcaacaaagtgttttcttccttagacagatgataaactttgggagttggggtggggcaggttgaaaggaaaaaccagatctttggggaaagaaagttaagcgatttaggttgtcacaatgggacctcttaactcccactccatggaagactggcaaatacttgagtcatccactccaagtctctcttctccagctttttccagattccaatcacattcaccacaaagaaaactgagtttgcattttaaagctgagattgagttcctcgtccaaggggaaattaaccggaggtgtcccttcagtacccatctcccatcaaagagaaactgcttctgaacaagagaaagcatcgtggaggtttatttaaaatcacagaaaggtagggctggaagagaaatctattaatagttacgtcactaatgcgaaaagtgagaaaaatgacttgtccgagttatatcagggtggaccccgggcaagactcaggtgcctctgctgtcagctcacctttcaagtttctggtccccactcgcacccactgagaccagagaccgatttacctgaggcagaaggtgctgcacgcattcttgtgaaatttgaggggaccgagaaggaatctcaggaagtttgtttacactgggggcctggagaccttcgggaaaatagccagaaccaaaacggaccagtcagcagacgcagacacacacaaagtgacagggacacagaagcagaagctgaactgggcagagcgggcagcggccgacccacctcgcacggccgcccccgccagcgccaggtgcagggctcatagcgggccagcagagggcgcgccgcccccagggagccgagcggcggccgcgcggagccgggcgggctaggggagccgcaggcgagccagtcgcgcccctgaggctaggccactcagggtgcaggacccggccaaggaggaggaggatggtgaggagcggaaccccctcgtgggcccgaggggcagacagacaggagtgcttcctaagaattacatcacgctgcgcaacgctgcggctctcggactccctggtgcaaaggggggtggggtaggggctgtgtgtgtgtgtgtgtgtgtgtgtgtatatatgtgtgttggggggaggggacttagagcaagagcccgggagagaagaagacgcgctcggggaaaacgctccatgcacatggagaaatttcttgctccgaactgcatgcaccgagaaacgagcccccagcacttccccgctgctcccctcccagtgcaaagcacccagctagtgagaaaccctccagccccacctcaagcaccgccccccctccccaaacaccggctctgcaccctccagcccggctccagcgccgccgcgagctttccccaggactggccctggcggggcgcctagagccccagttgcattgctccaggagaaaggaggggggcggtgcattttgcaggaggaggagaaggggggtgggtggtgggggagagagaaaattgcgcggagacctgccaagcgccaccgccgccgccaccgccgctgccgccgccgccgccgccgcctgtgagctccggcgggcagccggactgtcggcttcccggggcatctgggtccggcggggcacagccctgggcgctgccgaagccgccgccgccgcctccgcggcgagtacaggcggcttcccccggagcctgtgcagctccagctcctcgggggtggagaagtggggggtggggttgttgtttggggggaagaagggggagggggcaacgccgagagagtcagtggtttccatggtgatggagctgaaagtgcaggaaatttaaaggcttggaccctgcgagacagacaaaccggtgccaacgtgcgcggacgccgccgccgccgccgccgctggagtccgccgggcagagccggccgcggagcccggagcaggcggagggaagtgcccctagaaccagctcagccagcggcgcttgcacagagcggccggacgaagagcagcgagaggaggaggggagagcggctcgtccacgcgccctgcgccgccgccggcccgggaaggcagcgaggagccggcgcctcccgcgccccgcggtcgccctggagtaatttcggatgcccagccgcggccgccttccccagtagacccgggagaggagttgcggccaacttgtgtgcctttcttccgccccggtgggagccggcgctgcgcgaagggctctcccggcggctcatgctgccggccctgcgcctgcccagcct

SEQ ID NO: 18571 - DNA, 2300 bp, Homo sapien
tgcgtgtagtcccagctactagtgaggctgaggtaggaagatcacttaagcctgggaggttgaggctgtactgagccaagttcgtgcactccagcctaggtgacagagggagaccatgtttcaaaaaaaaaaatgctctaaaattccttagttattgaaaattatgtgaaaacagaaggatgttaatagcagcagagtgcatgaaatcaaatattgaattttgagcaaatgggccaggtgcagtaattctttcttgcctgtaattccagcactttgggaggctgaagcaggaggatcacttgagcctgcgagtttgagaccagcctggctaacatagtgagcccctatctctgcaaggaagaaaaaaaatcagctgggcatggagatgcacacttgtagtcccagatactcaggaggctgagatgggagatcatgagctcaggaggttgaggctgtagtgggctgtgattgcaccactgcacttctgcctgggcaacagaatgagaccctgtctcaaaaaaaaaatttacttatatatatatatatttgagcaaatgaacatgtgagacaactttgctaacattgcatgatcttttttttcttgtttacaatctgctcaaaatatctttatgttgactgtgtgggcagcacattcaggtttaatatcagttacacattagcataaatttggagaaatacacatagggtattgttttcttttgagctggcaaagtgaccacagaaacatcagatcatctctctgaatacagaattttatccaaataaatgtcacatgctttccagacatattttaatcatgtattgaatttcttaggctgagagcagtgtctcatgcctgtaatcccagcactttgggaggctgaggcaggaggatcacttgagcccaggagtttgaaaccaacctggtcaaaatagtgagaccctgtctctacaaaataaaaaaataaaaaagttaattgagtgttgtggtgcgtgcctgtagtcccagctactcgggaggctgaggtggaaggatcgcttgagtctgggagttagaggctgcagtgagcctctgcacaccagcctgaagtgagacccagagtgagacccccatctcaaaaccaaaccaaaccaaaccaagccaaaccaaaccaaaacaaaacaagaaactttcttcatgtgatatttatagatgatttgaatttgaaatgacttcagcttcttaaacttttgttgtccttataaaaatacccttgaatctggagcatggctggttccagtcttatgacagcatgttgcgtgaggccctgtaaaagatgaggagttgtccctgaggttatggggcttactgggaagagcacatgatctaggtttgaagacagaagacgtaggctctaccttggcatccataatgtgtgaacttgaacttgatttcacatctttgaatctcacttttcttactgtaagatggaagtggacgatgaatagtactagctgccatgaaggtcatagctttcccctcatcctttattgcaccccacaaggtaggtgctcttatctccttttgacaggggaggaaactgaagttcagaaagggtaagtcacttacctaaggctacattgctagaaaaaattgaagctaggatttgaactctgtttttctgtctctaaagtcagctgaaaattgtttttccccactcatcatgccccttgctaatttccctgcctacctctgagattattgggaagatcaaattagactggtgaatgggctttagaaaaatgtcctaaaagatacaaatgtgtaatagatcatgaattctcaatgaaacaggagcataaatggaagctccagagaaacactcacaaacatctgtctggtgcttatctgtctgtttaaatgaagtgaatatcacatgttgctttttcagattcaagctctgaaagtcatattacagaggaacaatttccttcctcaggatgaaaatttacaggaattcggaggaaaatatttcagtggtcattactaaaacgctcagagtcagatacattcagcatcataccgtaagtcccgttagtcaaagcataaacaagcgcagggcctggcatggcttccttcaagttggctgactcagtctgggaggattcactcagcaagaggcagaggaaccaaggcaggatgaagacattgcctgtgctcgtgctgtctcttaccttactgactgtcttctcaggtgggcactgactccaaaaacagcctatttctatgctgacatgataaataatagtctatttgatat

SEQ ID NO: 18572 - DNA, 2300 bp, Homo sapien
agcccggccgcggtttccgccccctgccgtggcgggcgggcctcccctgcgctaccccctcgcccgcgcccgccagcgcccgaggccggggagaaaggggagcagcgggagccggggactaccggagatgggagcacgcctcctgctgctgtcgtccagccccaggttccggaggaatgctcgctccccgctggagtcctaccagcccaacacggacctgagccgcgaccacgcgggctgcagcctgcagcacatcagctacccggagaacgcggacgcggaagcaccgctgctcagcacccccgaagaaacacggaatccagagaggcacaggcaccgccccggcgcgcacagctgcactcagcggcttccttcctactacatacatacataggagtgggagccgaggaccacttgttgcttgcggacttcctctagcataaaagatggaaagaaaacacacaccgaagcaagggaccaaaggaacagaaaagaaacgcagagatcataggaaaactgcaaagaaatacttgataatatcttccaaacgattagagaagacataacattcattaagaatacacatatagatgtatatatacgtgtatgtgtgtatgtatatattattatgtgtgcatatatatgcatgtgtatgtgcgtatatttgtattaactgtagaagataaagctagacactagtaaaagtggtaaagcagattttaataatatactattgtaatagggaagaaggtacctcgtgaacggaactgaactttgtgcagaagtgactaggtgtttaagagggaggaggagggaatgtgaaggggatgagcaggaactcagtagtcaggaaagtgaaacttgtgaagggtgggtcagtgtaagtaaggttaggcgacagtgcctgttagatggctgttatgggagtcagggtcctatcctcccacagtaactgggagataggccctttgcttcctggtgattgcatgttggaggaatggctttcaggttcttgagaaggatactcctgatgtgtaggagacattacatcccagagagacagaggaaggattcacaattgtttagttttttgttgttgttgttaactctttaagaaagggacatcaggggctgcttgtaaggtgttggcaatagccaacagtgagttcttttggcagctttcccaggaagatactttagggggtctggggtcatcctatggatgcagctttgagcagttaaaaactatgtgtttaggccgggcgctgtggctcacgcctgtaaccccaacactttgggaggccgaggcaggtgcatcacggggtcaggaattcaagatcagcctggtcaagatggtgaaaccccgtctctactaaaaatacaaaaaattagctgggcatcgtggtgagtgcctgtagtcccagctacttgggaggcttgaggcagagaattgcttaacccaggaggcggaggttgcagtgagctgagatcgcaccaatgtattccagccggggcgacagagcgaaactccgtctcaaaaaaaaagaaagaaaaagaaactgtgtgtttaagcgttttgatatagggggaaggatggacccgatcctttttgctgaagtctgcagatttcataggccaaggtggaggcctagttgaaaagggggctcagggaagcctggctagagcttggtcaaggaggggatcttcatcagtcgtacgtatgtacatggcacgtggacctgcatagacacgtgtttggtggaggctgtcttatacggattctgcacaactcaagtcccctaatgggaacagacttggggaggtcactcttgaggctttttgtggtattgtggctactgggagacctgaggagggttctggtcactagcagactcatttcattcaccccttggaatctgcccaggacttggacttctgtgtaatagtaacttcacgccccaatgatcctccacgttccttgctgatgctgtgattgctcctccaagttctccacctatgtccatctgagcacttggtatttctactctagtgtcaaaaggtcctgttcccaagtctcctcccaaacatttattccaatttatcatccagatgcccgtcctttgccatccctctctgttccagcaaaggacaccacccctcagggagatgctcacagtggactccttgtcctcatcctgactccccttttctctggcacccgcaggcctcagtgagtctctcggtctctggcagcagcacaggtcctggactcgagcccatctctccatccccccctccac

SEQ ID NO: 18573 - DNA, 2300 bp, Homo sapien
atacattggtgcgatctcagctcactgcaacctccgcctcctgggttaagcaattctctgcctcaagcctcccaagtagctgggactacaggcactcaccacgatgcccagctaattttttgtatttttagtagagacggggtttcaccatcttgaccaggctgatcttgaattcctgaccccgtgatgcacctgcctcggcctcccaaagtgttggggttacaggcgtgagccacagcgcccggcctaaacacatagtttttaactgctcaaagctgcatccataggatgaccccagaccccctaaagtatcttcctgggaaagctgccaaaagaactcactgttggctattgccaacaccttacaagcagcccctgatgtccctttcttaaagagttaacaacaacaacaaaaaactaaacaattgtgaatccttcctctgtctctctgggatgtaatgtctcctacacatcaggagtatccttctcaagaacctgaaagccattcctccaacatgcaatcaccaggaagcaaagggcctatctcccagttactgtgggaggataggaccctgactcccataacagccatctaacaggcactgtcgcctaaccttacttacactgacccacccttcacaagtttcactttcctgactactgagttcctgctcatccccttcacattccctcctcctccctcttaaacacctagtcacttctgcacaaagttcagttccgttcacgaggtaccttcttccctattacaatagtatattattaaaatctgctttaccacttttactagtgtctagctttatcttctacagttaatacaaatatacgcacatacacatgcatatatatgcacacataataatatatacatacacacatacacgtatatatacatctatatgtgtattcttaatgaatgttatgtcttctctaatcgtttggaagatattatcaagtatttctttgcagttttcctatgatctctgcgtttcttttctgttcctttggtcccttgcttcggtgtgtgttttctttccatcttttatgctagaggaagtccgcaagcaacaagtggtcctcggctcccactcctatgtatgtatgtagtaggaaggaagccgctgagtgcagctgtgcgcgccggggcggtgcctgtgcctctctggattccgtgtttcttcgggggtgctgagcagcggtgcttccgcgtccgcgttctccgggtagctgatgtgctgcaggctgcagcccgcgtggtcgcggctcaggtccgtgttgggctggtaggactccagcggggagcgagcattcctccggaacctggggctggacgacagcagcaggaggcgtgctcccatctccggtagtccccggctcccgctgctcccctttctccccggcctcgggcgctggcgggcgcgggcgagggggtagcgcaggggaggcccgcccgccacggcagggggcggaaaccgcggccgggctcggggtcagcggcgacgagcgggcggctgccccgctcgccctcggcctccgcgcccgcccgccgctccgcagcggaggagccctcaggtttgcgttactgcggccgccacacctacctcagcccgccgcggccaggtcgggcggtgccgcgcaggccgcctccccccctcgcttcccagtcggcttacgcatccccggcggcggcggcgccggcatcggctagaggttcggctcaagtcgggggcactcgtgtctgcgccgagcggcgggcgtgagcgcggcccctgggccccgcgcggcgcggtgctgcgaggaggatcctcgtggccttgccccgccggcggctttccagaattttctacgattacgaagttttggcattcaaccctccatcctctcaaacgccccactgttactccgcccccttcccctaggccccgcccccagccgcagtgccctgcctcttccatccgtctccagcctcctccacggccccgccccctcaggccggtccgtctcccctcccacctcacacctccgccccgcccgtcagccctggctccgcccagccacggggctcgccgccacaggccccgcctccagctcgcggccccgcgcgccggatcggcgtgcgtgcggctggagccttaagcgtttcccccgcccggcttcatccctgctggcggcccagcgtcgttctcctcctgcgcgaggcggccaaggcctgctggcccggagccgcgcctccacccgcgcgaggtagggcttcgaggaccggcgcggcgcaggtctccgga

SEQ ID NO: 18574 - DNA, 2300 bp, Homo sapien
actgagttagaatagatcatttgcaaagcagcattctcctttaccaatttccaacatcagcaaaggacatcttcacctattttcaaacaatatttaaggacaaaaatgtgttgtccagtgtgtatataaaagacattaaaatattcttggcttaatcaaggtcacttatctaagattctacatgtcctgaaagaccaagcgtcaaaaggaatattcctttcagtgttctttttgagtatatttcgctatggtaccaacagctatattagcaaaagacataaaagtgctgccttggaatgacacttgttttcactgcacattcatagtacaaaacctgtgacccatcagttttgcggctgaagggaaaagttaatttgtccatatttcatttttccttatttaaaataaggagataatcgataggaacaaaagctaaaatatacagtggccatgaagcaggcaccacttagaaacctctgtattaacgttaggagccaagttttattacccaaaagggcaggctggctgaggagtggaggctggatgcatcgtctcagcaaatgactactgcaaagctgccacgcttgcacaaactcagggatgtttatttattagcttgtttcctcaaaatgagtttaggtcatcagcagagattaaagcaggcctctacaccactctatgaaatcctgattcccacggcgcattctgggacagtgagtgtccacgaagaccatacctgtaatcgcaaagcttgggttgacagccacactgctgcttgcaaaccatacagtaactgcacaggggcacgttgccccggatccagtggtggggcatggcgtccaggaccttggtgtcattcttgagcataatctccttgcactggaagcgcttgtcggccttcctgaggcagccctcgtccacgcggagcccgcagcagtcgcagaaggcgccctgcagaatgtgctgcgcgcacacgcagcagtaggtgggctggctgaacaggtccgtgtcgcgccacccgtgcttgctcttgcggaagatgtccctgcggtgcagctgccggcgcgaccgctggaggctacaccagaaggtgatgaacaccggcagcaggaccgagcacagcgtccacaagatcaggtgcccgtccgcaaacaggccctcggagggcgagcccggcgccggccgcctctccgcttccatcttctccaaggacgatacctaaccagaaaagaaacaggcggtgcaccccgagctcgccatcccttccccgcccccttcctgcctttccggggccaaaccgggcgccctcagtgaaggtggctccgctctcccgagggcgggactgcgcctcgtccccccgtctcccgggacctgccgcgccgagaaggcgacgtccagccatcacgctccaatccccactccccaacccgccccacctcgggagcgcgtccaggagcccaaggcggctgctgctgccgccgccgcctcaccttgccgccggtctgacccacggaagggcgcaacatacaggggcaagctgccctccaccgaaaggccgggcgttcaggccaggcaacgccggtcggcgcccgtaaccgtcggcccaggcctcgcactcccctccggggcgccgtctcctcccgggccccacccgctcccacgcgcggcccggcgaccctagcccctctcgggaggcctccggagacctgcgccgcgccggtcctcgaagccctacctcgcgcgggtggaggcgcggctccgggccagcaggccttggccgcctcgcgcaggaggagaacgacgctgggccgccagcagggatgaagccgggcgggggaaacgcttaaggctccagccgcacgcacgccgatccggcgcgcggggccgcgagctggaggcggggcctgtggcggcgagccccgtggctgggcggagccagggctgacgggcggggcggaggtgtgaggtgggaggggagacggaccggcctgagggggcggggccgtggaggaggctggagacggatggaagaggcagggcactgcggctgggggcggggcctaggggaagggggcggagtaacagtggggcgtttgagaggatggagggttgaatgccaaaacttcgtaatcgtagaaaattctggaaagccgccggcggggcaaggccacgaggatcctcctcgcagcaccgcgccgcgcggggcccaggggccgcgctcacgcccgccgctcggcgcagacacgagtgcccccgacttgagccgaacctctagccgatgccggcgccgccgccgccgg

SEQ ID NO: 18575 - DNA, 2300 bp, Homo sapien
ttatgctgttgtcttcttcctgttttagaaggcaggcccaggtttgactcacatcttactcatttagcactcagtctgttgcatgcctattgcacagtaggtcttagtaaatatctactgcatggaatttgataaagtatggccctcctattcatcctcattggtctaacaagcccttctaaaccaaccagcctggaaagtgaattccacattctggcatgaatcactaggccacctcacccatgataaataggtcagaggggatttcacagtgtttcctggaaactgctccactcctccctttggaggcagcattttatggtaggaaactcctggctttggaaagcagatgggctgtgtgccaatgtccattcttagacacactatttagtttctctaagcctcagttttctcatctgtaatttttttttttttttggtgaaatgagattctatgcatagctttcatttcctatcccctcattcttctgtcttcctcctctctgtgcaaacaagatgtgggacaggcccatggtggctcatgcctgtaattttggcactttgagaggctgaggtgggagggttgcttgaggtcagaagttcaaaatgagcccaggcaacgtacagagaccttgtctctacaaaacaatgttttcaaaaattagctgggtgtggtggcacgtgcttgtattcccagctacttgggaggagtgccgcaccctagacaacagagcaaaaccttgtcaagaaaaagaaagaaagaaaaaaaaagaaaagagaagagaaaagaaaagaaagaaagggaatacataaaaggtaaatggtaaaaggttttaggggaaaaggagtctgcagaacaagaattagggggaccaggagtgagtgacaatggggaggtcagcgatcctgagctacagtcccagtcctgctttgcataaattgagactctcattcctaaaatggactggcagtcttgcaggggtttataaggattataagagataaccatgtgacttatctagcacacaaaaggtacccccccataaatagtagctattacaaggtaatctaagacatttaccttttcctcattttgctactcactctgtccccaaagcaaactccaactaactccttccaaaacaccatccttctctttgccaccatcccccctcttttgaacacttctactctcctgtccacccatatgtcctgcagtcaagccagaggagggaaaacagagcaaaagaaaatattaaaggaagtaagtttaaatcaataactttgagaaaaatatttaagttccaatattgtgtgtgtgagtgtgcgcgcgcgcgacagagagaaagagagcgagcgagcgagggagagagacagagagagaaggagagagaaagcctttgttaaactgggtaactccaaatcccaggaaagtagaaatgggaatttttataaaagcatgatacatcagtagaatggaaagaaatcaccaggtttaaatttgagtgtgtgactacggcctccagtcttccgggattgtatgtccgcatgtccgagtccgggaagaggaaagaggaaggattaaaaaaaagaaaaaagaagaagaaaaaaagcactgtggtttaacagttcctttttatttttttaaaggttggcccacaatataaccagcgctgctagcggggacggtggggacacctctggtctcagatgagtgctgggaaggaggggacttgctccgagcgcaagtttgtgcggaagcgcggctggacctgggctctgaatccgggggtccggggttctgcacccaggcgtcagcttcctcatccgcagagtggcccccagaagcctccgggtggtcgcgaggatgctctaaatcccgggggctaaggccgagcccggcgtcccgcgcccagcccgcgggagctcttggggatcggagcgcggccgaccttcgccagctcatgggcgactgggactgcggtgcccgcaggctcccgggagtacctcgcgaggcccgcccagtcctcgccgcccgcccccccgcaccccacgtgacttcctgacggcttcagggactgctcctctcgagctaggtttcgtttcctcggcggcctcggagcgcgggtgcagcagttgtgtcccgacccctgggagcgccatggcagagctgtgccccctggccgaggagctgtcgtgctccatctgcctggagcccttcaaggagccggtcaccactccgtgcggccacaacttctgcgggtcgtgcctgaatgagacgtgggcagtccagggctcgcc

SEQ ID NO: 18576 - DNA, 2300 bp, Homo sapien
acttgaagagaatttcactgaagaagcacataaacacaggaaaaatgttcaacattattagccattagaaaatacaaattaaaaccacaagaggctgggcatggtggctcatgcctgtaatcccaatatttgggaggctgaggtgggaggatagcttgagcccaagagtttgagaccagtctgggcaatgtggcaaaactccgtctctacaaagattacaaaatttagcagggcatggcagtgcatgcctgtagtcccagccactcaggaggctgaagtgggaggttcatttgagcttcagaggtgaaggctgcagtaagccttgtgatcacgccactgcacttcagcactggagacataatgagacccagcctcaaaacaaacaaacaaataaataaaaccacaacataccacaacacatctaccagaatgactaaaaaatagtgacaatgccaaatggtagtcaggatgtggagaaactgggattacaggggtgagccactgcgcccagccggaaatgcccaaaagttatcctgtatggtgtaaaaggggagtaaccctcagttctgagggaaatccctgcccctttcctagggatacagaaaactcatgaataatccatcctttgtttagcatacagtcaagaagtaactataagtatacttgactgagtatacttatagtatgggctcgctgctctgtctatggagtagtcattcttttattcctttaattctctaataaacttgattttagtcggaggtggtggctcatgcctgtaatcccaccactttgggaggccaaggcaggcagattgctggaattcaggaattcgagaccagcctggccaccatggaaaaaccctatctctacaaaaaatacaaaaattagctgggcttggtggctcacacctgtggttccagctactaggaaggctgaggtgggaagtcacttgaacccgggaggcagagtgcaccacggcactccagcctaggtgacagagcaagactctaaaaaaagaaaatccaaaaacccttactttcagttaaaaaattttgttttcaattcatctactgactccctggtatctacaacttaactagtctagtgaacttggggaagttactcctttttttttttttaagacagaatcttgctctattgcccaggctggagtgcagtggcacgatcctgactcactgcaacctccacctcttgggttcaagcgattctactgcttcagtctcccgagtagctggaattataggcacatgccaccacacccggctaatctttatatttttagtagagttggggtttcaccattttggccagggtggtctcagactcctggtctcaagtgatccgcccaccttggcctctcaaagtgctgggattacaggcgtcagccactgctcctggcctctagttacttcttaaactctctgaaccttgttttttttaaatcctctaaataaggataacagttcataattcctaacttttgttatgaaaattaaaggagttaatatatattatgtggagaaatgtaaattctagttcaaaaaatagaagaaataatgtaaatactgatttatttatctggtgagaaatgcaaggacatttttgtttggtggtgggtattaaaaggctaaggtatttatattccactggatacatttggaagaatgattaacagtgttatttcaaaatttcaacattgagaacacactaggacttacatctttttcaactcatcatgatgaaaaattttgtcagcgaaatgtgttaggattgttttataaaaatctttcacgtcgatgagcaaatatcttagaagactactgctgaggagaaatgttatttatccagagagttgccttaattaggagaccctacatagcgcccagtagaaatgtaataaaggcatttcacttattcccttcctcagccctgccgtgaacaaaattgaatgaaatcaaccacgctccgagttctcgcctagacgcagcctgtagtagccaggtttcaccactaggtggcacacgccaaaggctccggcgggggcgagccgcccgagcacgcctctcggtggccccgtggtatctctcggcttccgttgagcaccaagcaagatggcagcttccgagacggttaggctacggcttcaatttgattacccgccgccagctaccccgcactgtacggccttctggcttctggtcgacttgaacagatgccgagtcgtcacagatctcattagtctcatccgccagcgcttcggcttcagttctggggcc

SEQ ID NO: 18577 - DNA, 2300 bp, Homo sapien
tcatgtatttatccatgtatccaaccttctttccatcctatccatcaatccatcttatattctggatactttttttttttttaagagacatggtctcactatattgtccaggctggtctcaaacttctaggctcaatcaatcatcccaccttggtctcccaaagagctggattacaggcataggtcactgtgccagcatctggatacatttcaaagaaaattgtatacattggtacaccttcccctaaacactttaatatgaatatcattaactagaggtgacattttatttatattttttccttttgaagtcatattagcgtattataaaatgcacaatttttttgtgcgtgtgtgagatggggtcttactctgtcacccaggctggagtgcagtggcaccatcttggctcactgcaacctccacctcctgggttcaagcgattctcatgccttagcctcccgagtagttaagaccacaagcaagtgccaccacacccagctaatttttgtatttttgtagaaatggggtttcactatgttggccaggctggtctcaaacccccgacctcaagtaatctgcccacctcggcctcccaaagtgctgggattacaggtgtgagccaccttgcgccctgggctgtagtgttatttttgtggcaaaaaaattgaaaccctaaaattctgactgcagtggaagggtaagtgtatttcaagccctagtgatacagaccaacttggaagcttcagacaggaaaagtttgctagatagttatttatttttaactaagcatgtacttttatgtatctcccatatggcatggaacacctgctcactgcagcctggagctcctgggctcaagtgatcctcccacctcagccttctgagtagcttggacagcaggcgcgtgtcaccacatcagttaatttttgttattttttgtagagagggggtctcaatatgttgcccaggcattatggattttatgcattcgggaccatcccatgcttaaagcatgacagaacccggcggcatatttttctctgccgcagctttcagtgcaggggcacctcacaggcagggcggggtcaaggctctgtccagacaatggctgcagagtaaaaagcacttccatttatgggggtcaagggcgaggggagggagaaaggagcagggaaagaggagaagtggccacatgtactttgatttgttttttgctttttgttacatgtacttttgaagcagtatttagaagtagcctctcctacagcccctgctgtagcttgtctcctagctgtgaggtgagttattcagtaccctctaacgtaaaaatgaccttcagacagacagacagacacacacacacacacacacacacacacagaggaaaacagctctgtcatccactttttcttcctttcccgtccccagaccctcgattctctctttaaaatgactgctgtgaagataacgtaacacagagtaatactaatgacaaattatcaaaaaagaaaaaaaaaataaaaatctttattagtgttttttaaaatgacgtaaaagactatgggaaaaaatgccaacaatagttatgtataacttttttgttcatatttccaaaacgtttataacatacataactttaaaagaaaaataatttaaaaaatacatatctgaaaatgaaaccccgctgtttgccaacgaccagctggcttaatctgacttcgcagatgtagcagtgttggaaaacgtcggttcttttgctgagggaaggaagagatgggaggggtagaaagggcggtggttattccctttagtatttcgatccggtcacacaacctaaatccaacatctgcatcaaatgtctcctttccgaaatactctccctaaaatgacagagaacctggccaggcggacagaacggcccctgcgcatttgcaggggtcctggtgggcttgccgggcagagggcgtgcgggtctcagcaagctgccgggtccgcccaggccccgccccatgcccattcaggccccgcccccgacccgcaggccccgcccccgacccgccccgtccgcctccgtcacgtgatggggcgccgggtccagcctgttgctgatgctgccgtgcggtacttgtcatggagctggcactgcggcgctctcccgtcccgcggtggttgctgctgctgccgctgctgctgggcctgaacgcaggtaggttcaagcaagaggcgcaccagctgccatgcctcttttttctccaggcgtgagagtttgttactgggtttgtgcttttgaaaacatg

SEQ ID NO: 18578 - DNA, 2300 bp, Homo sapien
actacttgagggggctgaggcgggaggatcacttgaaccccagaggtagaagctgtggtgagccgagattgcaccactgcactccaacctgggtgacaaagttagactctgtctgaaaagaaaagaaaagaaaagaaaaaatcaggagtcaggaacattccattgtggacctcttagctcagctctgctcctttcagagaaaaacctcagcagttactaggggagctttgctaatgtggaagtccctggttcactagagaaattgtgtcttttgtgcaaattgacccagccatcactaactcataaaccatctatagcaaatgtggtcattcattgtaaagactaagatctgactaaaatttttgtttgtttcttctctcttccatagggcggtccaggcggttctagcactggatttggaaactttgaggaaattgggccccttgacagtgatctcaaaccacggaaaaccacctgggtacagtgaggacagtcctgagctaaaccttgccccgtggcctctcagaggccctgcccaactctgggaggggccacaaatgtagcaatccctcgctgtccttttccttttcctgtgactactgaggccatgggcacttgtccgcaggcttcctctctggcctagcttctctcccatttctcaggacagcttatcttgcaccagtctgcctcgccttctccaaaacaacccctctctccagctgccttcaaaaacctactacagcagacacctgggaccctgtgttatgcacgctggccatctccgcggcctcagacaccatggttgcaccctccagccacagcccccagtccttttctctctctcctatcctcctacttgtatcttgacttcccctttcaatgtctctcttgctgcccttctcacacctccccctcattcttatcgtctcttccttccctcacccctctgtggtcaactcccatatccttctccctttacagccttgccaaacccagccttgggtcactcccactgtccacctgcttagcccttacgcccaggctgcccatgggcagaactgcacacccaccctggggctgctgcacagcgtgggccccactcagggcttgtggctgttcctctctctgtgctcccactctcccggctgcacctattgctatgaatgttctccactttcctcagtgctcctcctccagcctccctctcgcattagaagctaagctttctgctctttttttttttttttggaaatggaatgtccctccgtcaccaaggctagagtgcagtggcacgatctcagctcactgcaacctctgcctcctggattcaagcgattctcctgcctcagcctcccgagtagctgggattataggcatgcgccagcacgcccggctaatttttgtatttttaggagagacggggttttaccatgctggtcaggctggtcttaaactcttgacctcgtgatccacctgcctcagcttcccaaagtgctgggattacaggtgtgagccactgtgcccggccactttctggtctttctttgtttttttttttctgtttttttgtttttgagacagagtctcgctctttcgcccaggccagagtgcagtggcgctatctcggctcgctgcaagctccgcctcccgggttcacaccattctcctgcctcagcctcctgagtagctgggactacaggcgcccgccactgcgcctggctaattttttgtatttttagtagaggtgggatttcaccatgttagccaggatggtctcgatctcctgacctcgtgatcctcccacctcagcctcccaaagtgctgggattacaggcgtgagccaccgtgcgcggcctctggtctttcttaagtgcttcctactcttgcctcagggtctttgtacatgctgtcctcttggcctgggcctttcctgtgcttggttccaacagaagtctcacttccaggagtggttgtagagtcatcccctacctccactccccacccccattgtccccaagcctcctagaactaaaagggccatatgagtgaggaccatggtcccagtcctgatgctgccactgcctgtccgatcttgtgaccttaggcacattctgggctctttctgggctttaatttcctcatcagcaagggacatggctggactgtgtcattattcaggatcttttatatgtaaattttataactttcaacctctttggaaaaggtattagaataaattctgctcttgcagtgtacagagaagccaggacaatgtggaaatttgatgcatttccaagaaa

SEQ ID NO: 18579 - DNA, 2300 bp, Homo sapien
acggtggctcacgtctgtaatcccagcactttgggaggccgaggcggacagatcacctaaggttaggagtatgagaccagcctgaccaacatggtgaaaccctgtctctactaaaaatacaaaaaattttagctgggcatggtgccacgtgcctgtagtgggactactctggcggctgagggaggagaatcgcttgaacctggtaggtggaggttgcagtgagctgagatcgcaccactgcactccagcctgggtgacagagactcctcaaaaaataaaaaataaaataaaacagagagtccagggaagacttcactgagtctgagtaggtgacctttgagcaaaggacttgaaagaggtgaagacagtgagctttgcagaatattccatgtggagggaggccctgaggtagagtcatgactggctttgggactgaacagaatagaataaaatccaagcttcactatttactatggcaaatactaagtatttactaaggcagcccaggcccctattcccccaaaaaacaaagacaagaaacgatcctctttatctcctttcctgacactccctccctcaatacataccatccacactggtcttccagtttaccagaagttgtttcctgctttttcctgtgttgtgcatctgctaggaatactcctccaacccttatgcccgtatacaatttgcaaggctggttccttctcatccaatgggtctcagtttaaatttcattttaggccttttctgaccacaggacctaaaacatttgggctctttttggccgggcgcggtggctcacgcctgtaatcccagcactttgggaggccaaggcgggcggatcacgacgtcaggagatcgaaaccatcctagctaacacggtgaaaccccatctctactaaaaatacaaaaaattagccgggcgtggtggcaggcgcctgtagtcccagctactcgggaggctgaggcaggagaatggcgtgaacctgggaggcggagcttgcagtgagccgagatcgtgccactgcactccagcctgggcgacagagcaagactccgtctcacaaaaaaaaaaaaataaaaaatagggctctttttctttctttcctatgtcagtttcctatttgtttccttcctgacatctaccacaccatgcaattgggattcatatatatatgaatttgacttaaatctcattaggtatagtaaatggcatctgtcatttaaacttgcatttgatcactagtgaagattaagcattttcccaagtaattgttagttcttagcatgatctattttctatattttggccaaacaaatgttcatttaaagtcactttgttttaaggatgacagcagggctggacagccaaaaccctaccctctccatttattttggaggaatttattttcccaaggtcctggcagagatagtgactcaccgtgactatctctgcaaaaatcattccaaaacccacaccaattcagagaaaagtgcttcatttcgataacatcgacttgtgaaaacgagcaagaaagttgcatttgagtggtaccaggtttcaccattatgcagttatcgagcaattattaatggccaacccaattatacgctacaaggaaatgacggtcacagggaagctcaaagccccgaagcgagggaagccctgctcctcaccggcccctccgccttttccagggcgctctccgtcccgaggcaggagatggcctggttgacccttcgagacaaggcggcaaaaccggtgctgggcttgcggggcagggaatcaaggttcctccggttgctgtaccgtcccgcccggcccctctcccgggcaccggagagatgacggctctctcgcgagagcgcgagcaagacccggctccgggcggcggcgggatgttagcccagcgctgtagaccgcgccccctctggcgcagctgggagaggcgcggcggaggcactgccgggagcggccggcggcgcgcacgcgcaggtgagcggggcgggctcgggagcgcgcgggcacaagggcgaggggcggggcctgcgtcgcgctgcgggcacgtcgccgcgcgtcttcagtatttaatgtctctgtgttccacccgcctgggctagcacgtgggggagctgcggaagcgcggcgctgcgggccgggccgcggggcacagccgggggccggcggcggcgcgcggactccgcatcccgcaccccgatggtagccgaggagctggtaggtcgggggcagctgcgccggggaccccctgccggagacccgaaggcggcggggtcgg

SEQ ID NO: 18580 - DNA, 2300 bp, Homo sapien
tttttaaagacaggtctcactgtcccccaggctggagtgcagtaatgccatcatagctcactgcagccttgatttcctgggctcaagtgatcctcccacctcagcctgctcagtagctgggacaagaggcatgtactactatgcccgactaattcttttaaatttttttttgtagagatgaggtctcaccacattgcccaggctagtctcgaactcctgggctcaagtaatcttccaacttcccaaagtgttgggattacaggtgtgagccatcgtgcctggctgaagatgggtcttgaatgaaagtctatatattgaatggggcatcccaactctccttggctcccataatgctggcattcaggcttatattctctcattcctaccccaagatactagaacattctagtctgaggacactggcaccccattttctgttcctccttcacccctaacagggcacttccatgtcctatggacaaaactttcagttggtcagtagcagagagtggcagtaacaggcccactggagaaaaggtcattgcttgttttttgagacaaggtgtcactctgttgcccaggttggagtgcagtggtgcgatctcggctcactgcaacctctgcctcctgggttcaagcaattctcccacctcagcctctcgagtagttgggactacaggtgtgcgccactatgcctgggtaattaaaaaaaaattttttttttgtagatacaaggtctcactatattgcccaggctggtcttgagctcctggcctcaagcaatcctcccgaagtgttggggattgtaggcgtgagctaccgtggtggcctgtttgggctttttttttttttttttttttcttctgccctccactactccccgccaagactgaaagtgcctcgagggcagtgccttgcctgattaatttgtgtcccaccatgcttttctctgtgagtgccagtaattatttgttgaatagaaattaccttctatgcttttatgtgatttctggggtggtcgtagttcactgtctgccattaggaagatcagggtcttacctctttggttttgcccatgtgaggtgctgcgaagggtttcttgctgcacaccaacatcttttctgatgtctttactggcttttaagtcaggttgttgtcagattgccatttcatactttttgggcagttttgtgtaatgtcttctgtggtcgtgggcgggaactccatgtacccaggaaggcattcctggcacctgtgttgtgaccatctttagaaacctggcggaattcacttgtaaagcaagatggttgtcaaggccagaggtgaggggcaaggtgagtgtgacatagtcttcaaagttttaaaatccacacccctacccccaaaatgaagtgattaggaagacctttgtaggaggtgctgatgatttttccttcacgaaaagaggcatgtgacttggacctgccatggatttggccagcagagcaggaaagagactgggcagttcaacctcgggtactaagttttccagagcaggagttggtttaacttttagttgggctggcggagctcttactttgaggccatgtccagagatggtatttctggcttttggcttgtcttgtcttacctagagcacctggtagtggattcagggttttcattttggccgtagaaggctttgccaagcaggtactcagacactactgggttaagcttctggccttccttctgtgaattgggctgggaaagtgtcccgagttcctgacagctgctctacgtggaagggcagaagcacccacaaagtgtgctggtctggtggtgctggcccccctggcttctctgtgggccatcacaatggagggtgggggacagtcctagacaggacctcacaaccccactgtgagctaatttgggatctctagggtacccacatgaagtcatagcttactgtgacttacacaggcccctgaggatgaaggtaacagtcctgtgagcactgaggctgggctgggaccaacacctgagccatggctccagcactctgattcctggcccagccatgctgctgagggtgcacagcccaggcctaccatcgcccccacccttggtggcagaaccgagcactacccagcaaggtaggtgttggcggctgcagcatgtatccagccctcctgttcattggggccttctgggaacaccctttagagctgcattgtccagtaggtagctgccagctgcaggtggagagttcaagttaacctaaagtagaattcagtgccctagtcacactggtcaca

SEQ ID NO: 18581 - DNA, 2300 bp, Homo sapien
gattaggatgcatcatatagtatcttgccttctataatcatgactggcagcacttttttctttccaaggtacataaaaacagtagtgtcttaacagcatcttggaggtgacaaaatgtagcgtgtggtacaaactagatgctgctgaaagtggtaaaattcccaataaagattcccaacctacccggagctgaaatgggagggaatggctccaggacaaacaagtcagagagccactcgggatattcgtggcctctctccatgagataaatgaaaacaccccagggtgcctgcagaagcagggtcaggagctgctgacctgtaagttagcggtctgaactgtctacgctggggtcagcactcgaaaaacccaggacacctcgttatcaaagtgccccgctttcccgggggtggagctgcaactgcacagaaagaaaatggctgaggctttctgcaaaggtgacagcgacaactcaggaagctcaagcctcccacaagtattcaaagctgtggccgttctttgggcacttaccctgtaagagcttctggagaaggaaagcaggtgaagacatgggaacaagcacatgattaaaaggaaataaaaaccattcaaaacactcacacccatacctggcactcaagggaagtaaagctaaggaggcctctccattaaaacacacacacacacgcacacacaaagaggttagtgtttaaaaaagaaaaaaaaatgggctgggcatagtgactcacacctataaacccagcactctgggaggccgagggcggaaggatcacttgagcccaggagtgcgagaccagcctgggcaacaaaggaagactccatctgcaccaaaataataataatttttttaaacaaagaaaaagaggcacactaatgttaatcagcgagcccaacttggcgctagttccttgggaagggctcactggggaaggtcaccggttgaggaaccaagttacagctcccatgacttggggtttcagggcaatctaactcctcagttacccaccagctctacgccgtgtccagacctctgcaggttgcgataaagagctgaagagcactatgactttgctgcacaagtagcagaagggagaggcagactggcagcctttctccaagaaatactgggagcgccccatcctctaaacgaacccgagaccctcctacctcctgaatgatctgcttccgcatccatggtccatccatcctcagcccccaagtctgacaactcccccttcagcaccccattgctgaagggcacagtactttctggcagtggcggggtgatggccttgtccctggggctcgagctggtctctgtgcaagagtcttcaagccctgaagtgctgaaagaatctgagcagtgtcctggagaagccaccaaagggacactttggctgctgtctgacatgcaggtgacacaggtggcatcttccaccaggatgcctgcccggtccggcaactcttcactgggggtggtcagtgccaggcaggaggccagggagatgtggtgtgcagagatatttggcttactgtccttggtggggctggacagaaggctcttcaggcagctcacgtaggtctttggtggtggtgagccctctgctggtaggcctggcaaggggaggccagcatccggcggggcaacagctgcctctgctgtggcaggctccgcagtgtctgggcccaagacagttttctggtgaactgggacacagctctcttccttctgcccttggagctgactggcctgacacacacgacctgcaaccttgccaaccgtggtggccagcacctgttcggttgcttctgagatcacttgggagattatctggaaggcagcccgcttaatctcctcatttctatccaagccctcctcatttctatccaagctctcctcatttctatccaagccctcctcatttctatccaagccctcctcatttctatccaagctctcctcattgcccagttctccctcgacacctctatcctgggctttggcgtctgcgactgggggtgctggcgccgcatcgtcctttgccagctctgtgtgagccgactcgatgaacctacttggcaacttctctgctacatactcttcctcctgcactggccccaccacctgggatgagctgctcttccccttatcttcttccccctctaaagaggccaggctggggcccttgctgttctccaattccaagacatgctcccgagacaacagagcttcttcaagcaccttttcccccaacacggcatcaccagtcccttcggcc

SEQ ID NO: 18582 - DNA, 2300 bp, Homo sapien
ggtgggggtggggtgtagcctggtgagtttggcacctctgagacgctgatgtataatgaggggattagattaggaaaggcctttctacctaggatggcctgtggttctactgtaaaaatcccaaacacaatacaattagctctgttgtctgcattttgtttagaataatcaatcataataaacaatcattgtaacaactggctgttcaacacatgagaccccagatgatttgggaaggagcttggagtgacaggaaatgtttgggtttgtggtttaaagccttagagcaccttctcaatatgattatattgagtagtgattgataataaacacgactcaggtttacagtgaaaaaggaacttttacaacattggttcacttcagcctctcaccttcaccacatcaatcctgtcaaggaggaattactgcaatttagggaacagggagactgagggtctggtcactcaaggctatggctggtgttgagattttcccaatattccatttttccaaagcccacagtggatttggttcagttttggtgttgagtgtattcctttgtctcctaatcctatgaaaattaatggaaaagtgttaattgggcatcaattcatgcttaacattaatctcagtatttgatgaaccacaactttatgttgcccctcatgccatattaactcagtttattgcaacaatttaaaacgatacagatttaaaacaatatgggtaattgtatccgtattgtttcaaatgccccataaattgaaaccagcccgaatttgggcagtctggaatctgccggagaaactttcatgcgatgcctttggaaggctacagacattgtctttttggagttttcagtgcatgaaggtatgaaaccgcatttattaagcacctactgtatgccagaacccgtgctgcacaatactactgctgctaaggtgggagtgattctgaagccttctgccaccctagctacctctgcaggtcgtgaggggtcttgggctatttcagtatcatgcactttactatcctggcatacaaaggctgggtgagaaataaaatatataacgaacggattacacaggggtttcctgaaataaccacccttcccatccatcccagagacaccccaaaagtacttctcgttatatacaaacatttgctttgaacctcaatcatgtgaccttgactcctataacctatcttattacatttttaaaacactgtatgattaacgcggaaaccctttcttcggcactttctcgccactggaatcgcgtcagtttctcaaagttccaaaataacctttcccgggcacggattggtacctctactggggaagggcggggaaccgcgcaagacgtgccggtgtggagccagagccagagagaacttccagcgcaaaaggaaaataaaacttgtggctggtgtttgtgcaggagggtctccgccatcctgaagccccccgatcctggggcgtctcgggggccgccaaaggagcgccagggtgtgggtttgctcccgacgtccttgacctaaatttctgagcggtggctggaaacagggcacagcggagggcgggcggctggtgccattcccggatctcggcggcaggggccggcaaacttgaatggagagggcgaactagagagggtggggggcgtcttctcccaggtccgggtgaggagccgcagcaagctccccgcgcctcccctcccccgatccacccgccccccgcagcccatgtgatccagggaagtcggggtgcgctccccctcgccctgcgccctgccggcccggaggcggggtcccctccgcccgcggggttcgcgcgccacccttgtgggtccggccgtggggggccgagtgtgcgcgcgcgggcaggcgggggccgcacgggggtgcgtgacgtcaccggcattggttacacgacgttctagaactccgccccacgtgcgccggggaggagggggaggaggaggaggagatgggggtggggaggaggagggggagaggtggggatgggccgggggggcggggacgggggggtgtgcgaggcagcggggctgagctaagccgagcccacgtgtgacggctctcgccgctgccccggctccgccgctcgcagagagattcggaggagcccgggcgggggggaggaggagggggaggagggagcggagatctcggggctcggagccggccgccgctccgctccgatcgctgtggggcttggttttttgggggtgggggggcgggggggctcagatatggaggcaaatgggagccaaggcacc

SEQ ID NO: 18583 - DNA, 2300 bp, Homo sapien
tccctcacctgtggatctccagttgctaaggtgcctggacatctgtgactgaaaccaggtccccaaaggatgctgaggcctggaaaccttggtctcacctggagatgtggctccacgatgcccttgggagcgagcgagtcatttcacaaagtgttaggagggaaaggagcctttctggggccagcacggttggaagagttcacagcctttctgtgagttgctttaggggcctaagactttggttgctgaaggaagtataaatgtacagtgaccctccaagagcctccctctcacaggtatgccccactttaagaaaacccgctagacgaaaaccctgacttttggagtaagatttgtcaaggagagagagttcttcccagtaccaaaggtttcagaaaaagacccgtttaagtagtaagctgaccttctgaaccaataaataagacagtggtttctttcttttgtagaggtcacctgttgtaaatctgagaacatttgaagaatttactgcattggctcattaaggttaaaaaaaaaaaaagtcagtcgacttggtcagcattacccagtgcccatggttttcagagccacccctgggtgaactgagaatggtgtttgctccagagcctggggccacaggggaggctggggagagactcagggccctactgttggaatggccttcacatgacttgtcctgcttccggcttggagtatgaaaccaccaagaggtatgtacagctcgcattccagcatgggaggcggggaggctcctggacccacggggctgtcaggttgaggcctgctctgaacgcctgagcactgcgatcctgatgtggagagcttccttccacctccgcctcctcctcacgctgcaacagcgcttggctgtaccttgccattacttgattatttgcagaattagaaaaggctcaagtatctgatcataattttttcctggatatatagcacatcctctgaatatgtaatcagtgctttattgtttttttgtttttttttttgtttttttttgttttttttgagatggagttttgctcttgttgcccaggctggagtgcaatggcgcaatctcggctcactgcaacctccgcctcctgggttcaagcgattctcctgcctcagcttcccgagtagctggggttacaggcatgcgccaccacacccggctaattttgtatttttagtagagatggggtttctccatgttggtcaggctggtctcgaactcctgacctcaggtgatctgcccgcctcagcctcccaaaatgctggaattacaggcatgagccactgtgcccagcctgtttttttttttttttaaaggaatatgggctgttagatgttgtaaatggataggcaatgcatgttcactttttctgaggcttgttcagggaaactgaaaaaagttcctctgtcaccttgtgtgcatctctgtggtactgtctctccagggtagtgtgggatttagaggagaggggctggaggggaccctgcagatgtccctatgttctggaggcggacttgtttatttttgacagaatgaatcttggacatgggaggatctggctctgaccagccacaaattggatatttgtttgacctttttattccagtgagtgggaagagatccggtacctcctttatcataaatcttgccttgttgtttgctccagtatagcacttcatctgggtgctgtttgagcatctggctttcatttttaagtgccggcaggtgcaggggcaggcatatctcagggggccgtggcagatgaacgagatgtggcaaaagctggcgtggcactgttgggggtgagtttcacgggagaaaaaggagttgagcttattcttgggcaactctttgccttcctgctaatgtttccaagtataccatgcaagaatcaactccaaggggctagctgaagctggggaaggtgaagaagtgagtctgagttgtctagaacttgattggtaacatctcagggtactgccagctgctggaccaatgtggttctcctccttccctgcctctcaccccttcaagatgagttgtcttgtctctgacccatcctacaacagccacaagtcagtcgatcctgtgtttgtgctcccgaaggacttggcgacttggctaacaaggagacatttgttatttcatttcctcatccattattcatgcagtgagaggtaattagcatttagtaatgtggtttctggggtaggtgagttgggttcattcattgagcaaacatttcttgatcccctgctctgggttgggtgca

SEQ ID NO: 18584 - DNA, 2300 bp, Homo sapien
aaggagcttattccaaccttgagatgtaccttgtaataacttggggcaggtttgagatatggccctgacatctttagtggtgtatctttgtgaatgaaaaagcaaaataggccggatatgctggctcatgtctagtaatcccagcactttaggaggctgaggtgggaaaatcgcttgaggccaggagtttgagaccagcctgggcaacatagcaagacctcatctctacaaaaaaatactaaaaacttagccaggcattgtggcacacaccagtggttccaactactcagatggctgagatggtaagattgcttgagcctgggaggttgaggctgtagtgaaccatgactgcaccactgcactccagcctgagctacagagcgagaccctgtctcaaaacacaacctcccccacctgccccccccaaaaaagcaaagtaaagtaacatttaggtaagctggtggggaatgggatgcctctgtctttgtcctgacaccagaaggtattgaacatatttctgactactgcacggttcagactatgctgtaatatcctcagaagtatgtgagagtcaacaaaggggacctaatctgttagtttctatggctgctggagttggggcagggattctcaaatatcatccacatcagaatcatcatcagagggactgttaagccacagatctcccgggggcctcagagccagagtgactgattcagtagtatttgcatttctaacaagctcccaggtgatgctgatgcagctgctggcccagagacccctctttccatgagctactctaagggtaagaagcaagagcaaaggttaaagacactgggcagaggttgcttcttcctctttaacatacactcagtggtcaatacatgaaacaaaatttcccatctaggagcaagttccacacttcagtgtggcaagttctccctctctttgttccccttctctcagatgtttatattctaaaatcctaaaaatgatgatggtagaccccacgatggaaaagatgataagaagagggatttcttagtggcaaccaacttgccctgcacccgatgaaagaaaaatccagattctactaggatgacataaactttccttctaacagataaactcttattcacagataaactcatgtctagatctatctaacagataaactcatgtctagattatgcagccaatccaatcttgaatagaaaacttagcaaatggtaactttatttacttttatgcaacatgcatgtatgaggcattcgctatttgcaaaacatcagcctaagtacaaataaaagacaactcacacaggtctatggtggactgatgatatgaatggtctcacacccgttcctctgtgagtttgcggtccttctcccccaaagaggtggagtctactttcatcccttgaatctgggcttaatttgttagggctaataaaatgcggtggggggaagagtatgcctgttttgggcctagccttaagaggatttgcaagttcctgcttgttctctcttgcacctctgccatcaccatgacaagggcatgcccaggctagcctgatgcaggatgggtggcacatggagcagggccaacttccctgtgccgaggccagcctagatgggtggacagccagtcaccctcaaagcatgcaagtgaggccagccaggatcagcagaaccactccaagtttactccaaacacgtgagataaacagttactgcctgcccctgaagttttggggttagttacacagcattcttgtggccataggtaactcatacgtggtcctcattctaaaaaaatcccccaaaacaacaaagaaagcttgtaatcagaagatagacagtctaaaataatactagaaagcaaaggaaagaaaaggggcagaataagggaaagtgctaaatgtggcagagaattaaactatcaggttccacattccacatggagcacgctcttcatggaacattccacatggaacacaggcattaaggtgtggacggacctcttctaaatctcaccccatcagcaaggttggagacagagatcctagaagcgccaagagaaactggcaacatgttcctcactaaatgagcaccgtgaaaatcagcaataattaccactcaagtcagtgggtgatgcctctctaatcctaattcatttagtgaatgagtgaaccctctttctaatgagtcaaaagatttattgtgagccaggcattcttgctgggtgattttagaagtagccagatggtactgaccacatccaggggttagacttgagac

SEQ ID NO: 18585 - DNA, 2300 bp, Homo sapien
cttttgccttatcatttgcacacactcctgagccctctatatgtagaattttttttttttttagacggagtcttgctgtgtcgctcaggctggagtgcagtggcgtgacctcagctcactgcaacctccgcctcccgggttcaagtgattctcctgcctcagtctcccgagtagctgggactataggtgcacgccaccacgccctgctaatttttgtatttttagtagagacaggggtttcaccacattggccaggctggtctcgaactcctgacctcgtgatcttcccgcctcagcctcccgaagtgctgggattacagacgtgagccactgcacctggccaggatttttttttccatttgagagtaagttggtatgcgtttcataaacatgagggcattttcttacgtaatcatagcacagttatcagtctcagtacgtttaacattaatgcaatactttaccttccatacgcttgttttgccagcggacccgataatgacctttatagctatatatccatcccacggagcaggaaactgaggctcagactcagacatctaacctgtggtccagacccagtacctgtgtgcagggctgggatgttaatcccgatctgcctatagccccagcccaagccaggagagtgggtgctgtggccctgcgttacaccctctccctagcggggaatgcttagcactggctttcagaggaggtgctggagcttctgcaagaacagcttccctgcagctactatgagtggccactcctccccagtggatccgaagcccttgcaaaggtaagctcactgccctggcatctttggggatggtggctggcagtctgaggagtatgccaagctttgggaagtaaagggcttttgtttttccctggtctctgtacaaaagaacccagtcagcacgcggccttggggcccagagggaaatccaagccctggacctgtggccttgatgtaccatccaggacaaggaaagcctgtttggcctgaagaggccagtgtttgcagtttcatttctcactccaaacaggtcgtgtctgagactgtttagtcctccagagggagaggcctatttcgatggataaaattccccagtgctcaggtatcaaccttgaccgtctgactgtctggctaacagaaaggggaggggagcagagggaggaaagggctcaggaggagaggaggtcctgcagcttctagggtgggtatctgtccttctgtggcgtttcctaacagacataagaggcctgacctggtcttgcgcctgatcagcttgacctcttccccagccaggttctggtgggtttgaggccaacattgtttctctgaagatcctcacctccggacattaggccctgagccctgcccagggagatggtgaagaggaggggagatgctactcaagtgtaaagtgtcttgcctagagcctgacagctacacacatcttgctactgaggcaggaggggtgagcttggcctccagagaccacatgtcacacatacctccctgcacagccctcctttgccatccagtggccacagccttttttcttcctggtcactgctctcctgccccctctgccaatcacaagcctttctggagaccccacaaaaagcaggacattttgtaaggctcttgcaggtttataatcaagattcggggagacccaccctcaaggaacttgcaaagcaaggaagataaacacaaaacaagcccttgatcagagttcaactcctactgtgtacctgcacggcacctggccctgagtcagcctcacagcagaacgaacagggcccatgacaaaaagacgacaaggggtcctttgaccaacaatgactaggatttgcaagacggcaacaaagagcagagcattagaccagcgtggggggcctctgaggacagggccaagcgacggctcaggccttacacccaggaagctggcactgctgagagagagctgttgaatgtgttggagaaagaggctatgatgtaacaaggagagggggtggaacccacctaggggaggtgaagtggcccggggagggaaacgcaggaacctcggctgccctccatgtgcagctcccacttgagatgggcatgtcaccatcactcctgcgtgagcttcagagagccaggtcacctctactcagttctaacatctgctccagggtttcaattccatcctgttgctcttcttgcccagggccagaggccaagatggattcctgactagcgtgagtatgtggccaggtgagggcaaggccttaagaagccagtaagg

SEQ ID NO: 18586 - DNA, 2300 bp, Homo sapien
aagggaccaccccaagattagcgagaacatttctgccttgcagttcttcccctattgagggtttgcgtctttggttcccctccttgatcttggaataaaccctttaactctttagctgcagtgactgcactaacctacagtagcagttcctggtgggagaagagaagtgtgcctgtaatctgggctggcagatagtgcttgctggctgggacagaattagaaagttgttatgaggcctgggaagactatatttagctgggagcatgtttactctccccagagcaaggtcttttagacctcctgagggctgggatactagagcctttacacctggcctggggccagagctgtgctctctcttctctgttccagagggtctggaggcagcagtgaaatccacctcaggttagccctgggcctcaaatcactggatccctggcgtgcgtgtgtgtgtgtgtgtgtgtgtgtgtgtgtgtgtgtgttgtggggggggcgggtggggagcggcgttctgctggactcttgagcctaccagcctcgagctttaggcatagcttaggcggcattgtgaggcactggaaagggccctggctgccccacccccccaaggctggctctatcagttgcttatcagacaagttatgtaacttcctgaggccttgctttctcatctataatgaggatgttaatagctaccttatgggaaggtatgtggattcagtaagataacacacacaagcagtaactactcatcaaacagtcccgtcctccccttcaccagcctcagagtgggaggactctaggatgacttgactaggctcccaggagacattgtgtgtgattcaaaacattcattggattaaaagttcaaatatgaatacaatctctttacaagtcaaactctgaagcatgtgtaaaggaagaaaaaattctcccttgcctgcctgcagtttcactccgagatatccaatgttcacagccttgggtgtccttctgcagaatttctatcctcaaacacaaacatatatagaggtgtttctttttccttttttttttctaacacgttgagattccactaaacatgtttctttgcaacttcgtttttcatttaaacataagtcatgtaccttaaccttggtaaatacatgtggatctagctcattcattttaatagctgcatagggttccaaagaaagtatgaacaataattttccagctatttctcatctgatggattttttttcccactacaaacaatgctgcaacgatgatccttgcacaaacatcctcatgaattgatgctttaatttctaaggggttctttccccgaaatatgattactgggtcaaagggtatgctacacacagtttatatttttttacagtttaacactgagagatgactttctccagattttttcgtttccctctcggcgtctgtttgttccggacactttcacttttcgagttccaaggaggaggtagcccgcgacaccggccgcgggaaacacgagttgcagccagcatcctagttagcgtggatgcaggtggcactccggggacgaggggcttagtggggagcactacacagccagaggcggaggcccgagatctagcacgacgctgggcaagtgacggcccctccccggccttggttttcttctgcgtagtctgtgactctaaacaacattaggctcagcctgggcctagagctggtgacctcaaatctcggcctttgttggctcccctaggactgtaggctgcgcttcacccctgctctgccccactacttctcctccgcgcggccccaccttttcagaggagttggctcaacaaggcgagagagagtaaagcaaccatcatgatgaatccctcccacagctcggtcatttattacttctgtccggctttggctcgctcctgcccttttggctcggctatcgagtgctcctgcctgaacctggcaagtaacctcggagcgcgcccgttcggcctatcacttgcttctgcctgcgccgctctcccgcaggggctgcggtgaaagcccagcgatccttggctcggccagcaacttatgcgccctttacctggagcagccgcttccggttccggtagcagctagtcacgctcggtaccaggcgcagatcatggcaggcagccggctggaaaccgtagggagcatcttctctcggtgtgtgctcccagccgtggtgggctgagggtgcctcccccaggctggggttctcagccggtcacgctcttccttggagcggacctgagcagggcgaggcgtattgcagg

SEQ ID NO: 18587 - DNA, 2300 bp, Homo sapien
acatcttggccaagcattgaagctcatgcctgtaatcccagcactttgggagaccaaggtgggcagatcacctgacgtcaggagtttgagaacagcctgaccaacatggcaaaaccccatctgtattaaaaatacaaaaaaaaaaaaaaaaaaaaagccaggcgtggtggcgtgtacctgtagtcccagctactcgagaggctgaggcaggagaactgcttgaacctgggaggcagaggttgcagtgaaccaagatcacagcactgtactccagcctgggcgacaaagtgagaccgaaaaaaaaaaaaaaatttctgtatcagctgttaagattgtgactccaagtcctagaaaagtgaaaacaagtttgcacctgtttcatcaaactcaaggatattatttgatggaattgtcccttaaaataaagctgccactgtcagaagttggtgtttaggcgcattccattcccagtggtctgtgctaacagaaatgcaaccttggcagtgatttacatgcctgggtttgagtgggccgggtggttttctgtggcagattaaggtccctcattgtgcttgattttcagttccacctatacatgttgtcaggacactgtgctgaccctgggggctgagggacacacattggctggggcaggagaactgggcttggtggggataagaacagaatttatggccgggcacggtggctcacgcctgtaatcccagcactttgggaggccgaggcgggcagatcacgaggtcaggagatcgagaccatcctggctaacatggtgaaaccctgtctctactaaaaatacaaaaaaaaattagccgggtgtggtggcgggcgcctgtagtcccagctactcgggaggctgaggcaggagaatggtgtgaacccgggaagcggagtttgcagtgaaccgagatcgtgccgctgcactccagcctgggtgacagagcgagactccgtctcaaaaaaaaaaaaaaaaaaacaaccagaatttatgatgtatatggtttctcaagacaactttgagaaaaaacttctagaatttttaaaaatatgtaaggacactgagtgttccataagaacaaacgtgtctgtgatataaataaaacatgtcggcctgacattggggtaaggaaaatgaactccaggggttgacaatggccttgcatctctcttttgggctggtgcttctcaggggaatggactgagttttagggcctgacatgagttttccaagagtgggaactgggcctcccctattagcccgaggctctgcaaggatgaaaccctgtttcctctctcaggctggaagctcccggtgacactggagggtcccgcttctcatcactgctgtccccggggttcgatggagctctgcacaagattcctgccctggtggtgggaccacgatgttggggcagtgatgtgggaagatgagaacagggactagagatcagagaggcaggacatctttaaagagcccctcctgcctcactcaggtcttcaggggtctttggcagtatgtgtaatggtagagaccagtgacttgagggccatatgtcccagattcaaatcctggctcctccactaactcagcgtctatacctcacttttcccatctgcaacatgggcatactagcacataccttacagtattgtcatgagttggcccacatagagcacttaggatggcacctgggtcggaggaatcccttgctaactggtggctgtcctgtgctagtaaagaactgtggggatttcattactgaagccggggagaaagcatgaggaagaagcaagcctcccttgcccgtggtaggggtcgcggttccctgccctcatttcttagtagcccttggccgccaccctgagctcatgttttgttagcctcggccctgactccatctctttcggtttcaggtgggaccatccgtgaaaccggtgccaggatgcaccgggggtgtggatgaccggccgcccagccccagcacggcccggtcccgcatgccaccgccccgcgaggaccgctctccaagggctgcctggggccccgcgcccgtactctcctaacccggagctcttggcagcccattgctgcctggctacccggggaggaggaggcgcaggagtgagctgcccgagaccgcagggcaagtaagcggctgacggcggaaagaccctggggaaggggctttgcggccggctagaaacattttccccaagcggctccgcaaaatgaccagcctgttccgccggagcagcagcggcagcggcgggggtggcaccgc

SEQ ID NO: 18588 - DNA, 2300 bp, Homo sapien
cttccccgccagcctcagtctttcccaagttgcttgccacccccagtgcagctaaactgagctgagctgtgagcttccttgtgaaggagggccacccacctggcctcagcacgcaggcagcgcgcagccaggcatcccctcccctctggaataccagagtgacttagagctgggtggagagttgagcagcaggctggagtgtgtgtgtgtgtgtgtgtgtgtgtgtgtgtgtgtgtgtgtcagagagagagagagaagctgtagccattagcctgctggtctctagtggtaccgggtggcagtgttcttcatggtgacttgcaggaccctcgaggcatgcagccccctcattcgctcaggaaggcccagttaggcctggcaaaaggccacctgtaaagccagggaccagccggtctttctccagcacctttttctgcagagccccgggcagctggtgggagagtacaaaaaggcctggaaaatccgtaaactgtataatcagcccctgcatcttggccgcttgactctgtttattgcttcctgtccccgaaagccctttacaaaaagagctgctttggtagggggatgagttggacccggtgggtggcctgcccctgtggtcccagcacggatggagcaggtagcttccctgaacaagccacctctgctgcagccacccctgcagagccgaggaagggtgggaatgaggcccccccactcccctacggtagggcgatccccccacgcctagcccctagggccatttactttgtaattgccaaaggacaggggtcccatttctcccaatttccttgaaggcctcaaggttaagctctcctgaagtgcaggaggggagcagagtgaaatcttagcctcttgatgacccctgtgaaatgggacggggagcaggggccattcccggggaactaaggacaggcctgggccccagggcttataaggcttgctcaaagcctgtttttttgttgtttgcattacatttttagaaacagatttttcctcgttgattgacttttttcctctggtgaccatattcccttccctccctcccacctccccaaccttcatccctcttctccagaattcagcctttcccaccactcctggtggctgatgtgtgactttttcagggaacagctgcagctcgaaaagttgcccgagacacagtgtttcagggttgctgggtgcccgtgaggatggttatgggtgtttttctcacctaggagacgcggtggggtaggggggccaggacagctgcatggttggaggagagatgccatcttttggcaagggggtgcaggaaggcagtcttcctagagctggggctgccccctgccagctggggtgagggggtgtctttcatctctcccagacgcagggctcccactggggtctggctgcccagagtcccatccttccctctgtggccggccttgtgcctcctttgcttggtctccctgacttggaacacttttgaccacaaaaaccctgattttatccctgttggaaaccctctctgattttttttttttttgaaacacggtctctctctctgtcacccaggctggagtgcagtggagccatcatagctcactgcagccttgaacgcttgggctcaagtaatcctcccatctcaccctcctgaatagccgggactacaggtgtgcaccaccatgcctagctaatttttccttttgtgtagagaaagggtctctatgttgctcaagctggtctcaagctcctggcctcaagtggtcctctcatctcagccacccaaagcactgggattatataggttttcatatactgtgcccagcctctgatttaaaaaacagtggagatgagttggcctgtattttctctgtggacctgctgtatggggctgtgggttggcctgcacttttctgcaggtggcctgtctaagctgacttccacctgggacctgtgtgtgtttgagcctgtgctttggttgtgcaattctgagcctgccccaccctcctagctccttcctgaaagtgaaatgctacagtctttgctcaagaacaaaggactcaagctcagccctgcatgttaataattttcaagtgtggccacttcctcttgcctggcctgactcaccctggctgctgcccattgtggctgccatggaaatacaactcgaggagaacccagaccaggacagggaggccatgttctgggtggcagtggagcctggcaaggtgccctcctggcctgggactgctgtggcagaggaagcatgaggtggggcctggcctgcccag

SEQ ID NO: 18589 - DNA, 2300 bp, Homo sapien
cagaggcagtggtgggagtgggtggaggtgtctgggggtggggaagttgtgagaggcagggaaggggtctgagaaaaagcttccagaaggacagacccaaaaggaggagtatgttagcaaagcccaagaaaagtgtgcttcaaggaagagtgtccattagagcaactggttttattaatgactataataataatgtatttaaaaattttactagccgggcgtggtggcacccacctgtaaccccagctactcaggaggcgtaggcaggagaattgcttgaacctgggaggcggaggttgcagtgagttgagatcgtgccactgcactccagcctgggtgacagagcgaaactccgtctcaaaaaaaaaaaaattatgagcaatccataggcgagtgcaaatggaaatctccaggtttgcagatgcatttttctgctcctgaaatgccaaggtgacaggaatgaactgcagagggatcttgcaagtaagcaggaaagtgacaaatgaactgcactatgggtaagtgtaaggtaatacacttgataacataatctagactatattggccaggcggacaaatcctgagctctcagttacaacctgggaaaggagccaggagtcagtatagaggcatgggtctgtcccttcggattaagaatctttaacctggggcctgaagaccatcttctgggatttcaagcaccctgcctcccccggaaattgaatgcaccagggagtgaagtgtggggagagaggagcaggagagaggagatcctcagaggggtttggaaacccagtcctggagttccgttcaacatgctaacctaacgttgggcctccccgaggagggtgtggttctgaggtttctccccctcccagtttcccaccttgctgaagaaacttgcccttgacatgcaaatgatggaaacacattggtgtctggggcactttggtttgtggtttttaccatcagctgtctctgaggctgagcgtgtcgatctgtctcagcaaggctagcaaattgcaagcgctcagaggaggggagaggggggctattcctggggttctgggcccagatgggcaaatgggtctgtaaggcagacttttccaggaggagggtgcagaccctttgcaagttgtttggggacagagcttagtttgcatctggccttcttcaccctcctcagatcccctaggtagcagggtgcttggtggtcaccacctgacctaggctacctactcccaaattggagtctgaaatgaaagcacgtgggaaaagtatagcaaaggtcagtttcccatttattaaacaagttcttccgtggaaaatcttcccagggctcagcagcccttgaagtgatcagggatgctggggaggttgggggaggagaaaatgggagatggcaggtggtatctgtcggtgtggacgagtgatagctttgatttgctcccccttcccaccatctcctgtgtcctcagcatttgatttggtttcctttccggggccctaattccagggaggtgcccctcctccacacctgtgtcccaagccccagctgtgcgtcctcaccctgggttcctggcactgacctggaacctgtcgggcagccctgctcttagctccccgcggagtctcggaggtctcaggtctcctccgcccaccctctccgcagctgggaggggcaggatgccccgcaccccgctctgcgcgggaggtcgaggcaccccgctcacgccctcctgcccgcaagctagggagtcactgcggccggggagggaggtacacggagggcatttttccagccttcactgggtgctcccctctccacccccggcaaccatgtaggtttccggacccccaggtccgcttccctcctctctggaaaggggtcggccatagggaaagggcccgggggcgccgcagccgggcccccgccccgccccgcccgcagccccgctcctccccgcgcggccccacttgtggccctgccggcagccgcgcagggacagctgcatttctcgccgcccgccgctaggaagccggcctcgcctcactttctccgcctccccgcgccccagccgcgccgccgccgccgagcctggccccgccgccaccgctgcggattgcagcccctcccccgcccggcccgcggcccggcccctgcggcccgcgcggagcggacgcgcgtggcgctgcccggtaagacccccgcgctcccgcggctcccgcccggccccgggcgcggtcctcgccggcgccccgcgcgcaatcccggccgcggccccggcccagcggcccca

SEQ ID NO: 18590 - DNA, 2300 bp, Homo sapien
ggatagaaatagaattagccattttcctcaagaaaagtgattcttctgaatcttagcttttcagtaatgagaactggactgtttccacttgacctctatttcctgttagtgggaaaccgcttcccagaggtgctgtgtgaaagattgctggggaaagggtttctagatcccagcataacaagttcaagagtccagcgatattgtcattagaataatggtcttcattaagtactagttttcataatcctgaagcttcattttcaccaatttgaaaggcagctagggaggagaagactatgcagggaaggaggaaaactctggagtgcatcacagagaccttgagtgagttaaggcagggaagaagcagatttgctatccactgaatgaaaataagaagaattccattgtccaaggtcagagcaagaacacaaaggttttagtttacttagttaattccttaggtttggacattacaggagacatgggggtgaccatagcaatttagctgataaatgtatcagaaactctttcatcattttctgtcccctcctatcttaggctgaccggttccctgatgtgttacctgcttctgctactgatccaaactgcagaacttctcattcatccccaaggcctccaggcagtatccaatggggaatcagctctaaaaggaaccagaccaacgttttccagccccttcattctggtgactgaggggaggaaagaatgggagggggtattcttgtctagtggatggaaaggaaacacactgtcaaattactatatctccttggttttctattacagtagaattctccagccatatttttattgtctatgggggaagttggagatggtgaccttgattagaagtgtctggagggggataaatggaggggataagattcagttggttttggaaaatgttaaagtcttaaaataatgcgtccatctgaagaattttttctaaaaccagagtttataaaaatatcactgatacagcctgccccctcatttccctgccacaggagatgtcttggactagagacacttgtttaataatagcttgtctctgatattcccagtagcttccctctgtgtgaggaaaggatagaaatgttcaggacatcatcatacaggctcctcatctacaaagttccagtagcagtgacgcctacacggaagacttggaactgcaaacaggctggggtcacctcagtgacatctgacgctgtccaaccagaagttcgatttttgttctgggggtgaaggaggaaacagactgtactaaaggactaaaataatttgtctatactatctcacttgtttttatttttggcgggagaggaggggtgttgggatagaatttcacatcctatcttggagtgaaggggaggatggggaggctcagcccttcacccaagaataacccagtaatgacatctctacgcgtgggaagtgtttccctccacactgagaggatctgaggctgcaccccagtgggattccctgcttgagttggaaggccatctcgccatgagatgcatatcatagcgagagcgcagagggcttagccggccggggaggaaatgccaaaaggaagagaggctcgaagtcgaaagggcttcccccagtttggaggtggggaccatgctgtgcatgagcgactgaagagccgagtgtccgccgtggcctgtgccctccgctgagggtctaacagggacgcgacggtgctggacaccgtgtctgagtcacgggagacggcccagctgtgcccagcgggccagcgccagaccctggcgtcctccatcttctctcctgagctccccctgctccagctgcctgagccacggaccgcagcaccacacacccccgcggggggggacgccgcgccccatccccgccccgggccccaccccagcccccccgcgggggccctgaccccaccgccagcgggcactggctgagctccgaggcggcgagccggcagcggggacgcccagagggggtccgggcgactgggggcggcggcggccgggccggggctccccccccgcccgcgctcgccgccgcggtggtgcgtcccggaggttaccggaagtggccgcgctcggcgctgccatgttgaggagccgccgctgccgttgccgccgccgccgccgccgctttgttgtcgcctcctccggctgaggaggctccccgagcggggggagtggggaggaggggggtcggccgccgcagccatggaggccaactggaccgcgttcctgttccaggtactgggggcccccccggggggg

SEQ ID NO: 18591 - DNA, 2300 bp, Homo sapien
cctgtgtgctgagggttgttctagagtaggactacatctagtcacagtggccatgttccagagcctggcagcaagaaagagggatgcctagctccttggctttccagtgtgcagtgcacagccagctctctcagagaagccctggccctcttttgacccctactattgaggctggccccacaggaggacagctggtcacacagtggctggggcctggctagccactcaataactacacagcagccccacaaaaaaatcatagaaaagaacctgtgaaagggtaaatgtttaaaacatctgcatttgtgttgatagctgagtatacacttaaatttgtattagtaacagatccacaaaaatgaaccactctaggaattttaagttttaaaagccaatgtgtggtaacttccagtttccaataaaaatgtttgcattacacttagcctacacatactatctcttaggtatcagtttttgtattcagcaaccctagttggtaatctacagtgtcaaaactatcacttatatgaaaacaaatgagcaaatagccctttaaaaatttcctttcccagtgctcgttacgcactttgtacaaatgtctgtaactgttttataattatttctttgcaaggcttggtttcttcagtagagaagattcttagaagtatccccagtgacagtacagctcctggcatttagtaggtgctcagtaattattttactgaaatactcatgcttccataatagttctgggataattctaaacacaagccatttttctaaggagagtccacattagagaggtctttgttttgtattcaagatgattaaaattatgaactgggaagttagtccctggggtgtcctggctggcctttggaaatcttcactacatctttctgggttggaattctcaccacagcctgaacgtggggctgtatctgagctgtctctgagtgctgtccatttgatatatcgagtactgggtgtttaccagggctcttcaagccactgggagaaacagctaaagagtaacctactgatttgagatgtggatttgtgccccatccctttctccttgtttcccacaggagttttatctcaaactcctaagccatttttaaggagatcactggaacaaactccaaacctaccctctaatagtcaagtttacctgaattttctcagttctctcgggagaagactaatcacacattgtagtaccaacttggactcttcatgtgcttttcttaactgattagagttaacacctcagctaaagtgtatagaacatacatggggcttcatcaggcttcagaatcagtttcactagatgtgctatgtaggaggccacggaaaaattactgtagtagtaaaagttatcagttctgatgtaaacaatcattttgtcccatattataaataaattggcctgaaaatatcttttcatatgtgaggaataagtatatgatgcctttctcctttaaagtatgaactgctaaaagacagggataacgtgtattctgtattccagcagccacagtgtgtttctggtctttgtaccaggtgctcaggaagtgttttcactggcttgggttgactacttgccatctgctctctgagcattcatttctgaatgaaaggggagaaagtgaaaggagaggtgggaagaaagaggaagctgcagaaatacgaggaaacagctggaggagggaggtgaagttgaggaggtaaggtcagtaaaacaaaaagctagcagagggcagggtcaggcccttggggtagagggctaattaacttctgtcagctagttgaatagagccttgtgtgctttgttagagaccaaaggtacttcaaaggaaaaaaatctagattcttccctgtgtaccttaataattgttcatcaggtcaaaatctatcctgtcctctaggaattctggtcttccctcaggcctagcagagagctttctgccactactcaggcaaccaagggtgaagtgcttcaagtagtatttgtggacagcagcaggtaagcttgatgtgttattcacagcttaaagagtagatgctgagtacagctgttgtccatgtgtagagcttttaataaccagcgcagcaggccccttcacctgcttttatgcctggaccagatgactgaatgtagaactttaggcacttttttttttttttgagacggagtctcggtttgttgcccaggctggagtgcagtggcgcaatctcggctcactgcaagctctgccccccgggttcacgccattctcttgcctcagcctcccaag

SEQ ID NO: 18592 - DNA, 2300 bp, Homo sapien
tttttttgttgttggtaactattcataaagagattaatacataacgatgtattgtgaagagactagatagcatgtatattattccttgggttgggagtcttaagcattaactttaggaccctgaccctggtctttaggtttataggatcagctagcttaaacaattctctcaaaaccaagagacccagcatccatacattttaacaccccacatcataaatcccataagcagccccattccttttgccattaaaaatctcaccccttcatgatcacacctaatgactgaagcattcttgaactaattgcgttgtttcttatttgcttttcttcatgttttaaaaagtgctatatgtgcaggtggacatgttgcccttaagctgttctctagtttaatgtgtatgctttgttttcttcagctacatagtaaactgagagcaaaggctgttttttttttttttttttttaagacagtgtcttgcactgtcacctgggctggagtgcagtggcgcagtctcggctcactgcaacctccacctcctgggttcaagcgattctcctgcctcagcctcccaagtagcagggattacaggcacctgccaccacacctagctaattttttgtatttttagtagagacagggtttcactatgttggccaggctggtctcaaactcctgacctcgtgatctgcccgcttcggcctcccaaagtgctgggattacaggcataagccaccgcgcccggctccccaaagtcttatgttttaaactttttgacatttcttctaagatgtccagaatgctagtacctgcaccttaataaatgtttgtgaataaatacattattgaaatcttaggcaggtgtgccacatagcttaaatctgagacactgtgttctttagtcagatcatgcatattcttagaatagtaacctcaaaggtttatacccttgctaccttttttatattttttgtagagacagggtcttgctctgtttctcagactttttgaactcctgggcttaagcaggcctcccaccttggcttcctaaagtgctgggattacagatatgagccactgcgcccagtcctgatactgtggctcattttaattctcacgtagtatttagtttcattttgcagtttgaagaaataggcccagagatgttaaaggggcaggcccagaacttgaatccagatcttgtggtgagaaattcttgttttactatcacgttgctttttaaagccagcctgctttttccagttgggaggcctcggggagaaaagtctgacccaagtgagaaacacctgtaatatctaccagatgccagcagggtgtcccatggtgctgtctttgatccatgttcttaccctgtgtgctgagggttgttctagagtaggactacatctagtcacagtggccatgttccagagcctggcagcaagaaagagggatgcctagctccttggctttccagtgtgcagtgcacagccagctctctcagagaagccctggccctcttttgacccctactattgaggctggccccacaggaggacagctggtcacacagtggctggggcctggctagccactcaataactacacagcagccccacaaaaaaatcatagaaaagaacctgtgaaagggtaaatgtttaaaacatctgcatttgtgttgatagctgagtatacacttaaatttgtattagtaacagatccacaaaaatgaaccactctaggaattttaagttttaaaagccaatgtgtggtaacttccagtttccaataaaaatgtttgcattacacttagcctacacatactatctcttaggtatcagtttttgtattcagcaaccctagttggtaatctacagtgtcaaaactatcacttatatgaaaacaaatgagcaaatagccctttaaaaatttcctttcccagtgctcgttacgcactttgtacaaatgtctgtaactgttttataattatttctttgcaaggcttggtttcttcagtagagaagattcttagaagtatccccagtgacagtacagctcctggcatttagtaggtgctcagtaattattttactgaaatactcatgcttccataatagttctgggataattctaaacacaagccatttttctaaggagagtccacattagagaggtctttgttttgtattcaagatgattaaaattatgaactgggaagttagtccctggggtgtcctggctggcctttggaaatcttcactacatctttctgggttggaattctcaccacagcctgaac

SEQ ID NO: 18593 - DNA, 2300 bp, Homo sapien
ccaaaggcactttggattttgaatacacaatacttctgtacccttctttaccgtgacttctgggaagactaaagtaaaatttgcaatctatctcaacaaattcaacgggctttcactgcaggcattttgtatagtaatttatgcgtatttcatttaatccacccctcattttcccattcctctgatttcttactctagcattttttttgtgtgtgtgtgagatggagtcttgttctgtcacccaggctggagtgcagtggcgtgatttccgctcactgcagcctccacctcctaagggttcaagagattgtcctgtctcaccctaccgagtagctgggattacaggcacgcgccaccatacccagctaatgttttgtatttttagaagatacgggtttcgacatgttggtctccgactcctgacctcaggtgatccgcccgcctcggcctcccaaagtgctgggattacaggagtgagccaccacgcccagcctcatctagttttcatgttttatggtatctctgtaagttgcctcacatccttgcggaaagggactactgtaaataaataacatgaagaaaattatcccttaaattcagtgtgtagatctgttatggcaaatttatgactgcagggtttgattttaatttgttgttgtttccccctccttttttttttttttggaggagtctcactctgtagcccaggctgcagtgcaatggcgccatctcagctcactgcaacctccgcctccagggttctagcgattctcctgcctcagcctcccgcgtagagtggattacaggcgcctgccaccaagcccggctaattttttgttttttcagtagagacgggatttcaccatgttggccaggctggtctcgaattcctgacctcaagtgatccaaccgcctcggcctcccaaagtgctggcgtgagccaccgcgcccagcctgatttgaattttaattcattagcgacgtttaaaaatcccaggatttcacataaaaatccagatttcagacgtcgaaaaaaaatgtaaaatgttatctcccaatgccgcaggcaaacaggatcacagtcctgaatagcaaccgcggtatctagtggttacggttctcacatccattttgctccattttattacctgagaggaccggtattttcaaaacctggtgtatcagtaacttttagggaaaacttttgaaaaaaggactgcacacacgcaccctttcttccttctcgttctttgaaaggaaacaacagaaacgattcattctgcaggcattctgcgctagtcccacggacaggcgactaacaagagataaaaaggtgtgggtcccataggcggtacggtgttaccccttctggttggcgggtaccacgttgccggtcgggatacggacccactgcgactagcactaggagtgctgacccgagctatgcaaagttctgacgagaaggcggaacggtacttaatgaagaggattaaggaatctaaatcggtttcgctaaattagacacatctgtctaagcagccacggtctattcgcagcaggggcgggaagacaaaccaacgccccagctctccgttcaatcacccgcaactcagctctggattagacgcaccctacgaagatacccgggtttccggagcaaccgcccgggccgtccccctttggccccgcctccgagactctttcccgccaaaggccgttatcgccgcagagcatggtgggacaacgctttaggctaggtttcaccaagtgctttgaaggcgccgagttgctttcaaagatcctcattcctggagaaatcgaccatccttcaagacccgacctggatgactagctcctttaacgaaagttcgttatttaacttttaccaaacggctggtcactctgttcgcaaaccaccccaagctgggaacgcgggggacttttttacccccttcgtggggagggtgacgtcgcgcgtgcgtgcgcgtgcgctgaacgtagccctcgcagcacccgttgcgctcccgcgcgtgcgtgttgggatcgaatcgctgtttccttccgcttctcttcctctgtctcccccccatatccgtgcgccgagctgataaaggcgccattttggaggggccgcgggagacgtggtgccgctgcgggctcgctctgccgtgcgctaggcttggtgggaaggcctgttctcgagtccgcgcttttcgtcaccgccatgtcgggaggtggtgtgattcgtggccccgcagggaacaacgattgccgcatctacgtgggtaacttacctccag

SEQ ID NO: 18594 - DNA, 2300 bp, Homo sapien
cctgttattctacagtttagtccttgacacacacacacacacacacaagagcactgatattcacatttcctaaaagtgaaaacccgtggctctgacttctgttagttgaagttcttcgtgcccttctgtccaccacaccacagcctggaaatgagcaagctcttatccctattatacttcagggaaggggagcagggagagggaggatttatgccctggcagcatggcctttgaagggccactgctagctcatagtaacccttgggaacacttgaaagaagtcatcttctggttggacactggcttgtaccgtgacacacaggctagcaagcagtgtgccggctgtattttagcacccgcttgctccatcggttggatactcttgcgcagtgaatgacctgtgcaaccatacgtggcagatctgaccttcaggccctggaagggcctggaaactaaggactgttggagaaagggggtactagcttcgctttctccaggcagtccaggcgattagccccgcacaagccctaagtgtataaatcatccttcctcgtctccctcccttcctcccatagaggccacgcctcccattcatgaacacaaagactgacatcagaaaacccttagtgtgaggggataccccaggccttaactggtctctgaaatcccccaactgaggttgttagaggacagaactgtggaaagcagtaaccagagggaatgatttttccaggtttcccctgacacataacgaacactaacttttgatgcttcaaaccagagcaggccagggccagggcaagtctgacttcctgaccatggtttggagaggcgaaggggaaaagatgggagtgggagctatccccggcagcttcttaatccctactgtatggccaaaatgcttggttcccaataaaggctcgtcagcccttgaggtagacacttctgtataaaacagaccagaaagaaaaccgcaggcctgaggatctttcctgggagtgggatggagtgagggcaggcaggctcccaacgcgcacgttcacacccactctcccagaagtagtctcttgagcctccagaggggctgcttcctgggtgcacctcttttcagctagaagcaagtcaagcctgacctgcgggatctggcagggctctctgtacttggattctctcctttataaagtgaggggtgtggatgggtggtttttgaaggctcctcacagctctgacaggcaccacctctgggggcttctattcactctcctccaaccttgtctacctggacaggcagggacagacgacaagaaatcgctcactctcacccccatcccaggaccccaaggccataaatgtgcaaggacagcagaggcctgcgtaccaaagacacatccccatcaattttgcttcggctctgtctccattgctcctgtagacaaataccggctgggggcccagctgggagtttaggtccttcagcctcaaagaacaaaggaggaagaagggaccttcccggaaggtgaggggagggagtcctggggctcctatgcctctccctctccatagggctggctgtccctctctttctcacagatacgggaggagggagtgtcctgtcttttcctctgaggctggtgacttcatctcctcccctctctaaggttggggtctctacctcagccccatctgttccctgggtctgaaatctccatccccctctcccttttttctccttgggactgggggtctccacacccttccctctcctcctctctcaggaccatgtctctttattccttttcaggcctggcctctccagccccggggggaggggtccgcattcctctcctttcttaaggccacggctccctcccccacccgctccagctcctcctccccaccccctccctccgccccgaggcattgtgggaggaaacaagatgtggggcgagagcggcgcggggagaagcccgcagtgcggggccgggcgggctcagccaatggggagcgcggacggcggcgcgcgcggcgggggggcgggggcggggcactatttcagcgggggccgcgcgtcggccgcgctcagcggcagagcggagcggagctgtgaggcgccagtgcggagcgggcgggcgggcgggcggcgtgaggcggagcgcgggcggccggcgaaactccaagggcggaccgcggcagggagcgatcggcctcgggctgcgggagccggagaccgcggcggcggcggctgctgcagctgcaggaggagcccagggaacaccgcccctgcctgtgctctgcctcgg

SEQ ID NO: 18595 - DNA, 2300 bp, Homo sapien
ggaatgaggcagtggagcaggtgagcttgcaggcaaaatggtgccaatttcatactttcactttgctgtctaaccaggccccacccccacccctgggtttgtaaacagtgcccccttctgagtggtaacctggaataggccaccaggtgacactagtttttcttcacttatacagagccttataatgtaagaacctttctccctgtgctgctgttgtacctttgctcagacccatttgagtttaccccatttatctcatttcaaccattagtatttaaaatgaagatgttgatttgcccaaggtcacgtaactagtcattccttgaacagggttctccgaatctttcctcagcaccacatggtgctcacagactccagttgaggctctgacttttcctctccagaatgtgggggcagagggtgctggtctactacctctttgctctgccagtttctgccgaagtggaaccagccctgcttagtttggcagtgctatctagatgaaggggccttggatgcggtcaagggctgcctggctggcagctggcatgtgtgcattctctgcatgtggtgcaggctgaaatggtggtggtgagttctgttttccctttcagccatctagcccacaggctattgtgaactccgagatcaaggtggcctggaatgataccaaggatatgtccttgagcaggcagcctcctgtgtagccttccatcagatagagctggaatgacagcatctcttgtccattgggctgggccacagaggggtgcttttaggggtgggatgatgggggagatagttactgctccatgtgttgggactgtggtcaaggacaaagggctcatcccctctgttcctgcatagtacctcacatgttgccacctgtcaggcacgtcctgagattccgctcgtcccaagaagggtccatgcagggtctgcctggaacctgtggttgctatggcatgaatggcatggccttgatagcagggatatgaaacaaggctattaaaatctttacctttcttaggcacctttttaaaatgctttatctccaggtttttcccaagcctctgtttttttaggggaaggaaggcttcagcattcctttgaggaaaataagatattgtctcctaacataatacctttcacatcacctaataggtcagtactttttgaatgaatgaataagtttgacatgaggaagcaacgcaccaaagagatgagaaatcagtgttgaagctgggtccaaaatctagggctttcaaaaattatattgggctttaaagaatgaacattgtactgaggagagtggggaagcagaggggaggatgggacagagagagacatgtcctgtgtgaccgaccagccaagtctgaggttgccttcccaccctctctacctcttacgggcatctcagcctggagtacttgagagaaggcataattatcattatctctgccccactggacattggtggcctggaatagggcctgtatagggcaggggttggcagcatttttctgtgaagggccagataggaaatatttttggctttgcaggccaaatagtttcttggaagtactcaactctgctatcgtagcatgttcctgcaacactttattttacaaaaacaggtggtaggctggatctggctgatggacagtcccttgtagactgtccttgtgtgcagatgctctcatataacttcagttaatctttacaacaactcgcgatagagagctatcctcacctgctaaaatgaaaataatcaaatgtaggaaggccaagtgacttgtctaagaccacgagagataaactcaggaccaggagtcaggcctactgagtcctagtccagcttctttctgctatgatgccaatgatgtaatgaatggtcattaaatcagggacttaattctgttcaaatgttaggacacctggtttattctcaggacaacccttagtccccattttacagataatgacataaaaacacaaggattaagtaacttgcccaacgacacagctagtagatgtacactgtaatataatcttgactattggtgctcttcagaatatcggaagtaaattttagagttggaaaatctcattttacttatgataaaaactgatgagttattatgtcctattggccctgtatttcccagggtgggaacaatgtctctgccaaagcttaggggctccctctcctaatgcttcacatccgtgttttctgttgccctcaccttctatactcccctcttgcactgagaccccacacccagcagctaatgttcact

SEQ ID NO: 18596 - DNA, 2300 bp, Homo sapien
catggatactctttaagatgtaggcccagatctcttagtagtgaatccctgatgttccctctcttggggctctggtttagcaaggacagcgaggatactttcctctctccctcctccttactcctctctactaaggattaaggagccacctcttcctccttaaggcctttgggagagatgggtctcctggtattagaaaggagagcagacgcctagagttctgacctcttgggcctcccctaaacaaaaagcatagccccttcactaccctagtaacaagtatgacctgttgcctgttgaggtcaggtgtacctgtgtgtctctctctgtgatgtatgtgggcttggtgtccacatcaatgtgcgtgaatactcctacccacagactgctactgtgccaatatagaggttcataagaaagataaaagagaaccagcagaaccccaggttctgcctctccttcctccctttgcccagataaaggtgtacagtgtttgtggtgaggctgctggacactgctgttttgggctttctagagagaatgcaaacatgcaaaaacagtgtggtagtgtaggcagaacaagatctagaatcagaagacctggagtcgaatctcagctccaacacccactggatgaacgtggacaagctgcttgatctctcagatcctcgatttcttcatctgtaagatggaaacaatatgtgtcttttctaaggggaaagatcaaatgacatcatgtatgtgaaaatgcttagaaatgggtgatgatgatgatgatgatactgattattagggtatctaataaagttggggaaagaacaaaatccccccctcacaccctattgcaccaccagccttctccctccctgctcaattatacccatgttatagggaaggaaatagggaagaaacttgtctaaggtcacatggatgttcgcaacaattgggatgcagaacttgatctgactcccaggccaggtttgattttgatttgcagtggcagagaggactaattttttactaggttctgagccctgtactgaactctggattgccctgtacttggtggtggtatacagttcagcagtttttagcatatacacgaatttgtgcagccataaccactatctaattctagaacatttttatcacccccaaaagaaatcatgtacccatttgcagtcacttgccattccctcttctccccagccctgggaaaccactgacctaccttatatctctatgaatttgcctaatctggacatttcatataaatgcaattgtacatgtggccttttgtttctggcttctttcacttagcatgttttcaaggttcatttgtgctgtagcatttatcagtactttgttcctttttctagctgagtaacgtgtgggtatatcacattttgtttattcatctgttgagggatgtttgggttgtttctactttttgactattgtgattagtgctgctatgaacattgatgtacagatttttgtgtagatatgttttcaattatcttggggcatcttttatttttaatgtcagttttctatttttaaaaaatctagacaggttggcaaatcatttctgtaaagagtcagtaaatattttagcctttgtggtccatgacattaggtatacagattacaatttctgaactctgccattccagtgtgagagcagccatagataatatgtaaacaaatgagcatggctatgttccaataaaacttttaaaaagcaggggacagattgggcctgtggaccatagtataccaacccttaatctaaatgacacattcacatgatacattattctaaaggcacaaaaagcaaaaattctccctcccacctctgtcttccagctacggggttaccttccttgaagcagttaatgttatgagattttgtgtctccttttagacacagttaataatgagcattaaagtggctatatactattccaatgtgttgcagatagtttagtcaacacaaaagaacggacatatctgagggtacaccctaaaagtccttgaggaacagaaccctaaaagagagaacacctgcctaatctgactcctccatcagaataatcttttgaactcctgagatttgcccagtcattttggggccatgtctgatgaaagcttggtgatcccttttgggtcaaaaacaagctctgactgaagagatgcaagattttctcagatgatttgtgtgtcagtcagagttccgccagagaaacacaaccagtaggatatattctatcttgtctgtcttcatatccatgtatctg

SEQ ID NO: 18597 - DNA, 2300 bp, Homo sapien
ggatgaaggattagggtcaggggctttcccagagaggccaaaccatgccatttaaatggctgcccacccagtctaaccttgacaccatgtggtggagaaaggacacaaaatcagagaccaaaatgtgttaccctctgttgtggttgctgcgacaatgctccaggaagggtgtgtactacccttgcctgtctcagcttcctgccctggtgcactgggataagcccattctaaccctgttttaccacatcatttcctgctgaagagcttgccggggttctcagttgcctatggggacatttttcaaacagtcctaggctgggagttggtgaagccacagaacaaacacagcacatcttcctggaatatcatttttgcacaaatatctgaggataaatgtgaattttatgtgaagaataatatgacaatattttgagtactgaaatccctcataagttttgagataatcctgttacatttgtccatagaggtttatagagatctttccaaatatattcatccaattcccacgtaacagcatcagtgtaattgctgctaccctacccatgtgccaggtgggaatcagggaaaatagacctttttatgttctattgtctgtacaggatggggccttgggacaaatttttctgaacaattagagaaaatacttgtggaaaggtataatccaaaagaatgggttttaacaccaagaactcagtttatttttcaagctaatgtcttctaaaactttcacttactaaagaatcatgtctcccttcatgctctaattttctttttctttttagagataagatcagctggagtgcagtggccataatagctcactgcagccttgatctcctgggctcaagcaatccttccacctcagcctcctgaataactgagactacaggtatgcactaccatgcccaggtaacttttaaaatttttgtagagatgtgatctcactatgttgcccaggcttgtctcaaactcctggcctcaagtgatcctcccacctcagcctcccaaatggctggggattacagctgcatgccatcacacctgggtaatttttaaattttttttatagaggtaggggtctagctatgttgcccaggctggtctcaaactcctggcctcaagtgatcctcttgccttggcttcccaaagtagtgggattataggcatgagccactgcatccagccaaccctcttttttttttttttttttttaaacaacactttggtcttgtcaaagttttaagaccataatagttacattttaaaagctctcccaaagattgtcgagggatatgtgtataatagaaaattcgcataaattttagaagttaaaacatgagagttcaaggagatagtgcatttgtcctgggcttctttgaattgcccccacagatggcccatggcaacaaatgctactacagaagtacttacagggaaacatttgagaaacactaatcatcccagcttcgctacaaccaagattatctgcttatttttcttcacatttacctctgattttgtacataacaattttcttctaatgcacacctctctttctccagcaataaacatcctctcaaattcccaccataaagaagcatctgtttgtttatctaaaatcattattctcaactgtatatcctatcaagatttatgcacataggttgatggtgtttgtggtcacaggtacttgctgatatgtttatttattcactgattgattcaactagctttatggaacctatggttcacaaggcactatgttgggcatagcaggtatgaaaaagaatcagacatgaaacctgtggttgaggacagcatggccgaagggaaaaaagacccagattcttgtaatatactgtagggcgtggtcagggaagtaagtctctggaacccttgaaaacatatggaacttcctccccgtggagggctttcctaagctacatctcggattgacactcaacaactcaacttaatcaactcaatcctgactgtccaaggaaaatgattgaattttcattttttttgtttgtttgtttgtttcaatggtttctctgtaggaacgtgggggaagatcctatggaaccacagaacaccacacaggtatcaatgtttgtcctcttagggttttcacagacccaagagctccagaaattcctgttccttctgttcctgttagtctatgttaccaccattgtgggaaacctccttatcatggtcacagtgacttttgactgccggctccacacacccatgtattttctgctccgaaatctagc

SEQ ID NO: 18598 - DNA, 2300 bp, Homo sapien
atgagagaaatggggggaggagtcaaagggaaagtgatatttctcttatcgcctctaggttgagaaggtagcaaaaggcatttcaggaaacaggatttattaccaaagatatgaaaataatgaaatatactgcctacatggaagctatgagttctttgaacagcaatcagttcccaggtgacagtgatactgattagaaaggtatagggaggctattttttatagtcttgtatgaaatgctgagagagagttgcatgcacgtatgtaggtatgtttttccaccctcagtttatccacagagcattttaggtggcttctgagagtttgagttttaagctgtgagcaaatcaaatattataacaatgaggaatatgatcacatctgagtcagaggggtctcatggacagctgtgtagaaggtgtcctggagtgaggccaggcgcggtggctcatgcctgtaatcccagcactttgggaggcggaagcgggcggatcacgaggtcaggagatcgagaccatcctgctaacacagtgaaaccgtgttacaaaaaaaattagccgggcgaggtggtgggcgcctgtagttccagctacgcgggaggctgaggtaaaagaatggcgtgaacccgggaggcggagcttgcagtgagtgagccgagatcgcgccactccagcctgggcgacagcgagactccgtcacaaaaaaaaaaaaaaaaaaaaaaagaaggtgtcctggagtggaagtaaactgaaggagcagaataagattagaatgacctataatattgtagataatagattgcaataggccaggtaagagagggtaagagagattgagacagggcagggggaggggggagaccactgaccccctcccctgtcaccctccatcttcttcttcttttttttttgtttttgattttttgagacagagtctcgctctgtcacccaggctggagtgcagtggcatgacctccactcactgcagcctccaaccagcttcaagcgattctcctgcctcagcctcccaagtagctgagattacaggtgtgtgccaccacgcccggctaatttttttgtatttttagtacagatccggagtttcaccatgttggccaggctggtctcaaacttctgacttcaagtgatccatccgcctccgcctcccaaatttctgggactacaggcgtgagccacctctcccggctcctccatcttcttctgtccctttagtcccgttttctccacctccccagcacttttccacttcctttaccttcacttgctctattccttcatctccctttattcctttgtctatttctatttgttttctttcaacaacttcctttgtctcccacccttggattcagtaacatcttgtaaaattcctgtttcattcagaagctctctgagtccccttcatacaatattcatcatctatttctcaatccaatgactctccctcccttttctccctcttgtctcagcaccaccacatatgcctcactcataaggggccgcccacagtggagggcaggggaactactggatgtctcaggcatccagctgcatccagtgtcttccttgtgctgaacttgtgcacctgatagctattcacccatgcagcagtcaacaccaagagctttttaagttaactgtcattaagaatgggtactgcagggcacaaataaattgtgagatccagatataggctttggacttaatagttgaattgtggagggaaaatatagacaaggaaaatccattaacacgatgatgtattaaatgtcatgtgaaaaataattggcaaagaatcttattacagagtggaagagaggatatctttagattaagagaattcacacaggtgagtaattgccattgattattccatacactgttttaggaactttatatctatcattctacttaagtcctcagaaaattctacaaagcaggtatttttatttctaccttacaaattcccgtgaaaactgaggcccagaaagattaagtaagttactcatggtcaaatcacaatgaaatgaaagacctgaaatttgacttcagatgtatctgactccaagtgtcttcccaccactatatgaatctttgaaaggcaggttgtatatacttctggatggcgttaagatttcaggaatgtatattccagcacccacttgtaaacgatccagagacaagacagcacctagtataatggtctacacataaggatgctcatcatatgggcctaaaaccttggttctgagcccctgagccctgaaagggaaagtagtg

SEQ ID NO: 18599 - DNA, 2300 bp, Homo sapien
gagtacatacatcccaccccaactccaaccaggggtacatacgccccaccccgactcctacctggggtatatacaccccactccaactccaacctggggtacatacatcccaccccaattctatcctgggttacatacaccccaccccaactccaacctggggtacatgcaccccaccctgcctccaacctagggtacatacagcccaccccaactccaacctgggttacatacaccctactctggctccaagctatggtacatacaccccaccctggctccaacctagggtacatacaccctactccaactccaacctgggttatatacaccccaccctggctccaagctgtggtacatacaccccatccagctccaacctggggtacatgcattccacctggctccacccggggagcacctggctccctgagggccgggaggtgacacacagctgaggagtgctgtgtgatttatataatctctctcctccatgaggctccctgtccccatctcacaggtttggaaacaggtccatggaggggtgtgatttacccagtcactcagtgggtcagcatcaaggaacccagtgtgctttcagctcctacacagtgacttctacccaggccccccgtcacaggagaggggcctccgctaaagataaggagataagattaggagggctcaggccatcaactggagcttgtgaaaggggttgccgaagagaggtggttgtttcaagagcaacggttgggctggtaacattgctgtgggaggaggaggctgtggaaggcaccgggcagggtttcggtagggtgtgggggtgggggaggagaaaggacacttggaacagcctccctgggagtctggagcaggcacggggtccacactgaagaaggaatggacgtgtcctcctgaagaaggggcgaggacacgcaggctgctggccacagtggtggtgactctggaactgtctcagggatgagcatgtgctctccaggcagccgggatgaggtcagaggcaaaggatgaacctggctcatccagggcagggaactacaggaggaaggcttaggtgcagagagggtgggccctggcagaaggccgactgggatgcactctgcacttaaggtggaaatggaggcgcacttaaggtggaaatggaggctcacccaaggtcacgaagctagtgacagggctggattcaatccaggccaatcagaccctggtgcagcacactgcctctaaagaagctacttctcaccaagcccaataggaactcataattgaaatctacttctcagagtaaacctactactgattggcacctaagaaactccaagagaataaagcccatggcgggcgcttacttttaggctctgcagcagctcactgggctgggtgttttacctgtgacatctcgccatgtccccaaaatggccccatgagggatttcactgccaggccctgcctcagtcacagcctcacactctccctggcaccttggagggagtgagtagggctaggggataaggagaggggccaaatcattcatcacagatcattcattcactcaacaaacacctgctaagcacatactaaatgctgggctttgagctgggtatggggggtgtgtataacagtaaggcagattcagtttctgccctgttgcaggaggagaggcacccttccaatcatctggcccaactctcattctagggatgtgaaaactgaggcctggagagggaaagtggcttgcccaaggccatgcagccaggcggtggcgactgaggtgcaccgctcctgtcagccaacaaatatccattgagcgacacctgtgtcccaggtgctgctctgggccctgggagaagtgcatcagtgggcttggtagtagagggtagggatggagtgaagggtaggcaggaagaatgtccccaggctggtaggaggtggggtggggggtttcagtctcaaaactcccatgaaaaccagagagaagtttcagaactccacccaagaggctgggtttctagggcccagagctgccctcccccaccctagaatgggctataaaagtcccttcccagctacgtccagagaagagctggaggaagtgagaggtcggctgggggtcctcaaagtgagaggggagcagaggatcctcccgtgcaggctgtggatgtcactcacttcccagctggtgaagcctcgctgcagagatgcatctgctcccagccctggcaggggtcctggccacactcgtcctcgcccagccctgtgagggcactgacccaggtaat

SEQ ID NO: 18600 - DNA, 2300 bp, Homo sapien
ctcactgccatttaaattatgtactttccccctacattgtgaatcttaggaatgaaggaaacagatctgtggagaagtgtcagggtggggagaaagtgcagtagtgacacccagggcctgacccctagtggcaggtcgtctgcagatttgtagatggggctggaggagaagtgccaattccctccaggcctgctgatcctttcccacttctcttcaccttagactgtcccaggtgccctccggctctttgtaaatggagaggtcggtaagtgtcttgctagcatagatctcttgatgcttaggcacgtgcctagatggagctgtgaatagtctcctccactctggtagaggccttgtctgctgtacttgggaaactcagtggtgagtctttcctggaaacgcagagggttcctggccctcaaaagacttgctctcagggtgtgtaggcccctcaggattgggttgggtgctaagggtggtaggagaaaaagctaaaatagcttcctgttttctctcgtagtttcagcccaaggctatgagtatgacaatctctacgtccacttctttgtagaattgccaactgctcgtaagtaatattcttaagtctctccttttatacccattcagacagatctagaggcatttggtcaggcttcctttcccactcctctgctgaaactgttactgttcttttcaaggtcatagatcacatccactttaccaaacccagtggagacttccctgctttcacctcgcttgaccttcctgaagcattttccagagcccactgtgctgcatgacacacttctctggcttctggctccacacttctctctcctatctcgctggtggcccctcatccttcttgggtgatgccttcccttctgttgatcttaaaccgtgagagtacccacagctaagccaaggccttctgttactctctgtctgcagtcttcctgggcaacgtcatccatcctatggcttaaataccatcaatacgtctcagactcccaggtttctgcctctagccttaaccttttccctggactccagactcatatccagttacctcttttgtcatttctgtctaacatgaccaaaaagaactcttgattcctcctcttccctcaaacctctcctccctggtcttccccatcctaacagaatggcagtgtcatctactgagttgttgatgccaaaaacctagggaacatccttgatccctcactttccctagctccctatagccagccaatctgtcaacagttcctgtccgttctgtcttcaaaagctgttgtgaacctatttgttctctccagcaccctacaccaagccaccaccatctcttgtctaggccagtgcattcaacttctgatgtatccccctgcttcctgccttgctcccatttgccgttgatttgccacagacaccaaagccaagttgagctttaaaaaatgtaaacaagttatgtcccttttgagctgaaaaccccaacagcttcccctcccacttagagtaaaatgtaaacttgataccctgaatgagctggcccctgcctatctcttccatacaaccttccagtcattcttcccagccaggttcattcccaccttgtagccttttaagggccgtttcctttgtctgaaaccctttctgccatatcttagcatggctggttctttctgagtttaggtctcagcctgtgtcgcctctgagaggccttctcttaccacccagtctaaatgagcctcccaatcactcagtcccttccccgttttgtttttagtatagcactcatcactacccaatagtctcttgttggtttggtttttgtctgtctccctgcttcccccagaatgtcagctccatgagagatggggatcttttctatctagttaccaagatacccctaagatatactagcacatagcaggcactcagtaaatggtaaatgaatgattgattgtgtgaataaatgaataaagaaactgtccgccccgtctgggaagtgaggagcgcctctgcccggccgccccatctgggaggtgtacccaacagctccgaagagacagcgaccattgagaatgggccatgatgacgatggcggttttgtcaaaaagaaaagggggaaatgtggggaaaagaaagagagatcagattgttactgtgtctgtgtagaaagaagtagacataggagactccattttgttctgtactaagaaaaattcttctgccttgggatgctgttaatctataaccttacccccaaccccgtgctctctgaaacatgtgctgtgtca

SEQ ID NO: 18601 - DNA, 2300 bp, Homo sapien
cctcccgagtagctgggactacaggcgcccgccaccacgcccggctaattttttgtattttcagtagaggcggggtttcaccgtgttagccaggattgtctcgatctcctgacctcgtgatccgcccgccttggcctcccaaagtgctgggattacaggcgtgagccaccgcgcccgtcctatttgtggcatttttaaaagagaaaacgtgccccaaaccctaaatacacatataaacacttttaaaaacaatttttaaactggagactgcttgcaaaatctgcatatgatgtgcatgtatagatcaactgtgttcttgtggttttccttatctgggaaaccaaaagaatgaggaggagaggacagagtggttgttgtcaggtcactagtctgtttgcttttattgtttctctttctgttcagagctgttcctgggcaagagtgtgggctcacaggttgtgaaacgtgtctctgaaaaaggcatacccaagagtgtattagattagatttgttttctttgtttttgttttcgttttgttttgagacagaatctcattcttctgctcaggctggagtgcagtggtatgatcatagctcactgtaaaccttggtctcccaggctcaagccatcctcctgcctcagcctcccaactagctgggactacagactcacactcagtttatttttttttaaagttttagtagagaaaaggtcttgctatgttgtccaggctggtttcaaattcctgggcccaagtgatcctcccaccttagcctcccaaaatgttgggattacaggcgtgagtcactgcattcagccagatttggttctgttaaaaaatcatttatttgccttcactgtcctctccttacacttggtctcctaaatttcagtgtttgtgattctacatatatggctttagaaatagtaaagataaaaatgccagggttattttctagcaaatgcagacagttgggactgaggaagggctggctattcagcttatatctaaatttcagtttcttatatccagttagattagatatttcctggagcgggctgagcgccgtggcccacgcctgtaatcccagcactttgggagaccaaggcaggtggatcacctgaggtcgggaattcaagatcagcctggctaacatggcaaaactccatctctactgataatacaaaaattagctgggttggtggtgtgtgcctgtaatcccagctacttgggaggctgaggcaggagaatcgcttgaacccaggaagaggaggttgcagtgagctgaaacagtgccactgcactccagcttgggtgacagagtgagactccatcccccccagaaaaaaattcctggggggtattttcttttattcaaattagagtcatgactaagacttcctgggttctaatcttggcttctactcatactaactctcatatacagcctctctagcatttctctaggttgagtgcttactaaattgctgaattccagctagtttttgtggcaaatataagaatagggactttggttataataaaccacagaacaagaagtggtgctggtttggctcaagcatttgattcactctgttgtctttggaggtggacaccgcccagaggaagacgaagaggaggagattgtgattgggtggcaggagaagctctttagccaggtgagccagtgtctcttgtcttctctgtctattccatctggtctacctccacatggctggtgatacatattgccaaagtgatttccagacaggttgtaacagtttatactttcccctgttgtgtttaaagggcattgtaacatagggattgccactactcagttttgtgattctgggtgaggaacttttcatctctgggctatatgccatctgtaatagcagacttggattagactatcagtctggttccttttagctctaatgttcttggttcccctgccattcattagtttagtgttggttatgaaaacatgtcagatagcatcagttctgtagaactgatttgattaaacagttacagaagcaaaagtttgatgtattataatgatgtacacatctctgtttccttatggtaacctcagtttgaagtagatctgtaccaaaatgaaacagcctgtcagagtcctttggattatcagtaccgtcaggagatcctgaagctggagaattcgggtggcaagaaaaaccgacgaatctttacctacactgactctgatagatacaccaatttggaggaggtattgttctttctagggtctcatagcttccatctttgctt

SEQ ID NO: 18602 - DNA, 2300 bp, Homo sapien
ttccggaatttaaagtaaaaaaaaaaaaaaggacattctgacacatgctacaatatggattaggtatctaaaacagtcaaatttcatagagagaaaatgtagaatggtagttgccaggggctggaagaggggaatgaggagttactatttaatgggaacagagtttcaattttcaaaaataagaaagtagtggcgatggatggtgatgatggttgaaaaacaaggtaaatgtacttaagaccaataagctgaatatttaaacataaaaggatcctgattcatagaaatcagtaaacaaaacatgaaaacttagtttacctatataaaaataatactaattatggttgcttacacaaatagcttatatttccataacgtggtatagaaactattttgcatataattatgtcagattaactttgttataagttagatttggttataaaattaaactagaatcaggctccactttatcagctgttgtgcatgtggcacagattgcctactcacaattttaaaaggaaacattggagagacaatttcttaggagctagaaaggtgccttttgttttatgttaaaattatttccggccgggcgcggtggctcacgcctgtaatcccagcactttgggaggccgaggcgggcggatcacgaggtcaggagatcgagaccatcccggctaaaacggtgaaaccccgtctctactaaaaatacaaaaaattagccgggcgtagtggcgggcgcctgtagtcccggctacttgggaggctgaggcaggagaatggcgtgaacccgggaggcggagcttgcagtgagccgagatcccgccactgcactccagcctgggcgacagagcgagactccgtctcaaaaaaaaaaaaaaaaaaattattatttcccaggttggaaatgtgtgcgtttatggaataaattggtaggtgagaggctgtgaggcaaactggaaggtggttaggcttcaaaagacagaagaacttgggctagaatcccagtacttttaccacttgcaagctagcaagtcctttaaaccctggccttcacgaacttcatttttaaagtgaataaaagtacctttttgagaggcttctacaaggatttgggacaatgcaaacaaaagtgctcaagctgcactagatcctaaataaatggtgctatttatggtgagtcggtgttacacaactagtggctatggcacccagagcttccaatgccaaatcatcaaactggcatgagattcccgagttcaggggacaattgcttactttgttggaggaggactagatgtgaacaaggctgataaatgttgacattcccaaagtgccgggacgccagacgtgaggttacagcatgtccttcctttgctagtacaacgaagcatgacttgtgaatgtcacttttttggcttttcaggaagccagtgcagtaacaaagtggcttaatgatccaaaactaacatacacaaggtaagaatcagttcaataataacatcgtttccttccttactgttgacttccttgttttttctttctttgctcagtgaatatcaacacaaagactaataaatcttctgacactttttttgtcttccaagaatatattttcttgtctggctaagggccatcaccttccctgactcctttgggaataatgggtgcatttcttacagtcacatcacccgattttcaggccaaagttttcacgcgttgggtggaaggcagtgtggcatggtggaaaaggtagagggcgaagactcaggccacctggtccccgtcatcatttctgcatctatctgtctatatgaagtgggctgatggctgtgccagtttcctcatttgcacagcgcacgaggtcccgctttcggtgagcttttatcgcatacatggtaagcggtgatcggtaggaccccggagccctcttgggcgttcggcttgggctgcacttgcactgtgtggccaactgcgaccgtggcgccgtgacgggaacggcgggttgcgcgcgcagcacctccgtcgcctcccgatccagcgtctccgttgccaggaaaacagagcggcgcgctttccggcgcagtcgcggcgcgtcgcagctgtcatggcggagaccgtctggagcactgacaccggggaggcagtgtatcgctcccgggaccccgtgcgcaacttgcgcctccggtagtcgcaccgccccagccccgaggccccatgcttttgtgtccttagatcattccaacctgagctcggtgttctgaggtccccactttctgcttacaatcccgaccact

SEQ ID NO: 18603 - DNA, 2300 bp, Homo sapien
ggatcaaccaaaggttgtgtatgcagcatgcagcattctaattctagaaggcgacagaggtgagccagctatgtccaaaatcagtctcatttataaactgtgtgttcctgggaagtatgtgtgcatgtttgtgtgtgtgtgtgggtgtgtgtactgtcatgtgccagcgatagaccttatcttcattgggtactccctgctgctgctgcttttgctaaaatatcttggactctgcactgacatatgagaagctattggcctttttagctttctcctgaactttctgccttccactctccatttctcaggccaatttgccattcccacatgggaagacatctacctgtgctacagatttgactagactgagataaacccatgaaaacatgtcatcacatgtcagcaaagctctcaaataaaaattagctatagaacaataggcatgtcactgtcagattgactgcctccaggtgtgcttcacggccaatatcaaggaaggtccttactgggctggagctgacactgccccatcctatttgacccattacagaaagaccaaagctaggacatatcatatcatgtcataacatgataaaacccgggaataatcagacctgtattttgctgttaccctgaccaataagtcactatattttgtacataggaagcaatgttatcccatagggtcttctaaaaggaagttccatcttcagattattcagaaccaactaggtcaagatctgcctaacaacacagcttcctgaacatattaagcataaaactcagaggcaagaaccttgagaaacatgtgccaaagttcagggaatggtcagacacagaaaaacaatgcttggctaaggagctgaagtgtgtttcaaagaaaacaagaagagcctgatgtctcattcacctctcctggacagctgccttcttccgagatgcccagcttatttgcctggattcatcacgagagaagtagtttttagatatattccaccatctagagaaaggaaatatcacttttttgaaggcgaaccaagaagtctgttttggggttgataaatttctgacagttgctcccagagtattttcaactcaaagtataatttcataaagaggcttattatgttttaaattgtctgtctgtaaaatatactttcatgaaattttgttttctcggaatcttcctttttccttcttgtatgaatctaatgaacttgaatttccaaagtcattgaggtaggaaaggtatgtaacattatgcttgagctttaggtcaataatttatacgatagtggtggttttgttttgtttcgttttgttgagacagagtctcgtcctgtcacccaggctggagtgcaatggcatgatcttggctcactgcaacccctgcctcccaggttcaagtgattctcccacctcagcctcccaggtagctgggattacaggtatgcacctccatgcctggttaatttttgtgtttttagtagagacagggtttcaccatgttggctgggctggtctccaactcctgacctcaagtgatccacccaccttggcctcccagattctggagttttttaaatgggtcaccctatagaaggcatgaagtcatagaatcataataatcaccaaaaccaaccattgatttcaatactagaaaatttgagacaccagaaggtgaagtgacttgcctagagccatacaatggcagaggcagggactgcaacccactatgaaagcttagggctcttctcaccctttggtggccaaaagtattttgaaattttgaccaaaaaaattaatgtttattgatcactttaaatccaaaagatgaatccactggattccacagtaaattgggtggaatgtaagggagggatcaaagggcagtgaatatatgaatggggaggagaaccatttagctaggtgcaaaagtaattgcggtttttgcaatacttttgcaccaacctaataattgttcataattctaagagctattcggatcccattaggagcttaaaagggacaaatgtgctcagggcatgcagtttttgccttccggaactagatcaggatcatgcatttaagctagaaaatggaaagaggagttgcttcacccacagtcagtgctattgcatcaaccaatccctgccattctgcagtttcctggtgtatctgcccggagtcacacagtctttcctgctaagcctcagcgtctcctccaagccacatcaaaatctttccttctgggcctttcccagaagtgaattcttgctggaaggtataaaagaccagct

SEQ ID NO: 18604 - DNA, 2300 bp, Homo sapien
aaaatatatattatgtttacatataggatatcaaattcttaaatgaggtattggtgagtggtgggattatgggcaattattttccttcctattgtttatttatgtgaagacaatgataaaccttgaaagaaaaaagtacccacaatctcacttgatgatgagtaattttgatttatttttatttttgcatactcgtgttctcaaacttttcatcagtgaaaattatattacttaaaggattgaaaaatcatttccaaaagcctctaaaattctagagcttgattcacaaagagccactcgaccaacttcacacacagcaagtcactggcagggcaaaagcttggttccccttctcagcaggggacagaatccctggacacactgggaagatattctgggtgttgctgtcccttgtcccttggccaagaggtggtctgggcatagaagacaagagtgggccgggcgcggtggctcacgcctgtaatcccaacagtgggtggatcaggaggaggtcaggagtttgagaccagcctggccaacatgttgaaaccccatctctactaaaaatacaaaatattagccgggcatggtggcgggcgcctgtaatcccagctacttgggaggctgaggcaggagaattgcttgaacccaggaggcagaggttgcagtgagccgagattgcaccactgtactccagctccgccaacagtgagagaccctgtctcaaaaaaaaaaaaaaaaaaaaagagtgggtggcgggaaggtggctgaaggtaggagggggaacctaaatgggacatgggaggcatggttggcacgagctcagcctgaccagggcccagagaggtagactgattcagtcaaaagtcgtagtacttttcctgctgagattggtggcccttttgctgggctttctcaagcaagaaatatcctcttctgtttcagaattattctgaatcattaacccaagtcctcccaactgcactgatcctgtcccagagaggccctgggctgcatcacctaactgatcactaaccacaaccagttctgctctctcctggttcctgaaatccaggagcagatggtggtggggaggaggagtttggagacagccctctaccagaagccaagaagaaaggggagtgaggagggatagaggaagttatcttggtcctgcgcccacagtccccagggtcctccttcctgtgaagcccaacggtctccagccagatttcctgtccccttagccccaccaagaaccagaggctgcccattgggtggctgttggatgcaggttactgttggagtgggggatggccacctgaggccaattgggtcatctttactccaggtctccctttcatcctcctgtcttccctgggggcactctattccctgcaattccttgggctaccagttcctgacttttgttcctttcaaaggaaccctggataaccagtgtaaccagaatttcagaggggttagttgtgtgtatcccctggggacaagcactggtataggcacacaatggtgagctgagaaatcttgggctggtagtgctaaattcaaaggctggggacaggctggggccagtggctcatgcctgtaatcccagcactttgggaggctgaggcgggtggatcacttgaggtcaggagttcaagaccagcctggccaacatggtgaaaccctgtatctactaaaaatacaaaaattagcttcttgcctaaggaaaaatacaaaaattacttcttgcctaaggaaataattgatgatgtggctagaggctagggcgtggtggcgggcacctgtaatcccagctactcgggaggctgaggcagaagaatcgcttgaaccattgcacatcagcctgggcaacagagcaagataacgtctcaaaaaaaaaaaaaaaaaaggctggggacaatgctggcccctcctttcctgccccttccccccatttcaggggcccctctgtgtgtaccttccaaccccagtgggggaggagaaagagttcagtctccaggatcagaccttcctctacctcaccccacccccagcttagaggacataaaagcgcagattgagctaagaggagctgacaatatcaggtgagctgtggaggtggggtccttggaagctggatgacagcagctggcaaggggataagagagcagtgagcccctccctcaaggaggtctggctttatccatagacagggccctctgaggtggggctgaggtacaaagggggattgagcagcccaggagaagagagatgggggttcccttcttctcttc

SEQ ID NO: 18605 - DNA, 2300 bp, Homo sapien
ccacgctgcctgcctccatcagcagaggtggggccgggcctccgggctccctcacctgcctcctcccacccacattccactgctttgctgcttctgctgatcaggactgggatgcacaatattctatcactagtcgcctgttgcggcctgtgggcagggtcgccctttcctctgcatagctagtaatggcttcaggacgctgactgtgatgccatgtccagggttacctgccctgatgctgacgggaggccctcctctcgcgggctcctcagccaactccagtcccctctactccattcatctactcgcaggctggggctggggcctcccctcctgccctccctcccactgtgggggtgtctgaggtctccagcaggctgggccgaggctccgggagaggaatgctgtgctcctgcgctgctgtgctgcttacgctgatggggcagagctgggggagcacgagcccaccagagggatggtgtgttacttttgccatctgttgccctctttttgcaggcaacagagaccggagaggccagagggcaggacggctctgggcggaggggcccccagaagagaggtgtccgagtcctcaggccaagcactgcagagctaggtgagcacctgatggggctggagctagagctgctcggccagagctcgctgcgtcaccgccctctccactgtctccacagtccctgcgaggagcccctcagaaacactggcttaccagcacctacccgtcaggatctttgtggctctgtttgactatgaccccgtgtcaatgtcgcccaatcctgatgctggagaagaagagcttcccttccgagagggtcagatcctgaaggtgactgattcgccatcagggctcagaattccaaacaccagctgggtcttccctcctccctcctttcctccactggaggtagcacagaatcatggtggagaacatggcttctagagcagatgacatgggtttggacctgactctgctgcttctagctgtgtaaccttgagtagattacctaggccccctgggcctcagttttctttttggtaaaatggggataatattagtgtctacctcacagggtgttttgtggattaaatgatccaatgtacataaagtgcttaaactgcctgagacataggcagcacaatctaactatctgctgctgacattactatttttattactcctccaagtattgattaaaggcattttgctattgctctgagactaaggagatccattctggggtgggcaaagggcatggccatgtagacagtgaatggggataatacagaaagggctgtcttctcctatccctctgatcctgttctttgctgttttcccccttttcccatttcatggcatacaaaagggagaacattcttctgcatttccaagtggggtgttgctggggttcggggcctaggggcatagggagtgagcagaactggctgagaccactggttttgcctccaggtgtttggggacaaggatgccgatggcttctaccagggcgaaggtgggggccggacaggctacattccctgcaacatggtggctgaggtggctgtggacagccctgctgggagacagcaactgctccagcggggttatttgtccccagatattctccttgagggctcaggtatgacctgctgctgtccctcacccacctcccaccagcccccttccaactccacctgaccctgagcaattgttgtgtctggggtgctcccacttacccagactctagcagagccttggagcctgccttgaaccctgctgcgtagtggtcagactgtacgtgggctggccgcgtggagtgggcgtctgttgcagaggggaatacagccatgcagccaggaattttgggtcctggaggttgggtggggctcttgtcagggatgggagatgaatgcccttacgaaacaagctcagtaacctagcacggccctgagaggaaactccagagtcccagtcctgtctctcccacctcccctgcctcgctttctctctgcttttctggatcagggaatggtccgtttgtgtactccacagcccacacaactgggcctcctcccaagccccgccgctccaagaaaggtgggtaagaccccattctctctcaggtgctgggaggatgtgtgtgcggtggggtggcgctgcttggctgtctgttttctctcaggtgctgggaggatgtgtgtgctggtgggtggcgctgcttggctgtctggggaggcacctctgggtttttgagcaggtaaagggaatcggcagaccaccc

SEQ ID NO: 18606 - DNA, 2300 bp, Homo sapien
catttcttccgcttcttgctgagctccgattcctgaggggtcagaaccaagtgctcctcatgagggaaggtacatctgcccacagcaggctgcctccagcccttgacctaggacttaccagctgctgcaccctctgctctttctctggctcccctagaatcacgggtaggttgtccgcatcctcctggggcgtggcctggaaatgcccaggggcaaggggctggcacctgagaacagggccccagggcagcctgccccagcccagcctgcccagagcaggttcccaccccatcattcagccagcaagagatccctgcctagcaagagcaaagaggggtactgtctgcccacccacctcccattgtctccagctgatgtgtaagtacaaaggctgcacccctgtgtcctggagccataagtgctttgagatcctgggacccacgtgtgccctgggagatgggtcctttatccaggccaaagctttccctttttagcttccagcagcagccctgctctgcactcaataactgtcctgggtgtccttcagcgactggcagagaactaggaggctgcctgggcccccggggatgtggtgttccccaagataggggttctgtatcatccaaatctgggcttggcctagagcagcgcaagtccagccagacccttctcctggcttcccccaagcccaccctaccacaccttccgattatccgtgcaaactttgggggaggacaggtcttgatgggagggtgcatctcccttccagggccagccagggagacaaaatctgagcaagaagcctccccccacccggaggtcttggtcactatcagatcactgcctggtctctcctcccagccctcttcccagaaggaggaggacctacttgctgcctacctaggatgatggcgagaagccagacccttaagttctgggggtcctaagcgggtccctggccctcgagacaggggctgcctaagccccccgctcagtgagggttgcctgtacctggagccggggcggacgcaccgccgcccccgggtagctggggccaggcctggccagccaggcgggcgctgacgggggcgtccccgctctacggcggcggcgggaggaggcggcgcgggctgggccccgggcggctgccaggacaaccagggatttgcggccgggccgtaccactggcagcgcggcaggggcggccggccaggccccgctgggcgcaggcctatggagggcggaaccctggagcccccaggggagggcacggcgcaggtacgagcacgggaggcttggaggtggaccctgcccaggacgggaaagctccccagcccctgggagtgcgcacaccaccactgagtccttggggttctgagcacggtgcaggggagatcccggtggtcgttccccccacccatctgcacgcacccacacacctgcccttgcgccggcgctcacctctcccggggccccgggagcaggcgcccctgctctggcctggagagcagggcccgggggccaggacggcgggagcgggagcgtctcccgctggttgcgcagcgcgatctgcctctgcagccgcagcacctcccgctgggactcgcgcagcagccgatcgaagtcccgcacgtggagccactggggaccctcctgaggttgggggacagggacagggaggggactcaggcctaatccttgcccgccccatgccatcccctgcagagcccttcgccttgctggaggggctccgatgcgcgagactgtgcacaccctcccatgggtacatgcctggttacatgtgcatgcgtatgtggccacatgctcccgcgagcccctatgcggtcattctcagtaacttatttcttgggtgctctcaatgtgcccagcactgtgctaaataccttgtgaacatcccttcacacaggggatgtgtggatgcatacagccagacccaccggcaaacagcctcaagcctggagcacagaaatgcccaggtctgggactcatggctccacccccttctcccctctcccacctgggccgttgccaggggaacctactcccagcaacctccaccctccctttcatttgcgtctcattaacatcttgtctgcatcccacaacaggcagatggccctgtgcagggctgagctggaagaggtgaccagggcctcctcgcaccttgcccaccagagtgagcctggcctgcagctccctgcactcccgctgcaaggcagcaatctgcttgtccttggccagcagtgcactggctgtctcactgaggtcccgggctcgct

SEQ ID NO: 18607 - DNA, 2300 bp, Homo sapien
gacatgttcatatatcatgataaatatagaatacatagatacatggtgatatatatatataaatcaaaccatgtcattatgcatatttacatgacgatatgagcatgtcatatattgtgtaatcaattactacattgtgccatatagtagcatccatatctatatatatcatgatgtgttgtaatttataaactcatgcaatgatagcctcccatgcacataacagcacacacatagacacagtggcaaacaaacatagatgcaatgacacagaaacatacatacagatacacccaatgtgtttttgttacgttttattatgtgactcatagacacataatagcacacacatatatacacacaatggccccttcacatatacagaaatagataatgtctattctatagatgcatactatacacacgcatgcgcataatggcatgcatatatactctgacctaaacagcaacacatcatgcagtggcgtgcgtgttgacctacacactgctttagggaagtgaagatgtccactcctccccatgcaccccctacctccagttccattggctcttgcctgggtggagcccacagtcaggggctctagggttcagtatcaccgctgctattctgtgggggtgccacacgagggcccccgaccttggctgaaactggcttgcctaatgagtcccgggttcagagtggagaggggctgcctctcggggcttctcccaacacccctggctctggggactctgtctagacccctgccactgcatatagactgactcctggctgaggggattctcacgtccttgtcccccaaattatttagcaacaagatctaaggctagacagaagatgaacttccaggcaattcgggacaaagccaacccaacaggccatgtgggcttccctggtggcctgggacagccaggttgccccccaagtgcaatctgccaggaggaagcagaaggaattctccgtctatttctacctgtctctttgcttgtcttcccggtttctttctcttggtttctgtctctctctttgtttcatctcaagtcccatcttttctagttctgcccttctctgtggctggatctctgtcataccctcccccgttctgtctctatcagtctcacccgatgtagggaggaccatctgcaccccactcgcctctgtactccggaaggtgtgagaatgtgtgaagatgagggtgggaggccacatgtgggagccctgggctgacatgccgtgagaaacctgctcttccttctgtccccgaccctgtcagccggttcagcccaccagtccagcgccatcaccatggaaaccagcagccgacttcctattggtgggtgggaggggaggaggaggaggaggaggggagggctggctcttcccggctcacccccccacccaattctgaggctcagccctcctcggagcccaccatctcgaggctcctggactgtaagggacccctgcagtccccagagcagaggccagcaggggctgagactatgaggcaagcagcccatcgacccaggcctccttaggaccagcccagccacccagcaagcgaaagagcagcagcagagagcagagccggagataaaggaccacagcggaccactggggatcacccccagcagctcctgaagcctctggccgggctgaggggttgcgacagacggccagacccacagacactgacagacacacaacgacaccgatgcacacagctgcacgacactgacacactcagatacaaccagggacagcatcacatactgccacagccctgcaatacagacacccacacacacacacacaaacaactggcaactctgaaatgggcagacagtgacacacagcaccacccccctcaacacacagaagtgggggcacccatcttcccaacacatgagacagcattgacctgcacggacagacctggagacacacacacgcaccctcacccaggcgcagctgtcggtggcctctgcacatcctccctacccccacagggacaccctcgctcctccacatactcgcgcacacacacagctaccagcaaacatagctcacatacccctggctccagctccagcagccctggcgccttctgcagcctcctttgtgggtggggaagagctcagccaaccttggatggagcgtcggtgaagcaagagctcagaggggagaggggctggcctggcatgaccctcgccagtccccccacctggctgggtgatgtcccccggcccgggttctggggccccttggcagtaccatg

SEQ ID NO: 18608 - DNA, 2300 bp, Homo sapien
tggggtggggagctgaatgcgggcggcaggcacatggacagtatgggcgcacagaagggctgggagggagaacctctgtcgctcctccagaagatacgggtttggccctgcctatgagatcagaagagggctctgggcctggccaggccacagccggaggagagaagggcctgggccatctgcagaaaggggcagggatgtaaggcatcctctcaccttctaccctagctctggccctatcctgcccccctacatacccaaactgaaagctgcctacatccagttttaatctaagaaagtctagggggtcctaggtcatataaaaattgggcaaaatccactgtggcacatacacagcatcttagacaagggcacagacactcatatacaaagcacacactgagatgcaaatgcatttacacacagaggccccattcagtgtgccagtaacacacacacagacacatgtgacatgactggcatgacacacacagggattacacacacccagggcacatacatattcagtagtacacacatgcaatgatagaaacatagggcgtgtcttacacatagaagagcacacacatacagtgacatttgcataataaacacggtggctccatacacatacatagatagagacatgttcatatatcatgataaatatagaatacatagatacatggtgatatatatatataaatcaaaccatgtcattatgcatatttacatgacgatatgagcatgtcatatattgtgtaatcaattactacattgtgccatatagtagcatccatatctatatatatcatgatgtgttgtaatttataaactcatgcaatgatagcctcccatgcacataacagcacacacatagacacagtggcaaacaaacatagatgcaatgacacagaaacatacatacagatacacccaatgtgtttttgttacgttttattatgtgactcatagacacataatagcacacacatatatacacacaatggccccttcacatatacagaaatagataatgtctattctatagatgcatactatacacacgcatgcgcataatggcatgcatatatactctgacctaaacagcaacacatcatgcagtggcgtgcgtgttgacctacacactgctttagggaagtgaagatgtccactcctccccatgcaccccctacctccagttccattggctcttgcctgggtggagcccacagtcaggggctctagggttcagtatcaccgctgctattctgtgggggtgccacacgagggcccccgaccttggctgaaactggcttgcctaatgagtcccgggttcagagtggagaggggctgcctctcggggcttctcccaacacccctggctctggggactctgtctagacccctgccactgcatatagactgactcctggctgaggggattctcacgtccttgtcccccaaattatttagcaacaagatctaaggctagacagaagatgaacttccaggcaattcgggacaaagccaacccaacaggccatgtgggcttccctggtggcctgggacagccaggttgccccccaagtgcaatctgccaggaggaagcagaaggaattctccgtctatttctacctgtctctttgcttgtcttcccggtttctttctcttggtttctgtctctctctttgtttcatctcaagtcccatcttttctagttctgcccttctctgtggctggatctctgtcataccctcccccgttctgtctctatcagtctcacccgatgtagggaggaccatctgcaccccactcgcctctgtactccggaaggtgtgagaatgtgtgaagatgagggtgggaggccacatgtgggagccctgggctgacatgccgtgagaaacctgctcttccttctgtccccgaccctgtcagccggttcagcccaccagtccagcgccatcaccatggaaaccagcagccgacttcctattggtgggtgggaggggaggaggaggaggaggaggggagggctggctcttcccggctcacccccccacccaattctgaggctcagccctcctcggagcccaccatctcgaggctcctggactgtaagggacccctgcagtccccagagcagaggccagcaggggctgagactatgaggcaagcagcccatcgacccaggcctccttaggaccagcccagccacccagcaagcgaaagagcagcagcagagagcagagccggagataaaggaccacagcggaccactggggatcacccccagcagc

SEQ ID NO: 18609 - DNA, 2300 bp, Homo sapien
tgatacttcaaactccgcctccttggcggccgatccaggttcaagcaggctgtcactgggcaaccttggctcacttggacttgctgtcaaaagtcccccacggccctccctggttctgacattcagattcttgctcagaggaagtagggggcgggggcggcaggaacaaggtgggaacagcccttcatcaggatagagggatctgggcttggaatcctggagggctccaggctcatggtccctcactgccacccccaccttaccgacctgggggacaaccatctctgtgtgccaagctgaggctgtgggtaggcaaaggtgagccggcagagaaaaggacacaggacctgtccttgggcactcccagcctgataggcagtgtgtacgagtgtgtgtgtcagtgcaagtgagtgtcttgtacccaaagcaggggcagagcttcaggtctgatggggacacttggttcctacttctagtgagcactgaatctgagggtgaagtagacacacacatctacatttaacatagtaacggcaacaggcacaaggccatcccaggtggcagttgccagggcccaaggggctgggatgttggatgctgtagtagcaaccttagagtcacaggagtcccatcagagaaggcttcctggagaatgtgagtacaggtggaagagggtttagaaggagagattgggcaaggaggagaaacagggagaaaattgtcttttgaaggcctaatgcctgtaaggagagcaggcccagagggtggaagaaatgacacaagctcattgtccgcacatgaaggcagaaaagaaaaccaacccttccctgccatctgcatgggcctggggccctcactcacaggcaggcaagcagccagtgggagatggcagcccagataacctgccttacaaagagccaacaagagagaagccacagacttaaccactcacaaacaggaagtccagaaggcagagcagacccgccctccagtaagctacagttggggacaggcctggccacaaaggagggaaactgagcccctagcattgcaaaatggggctaaagcaaattggagtcaatagtcccaaatgttgagacccttccccatctccctggaggggcagccaagggaagcaggtgccaagagaggcaagtgccttaagaacctaagacagcccatgtcccctacagagatcatctcagcacctcagaagatctgtctcatctcagagccttgggagcacaaggagtgctaaagggcctccaggcaaggagggcgggcaaactggctgcccctcagcccctgcctgctcgtaccagactcccctaggtttaatttcatactctcctgctctactctgtctggcaaggggcagctccaatgcacagtggcccacactaggaggtcacttcgcactggggcagggttctggctcagatctcctgggatcataagacccaaggacttttaagcagcaaggttaggcagcaactggtcccgagtcaggaaacagagctgcaagcccagagagaggcagaaggcagcctgaggtcacaaaacaagttagggccaagttgggttctttccacaacatctgggaaaaggcaggacgggctgggtggaaagggggtgtgggtgtgaggaaggctaccctgaccactgctgtgggagtggccgtgaaaccagaagctttctcctctgggatcttctggggacacaagtggagagatgaaagctccctctggactctctccacacacaggtgctgggtttaacttgcatagctgcacctgctccagttccaactgctgcaaataaattgtgtgtgtatgtgtggcggggacagggagggggtccaagagctggttttctgcctggaacccactacaatccctcatcagccccactccctatcccaacatcaggatcaccaagcagaggataaaattaagtgtcaagaaactaggggtctaatcctcaccctgtgattatttatggtacaattctgggccagtcactgaatctgcccctaaaccccagcctgtttcttcacctataaaaatggggagggagttgaccaaaagacttgtttgtgctctaggaagtccccaagagcacaggagcccagagacctcgcaggaggaagcagcagtatctgtgttccaaatcctgcccagcccccaggcagccatggtatcttctcagctggctcgagggcacacctcccaaaatgcagagaaggcagggtggctaggaatggctctagtagaattctccccttatcttgtctggaaaca

SEQ ID NO: 18610 - DNA, 2300 bp, Homo sapien
cagcagccttggttcctctgggggttgagaataagaatagtggggagggaaaaactcctccttgaagatttcctgtctcagagtcccagagaggtagaaaggaggaatttctgctggactttatctgggcagaggaaggatggaatgaaggtagaaaaggcagaattacagctgagcggggacaacaaagagttcttctctgggaaaagttttgtcttagagcaaggatggaaaatggggacaacaaaggaaaagcaaagtgtgacccttgggtttggacagcccagaggcccagctccccagtataagccatacaggccagggacccacaggagagtggattagagcacaagtctggcctcactgagtggacaagagctgatgggcctcatcagggtgacattcaccccagggcagcctgaccactcttggcccctcaggcattatcccatttggaatgtgaatgtggtggcaaagtgggcagaggaccccacctgggaacctttttccctcagttagtggggagactagcacctaggtacccacatgggtatttatatctgaaccagacagacgcttgaatcaggcactatgttaagaaatatatttatttgctaatatatttatccacaaatgtggtctggtcttgtggttttgttctgtcgtgactgtcactcagggtaacaacgtcatctctttctacatcaagagaagtaaattatttatgttatcagaggctaggctccgattcatgaaaggatagggtagagtagagggcttggcaataagaactggtttgtaagcccctaaaagtgtggcttagtgagatcagggaaggagaaagcatgactggattcttactgtgcttcagtcattattattatactgttcacttcacacattatcatacttcagtgactcagaccttgggcaaatactctgtgcctcgctttttcagtccataaaatgggcctacttaatagttgttgcaggacttacatgagataatagagtgtagaaaatatgttccaaagtggaaagttttattcagtgatagaaaacatccaaacctgtcacagagcccatctgaacacagcatgggaccgccaacaagaagaaagcccgcccggaagcagctcaatcaggaggctgggctggaatgacagcgcagcggggcctgaaactatttatatcccaaagctcctctcagataaacacaaatgactgcgttctgcctgcactcgggctattgcgaggacagagagctggtgctccattggcgtgaagtctccagggccagaaggggcctttgtcgcttcctcacaaggcacaagttccccttctgcttccccgagaaaggtttggtaggggtggtggtttagtgcctatagaacaaggcatttcgcttcctagacggtgaaatgaaagggaaaaaaaggacacctaatctcctacaaatggtctttagtaaaggaaccgtgtctaagcgctaagaactgcgcaaagtataaattatcagccggaacgagcaaacagacggagttttaaaagataaatacgcatttttttccgccgtagctcccaggccagcattcctgtgggaagcaagtggaaaccctatagcgctctcgcagttaggaaggaggggtggggctgtccctggatttcttctcggtctctgcagagacaatccagagggagacagtggattcactgcccccaatgcttctaaaacggggagacaaaacaaaaaaaaacaaacttcgggttaccatcggggaacaggaccgacgcccagggccaccagcccagatcaaacagcccgcgtctcggcgctgcggctcagcccgacacactcccgcgcaagcgcagccgcccccccgccccgggggcccgctgactaccccacacagcctccgccgcgccctcggcgggctcaggtggctgcgacgcgctccggcccaggtggcggccggccgcccagcctccccgcctgctggcgggagaaaccatctcctctggcgggggtaggggcggagctggcgtccgcccacaccggaagaggaagtctaagcgccggaagtggtgggcattctgggtaacgagctatttacttcctgcgggtgcacaggctgtggtcgtctatctccctgttgttcttcccatcggcgaagatggccctggagacggtgccgaaggacctgcggcatctgcgggcctgtttgctgtgttcgctggtcaaggtgtcagtcggggacctggttgtagggcccatgggggaccaaggtcggggaaagagg

SEQ ID NO: 18611 - DNA, 2300 bp, Homo sapien
ggccctgatttgcatgtggtagcttgcttacccagagaaaggtactcgggatcgaattggatgcagtttagctgtggctcagtagagggagtagaggagctgagggaggggggagagcgaaagaacgggtctggttaagtaagtgttgtgtgtgagcaccaggaggaggggggcagggtggggagtggttgcctctagcagctccaccctcactttgtcagcaggtagagagcgtgattgcagtcccaggggagggagtcagagctagaacaccaattacaaaccacaggcttcctgctctagggagttgatccagaattgtctttctgaaaggaagcactcggaatccttccgaactttccaagtccatccatgattcagagatactgccttctctctctctgggattttatgtgtttctgatagtgaattgttgatgtatttgctactttgcttcttttctctttcaagacttgatcattttatatgctgtttggagaaaaaaagaacttttgttagcaaggaggtttcagaaatgattttggattttctgtaagtgtttaatttagttctaggggacagcatctctcatcccggagtaaatttctgcctttgacctgcatggattattttttcaggctgcggaatttctcggcacctacctgtagtatggggcacttggtttggttgcagagtaagaaggtggaagaatgagctgtacttggttaagcagttgaaaccttttttgagcaggatctgtaaaagcataattgaatttgtttcacccccgtggattccagtgggcccgacagcgcaacaggtttgcagatttcttttgaaattcctttttcccccctccctctgcctcagcaaaagaaaagaatccatataacaggttcatgttcaattgcttggcttttcagcacttattctgaagactttataatatttttaaacttgaccttggaacacagagggctttgtgggtgaggtgtatttatatttacttaagggtgcacattttaaaaatcttattctgtgtttgtacaaagacgcaaattttcatagtgcctagaaatagcacagatctattctactcaagattatttgtattttttcagggtattctacctagagcctgtggttaatcgcctccctgctccccctaccttttattccctaccccctcagggaatttggatacatgtgaggaatagtcctttgtttttcttatgaacctagaaaattacagatcataaaatctggatattaaagtagtttccaaaagcatctcatgggaaatcaaagtgctcggcatttccgagctggagaataaaatcaagaatccttaagagagaaaagaaaatggagatggaaatatgaattttaactgggaaaaataattggaaagctaaccttttcaaatactctaattatgaaagttggaaaaggttgtgatgctcaggattatcctgtaatgtgtgaagatacataaattagcacctaatttataggcaaattttggtaaaacacaaaaaattatggtatgtctaagttcatgaaaagtatgtaaatgcagtgggcctagaaacctggccacactgaaatacagtttaatgtggaaacttttctaaatacatattgtagcatctttggacatcaacgtgtggcctgaaatttttattattgttccctcttctcctccattaaaaaaaaaatctccttgtggtatttagtcatttaccattaacacatattatggcttaaaaagggccatcccttccttttctgagctggagttcttcacgctcacctttgatgcatggccttagctgtttactttgccttgttttgttcatgaacattgggtttagtgcctggcaacttgatgcatatggaagagcaatgccaagtgatctgacataatacaaattcacgaagtgacattcaatcacaagcaaagttggaaattccaaagagaagtggtgagatctttactagtcacagtgaagatgggagaaaatgacatacctgcagcagatgtgggctgaaaatatcctcttctctgcccaatcaggaatgctacctgtttttgggaataaactttagagaaaggaagggccaaaactacgacttggctttctgaaacggaagcataaatgttcttttcctccatttgtctggatctgagaacctgcatttggtattagctagtggaagcagtatgtatggttgaagtgcattgctgcagctggtagcatgagtggtggccaccagctgcagctggctgccctctggcc

SEQ ID NO: 18612 - DNA, 2300 bp, Homo sapien
ctgtttggtttgatcttgagtttctccaagtctccaggttcatgatgcatatcatcatcatttccaaatctcagagtttcctcaagagagggcaaccacatttgtaactgtcttctttctgtcaattaagtgtgtgtattaattactagggctaggtcttttcattcctttgcacgttttaagcaggaatagatgaggcaaagcccatttgtaggttattttttagtttaactatgttaaattaaactatgttggtcaggctggtctcaaattcccgacctcgtgatccacccaccttggtcaaccaaagtgctgggattataggcgtgagtcaccacgcctggcccaacaaaaattttttttaaatttgcagggtgttggccaggcgcagtggctcacgcctgtaatcccagcactttgggagaccgaggcgggtggatcacaaggtcaggagatggagaccatcctggctaacacggtgaaaccccgtctctactaaaaatacaaaaaattagctgggcgtggtggcgggcgcctgtaatcccagctactcgggaggctgaggcaggagaatggcatgaaccgggaggcggagcttgcagtgagccgagatagcgccactgcactccagcctgggcaacagagcgggactccgtctcaaaaaaaaaaaaaaaaaaatttgcagggtgtggtgggacgcacctgtgatcccagctactctggaggctgaggtgggaggccatgaaggtcaaggctgcagtgagccatgatggcacaactgtgctccagcgtgggtaacacaagaccctgtctcaaacaacaaaaataaacaaaaaatttattttcgaatttgtctttgatctaggttagttattagatctgaaattctgaaactactgtcataaaccttatctacaggggaaacaatgttgaaggtcaataggctactcatcctttttgctttcagaggcattatgtcatttaatctttacaacagacctatcgtaattattatcatcagcattttacagatgatcagagattcgtttttacatgaggtaagaaacacataaaatttactatcataaccatttttaagtgtacagttcactagatttaactatatccacattgttgttcatttgtataattttgaaagtttatggcagcggttcagaaataaaatgtctcaccacagtcaaatataatctggtaatttgaaacttcaaatgttataaatgtattagaaactgttgtattatttctaatggcagggtagtaataaggattatagttcatgaatgtggtaattagccagaaattcattttctttttgcctatgttcttctcattaatcatattttaccctttggcttgtatttatgacatggacttatttggagtcttacattgaaggcataggtctgatccatagtattatttcacctcccaaagattgaaaagaaaataacagttggattccagacatctgacatcaacctgatttgaaagttccatataggcacagtttagacagagctactgaatttaaattagtaagagctgaagaaaagctaagcataaaatggacagagcccttcccagggtagcagacataagcagcaataaatcagtaagtactaaaacacaggatcactttattctggctttctgccatttatagacactcaaacttggaatgagcagaaatccttttgaacttatatttgcaaaaccttgtgtccattcttttatcttccggattacctttatttttttctgtttatttcctcataccatcatctatgctctgttgggtgcagagtctgcttagatatctttgagtggccctgatttgcatgtggtagcttgcttacccagagaaaggtactcgggatcgaattggatgcagtttagctgtggctcagtagagggagtagaggagctgagggaggggggagagcgaaagaacgggtctggttaagtaagtgttgtgtgtgagcaccaggaggaggggggcagggtggggagtggttgcctctagcagctccaccctcactttgtcagcaggtagagagcgtgattgcagtcccaggggagggagtcagagctagaacaccaattacaaaccacaggcttcctgctctagggagttgatccagaattgtctttctgaaaggaagcactcggaatccttccgaactttccaagtccatccatgattcagagatactgccttctctctctctgggattttatgtgtttctgatagtgaattgttgatgtatttgctactttgc

SEQ ID NO: 18613 - DNA, 2300 bp, Homo sapien
tatttggattcaatttatttcctaggatatttgtgctgtcaaatactttgggaaatcaaattcaaatccaaaacatttaaaatatatatttgaataaccttcaaaggatcaaatctaagaactgttcagctaacctgtattggaaatgataacagcttgaattttatgaggcaatcttagtaatatatggccttttaaagtcaccaaaattgttaaaaaaagtcatccaaaaaataacctttatatttatgtctgaactataattttgcccattatttcaagttttctttctgtgtgcaaaatttaatggttaaattgctcatgatacaaagagaaaatatttatttctagtatatcttcatgaacttctgatgtttcaagaatcaatagtcatggagaaatagggaagcatttcggctattttttaaaaattcttaggtcaatttacctttaaagattaaataatgagattagcacactcaaaatatgaaaaatgtggacataaaaagggagagttgccaccttattgataaagacacctttaaagatattcggcaagtagaattctagtaaaactacaaatgttacatttcaggaacagggtttagcttagggaattattgtgagatatatatatatgtaaattttttttgtacatagagtcttactctgtcacccaggctggagtgcagtggcacaatcatggctcactgcagcctctacctcctgggctcaagtgatcctcccacctgagcctcctgagtagctgggactacaaacatgtgccgccaagcctggctgttttttgtattttttgtagagacggggtttcaccgtgttgcctaggctggtctcaaactcctgggctgaagggattcacctgcctcagcctctcaaagtgccgggactacaggagtgagccaccatgcctcgctgtattgtggtatattaaagagcgtgtgctttggagtttaattactgactctgtcacttccagctttgtgacttttggcaaattacttaatatcactgagctttagtttacttgttttgtaaaggcaatgtatgtaaagcatttactactgtgcctggaatagggtgggtgttcaatgtacatcatcctctgtttaaaccacagttgtgatattaataactgattctcacttatactggagagtctctacaaaaaagcagactcaacctattattaagactgcatctgtaagtaactttgctagtaccaagagttcaatcttttcacagtgtcctgactataaagggaaagttttgaaaatgtgtttcttcagttaaaataatagcagctaacacttactgtttgcttactgtgtaccagtactcttctaagttctttatggatattagctcatttatatcacaacaaccaccatatttggtaggttctatattctgttattatctctattttaataggatgcagaaactgaggtacacagagattaaccatgctcaaatttacactgggctgtaaagccaggctggtggagctgggctccaaaaccaggcagtctggctctgtgatctgcattcctgaccacttgcctaaattattaaaacatttttgtgtacatttctactggatgcattgtttaatggtggaacatttggagaatacttcatagttattttactcttttaaaacactccaccctccaaatagttgttactgttgaaatgattgaaatacttattttggaatttcaatatattcctctattttcaataaaatgaaattactttcaataagaatatatgtttggttagaaaggtaacaaaatgcttaggtgttaaagaaatgatttataaaaatagacattagacatgacccttttaaagacctttaaaattattttgttactgtgtgtgttgttttcaataaataacaccacctaattggactaaatattttgttagacatacaaaagaagttcttcaaatttggatttctttccatgttgaaagaggggagctccttgaatgctatagaaatgtattgtggttgatggcttttctgtgtttgaatttgttccagctgtgctacagtgctgttctcctacccacatggatgctctaagtagttgtgtcactcccaatgcctcttcctatgcacactgcaactacttccaggtaagattcttgcaactgtggccatgctccgcgctttatgtgcaattttatcgatattgcaaaatttcaaagtgtaattttatattaatgagtaaccagaagtaagctgtggattaatgggctttgttttctca

SEQ ID NO: 18614 - DNA, 2300 bp, Homo sapien
gaacatgtgtccatttggaccaaacgttgttggtttttaaaaaattttattttgtttttttgtttttgtttttgttttttttcatcttaatatgtaccagtggcacttaaccaaaagatacagtgatatagccatgtactgtgggtgggacagatacagtctccttggcctataatgaaaccactaggactttatacagttttccttaatttgttgacatataaatggtaaattatatttaggcttatcctgttttgaaatgatggtagtcatctttcttactgctactttcatgttgctttctagaaaacagcatttcattccaaaataactaggatctgcatttagaacaagaatcattatttgtcctgaccttttcagtcctacagagacgcatctgtggttcttttgtacttgccatagatgtaacctaaaaagttttggcatatttaggtcagcctagcggaactttttttttcatttaaatggagctgaataatggagattttgtgtctgcaaaattcctgagatcattgaaaaagtaacaagctgttccttgtttctgatacataaaattattttaagcattttatcaatcattaaaatttactgccagttgtgagtggctttttaattaacttgtctttcattgcacttcactctgcctgttttcaaggggagtaagattggtaacatttggggagactgtatctgtctacttagcgtggctgttttgagggactgtcccatcagtgaacaaactgcatggccttggagagagactctgggctcttggctcagatgtgttcatcaaatactcctttcagagctgttgtgggtgtaagtgacatgatgtggccaaaaatccaaactgtgcagttgcgttgtgacaaacatgcaatgtgctgtaaaaattcaatacagtttaaataaaatctctatattagtgctgctttgttgggtcgttttattttcatttctaaaaaaacttaatattcacttattctttgaccatgagaagagtagaacattgtacccctttctcccagcaatttccaatttatttattttgagatggagtctccctctgttccccaggctggagtgcagtggtgcgatctcggctcactgcaacctccgccttctgggttcaagcgattctcctgcctcagcctcctgaacagttgggactacaggtatgctaccacgctggctaatttttgtatttttagtagagacagggtttgaccatgttggccaggctggtctcgaactcctgggttcaagcagtccacccagctcggcctcccgaagtgttaggattacagacatgagccactgcgcccggccaatttccgttttcaaatgaacctctctttttgaatcagcacagctcttgttacattcttatttattgattggctagggatcgattcttatggataccgtagaattctgtcccatctttatttctctttaatgtctaaaatgccaccagctagttgggcaggcacacaagatagtacttagattcttgtgattccctcctcctagggacctcagttttcatctaaccttgagtaaattgtcttgaacaaatactgacttaaaagagtgtatcttaaaagatacaaagggctactatctaaaaggtgagttcgtttactcaagatattatacctccagtagcatcatttttgtttgagaggtaagcagttccactgttagcaaagattacagaccagaccctttggtccccagaacgaccaactctgctgcctaacgcacactttctctgcattccaagtctccactagttggctgggccgaaacacacgcctcttggtattccacggtggataactgggcttctctcttgtcaggacttagaacaccccggcagacagccttcccggcctgaagtctgggaacgcctggggaaggggctcctgcccgggtcccgcaggcgtccggcgggccgagctggggcacgcggccgccgagggggaggtgcccacgccgcgtggcgggaactcgaggccccattggccgcgctgggaggcgccgcggggcctcgtgcgccaacggtccctggtacgcggcggatgggcgccggcaggagcgggcagggcgaggcgaaggccggggagggatcgagaacggtgtgggagagctaggctcggggggcgaggccccggcccggcggggcgatggaggcgctgctctccacccccatcaaccccaacaacttccccgccaagctgtggcgcctggtgaacagcccgcgctaccgctccatc

SEQ ID NO: 18615 - DNA, 2300 bp, Homo sapien
aggtcaacaggtggttctgtccagagtctcccatcacacctcagggctaccaaggtcctggcttaagggattagaaatttggggcacttctcctggctaaggagaaagtgaaaccctgtctctactaaaaatacaaaatagccgggcgtggtggcgggcgcctgtagtcccagctactcgggaggctgaggcaggagaatggctgaacccgggaggcggagcttgaagtgagctgagatggcgccactgcactccagcctgggtgacagggcgagactccgtctcaaaaaaaaaaaagaaaaataaaaagaaaaagaaatttggggcacttccccaatattaaaggactgtccaaaagtcccccctgccctttttttttttgaggcggagtctcgctctgtcgcccaggctggagtgcaacggcgctatctcggctcactgcaagctccgtagctgggactacaagactccgtagctgggactacaggcgcccgccaccacgcccgactaattttttgtatttttagtagagacggggtttcaccgtgttagccaggatgacctcgatctcctgaccttgagatccgcccgcctcggccccccaaggtgctgggattacaggcatgagccaccgcgcccggcccaaaaggccccattttgatgcctgtgcgtattccagctgcggcggacgcagttttgtatttgatacctgcccttgggaaaacacaaggtattaactgcgtgcaacctcctgactttctgtttcccctgatctgggaaaagggataggcaggttaagctctacactgtagaaagcctgtgatagagctttgaacaaatgctgcagccattgtaatcaccaaacactatagtaagtgctgggaatgaataaaaacacaatcaccgtcctacaggagttcagtatttaattaaaaaatttacagcatctgctagattgcaggctgttctagaccctggagttcaagtagtgcaaagttcctgtcttcctggaacttaccaacagtactggagtttcaacgttctataaacaaagatgggtgaggacattagccccgggctaattaaagcgctcaggcccgctccagacctgagaatatcagctgaatctgaatcaactgttctccatttctgtcggttggtggtatcgcggggccacggcgacctccagcggccaccctccgtcttgtggtctgttctgggtccccgggaaggaaagggaggggcgataagccgggtccttgggagcgtcctggtctcccttcgctttacagactaggaggccgcagctagctggcagtctcagatccaggtttcccatctctgggatgagaggagagttcttcactcaggactgccagcgcaatgcaggtcgtgaagaactgcagggtcgtttatcgatacaaagtgagtgttggaggaacccatcaagacacaggaagggggaaatcctagcgccgccagtcggagatgaccaagactgaacctcaggcccagccctcccttctctcttagcctgcaggtttttctcctattctggcgttgggaccggatgacagctgcgaaaccaaaacgggaatggataaactgaggtgccactggggacctgtttcagaagtacctcctgggcggggccatcaccggaagtggctttaggcatgtaacctacaatgcccgcctctaattgcgctaccagtaggcgacgagccgcctccacttccggtccccagagcagtggccagcagccccctctttactgctctcctattggctgccgcaaggacgcgctgtgatttcccattggtcgcgtctcccctccggcgccgcgcctccttcctccaggtatagtctcgtctttaggcatccgattggctaaaggctgggagggcgtttgcccgactcgaccaatgagtggggtcgagagtgagggcggtggctgcgtgatgggggcagggcgggacttggcgtggccattggccagggcgggtacaggctagagatatgattggttcaggagaggggcactgtggtggggtcgggactgcgcggcctcagcagctgcgggagacggaagtggcaagagcgcggcctcagagggtcgggcggacgccgcctgggtgagtcaccgtgccccctgcactgcaagcctgggaaccgcaacgaccgcgtcttgcccggctccgccctggcccccaccggctttcctgagtcccgccttctgtcatttggggctccgcctcccagtctttaggctccgcccctagaacctgggcacctgggct

SEQ ID NO: 18616 - DNA, 2300 bp, Homo sapien
ctgacccctagttgagtgcacacttccaaccaggccccttaatttatctcccacctaaatggcagctctgaagcttctgggctgccagcctcccattgccttgaacccgtgctcctcagagaccaagtgctaacagctcccctgttgacactatggaagccatggagtgatctaattgatacaggttgctataagtcagaggtcaggtgtcctagggtaaggggagtccctggagcaaagtcttctctgtggctgatgctccctgcagggaaatttaggagcagatttctgaaacagtgacgttcctcacaggaaaaaaaaaaaaaaacaaatgaacacttgggaagaagtgtgggaccattcccacaaaaacctatatgggggagtataggacatctcacctactccagcactgcttaaagttaaggtgaaagagagactgggggattgaaatcctttgggaatgggtatcctaggtggctgtcctcatgtgctgatgggccaggtcacttggggatagctcatagtcctcatacaggccacagtgtccttgggggttaacaggagaggtcaaatggatcaaaagcctggctgcaaacagacattgggaggttggtgctgtgcccaccagggtaggcagcaggcaggcgtcatgggacagccaatcagaggaggaggggactgcagaggaaccaagtgatcctgctgcagctgagctgtccttggagggtgggagccaagggaaggggaggagaagaggggtggggaaggacattccacaggcttttttggcccctgccagagacagaagggggtcaaagagaaagggaaaggagcaagccaggaagccagacaacaacagcatcaaaacaaggctgtttctgtgtgtgaggaactttgcctgggagataaaattagacctagagctttctgacagggagtctgaagcgtgggacatggaccgttcactgggatggcaagggaattctgtccctgaggacaggactgaagctggggtaaggtgctgctctgggagatgggtggacgtgacctgtcttccccctgccttggctgggattggggctcaaagtcagaaaatgatttggtcactggcagagctgggagtggggatggacaggcaggaggtgaggaccctggtgtcctgactccttgtctagagcccctgtggccccctccatgcggatgagcagccagggctggcagagatgaggatggtgctgggttcccggaggctctgctggaagatcatgggggctagggatcttcattagggccttcctttctcccttccctgcccctccactcagtgctcctgggaaaccaggtgaagcacagctttctctctcccacccttgtcctgacccccagaccaacggctgggtcattgtggatttgtgcagagaggcaggatttcctggaattccccagacttattagctgccagacaacacgtcgtgctgcccccagtcccaccccttctctgttgccatgtaattaattgtctaagctgggacacttttgagagtgaaagggcacaattaatcatgatgccaggacagcaggcatagactgggatgtatggtcaccactggacctcacaaatgtcataggtgagaaaagccttgggttaggcttgcctcaggatagcctcttctggtcacccagcctccatctgctggttctagttttgggctaaggggcctcttttcctcccctctgtccaggcgagcactggagactatggctataagcaggtgtgaagacttcagaggcaacagcctggcagtagctcctagcagacttttccctctaacctccctatctcaacctcttccctctggcatacacctggcagtatgcatatctgcctccctcaattcttccctttgcaggaagactgtggctatcttatcttcctcactctagctgggactccacagtggtctggggtagtccccactggcttggctaaccctcagagagtgagtcagcctctgcagccggcccttgtccattgtctgggggtggcacgtgggtattgtgaggcagagctgagcccagcactgccaggcaccccacgaaggaggctgacccccaaaggagaggagaatctttagggtctagagctgacaatgagagttgggggaaacagttcctcttctgagctgaggatggggtagaacaggcttctacagaggagtcagtccattctctgccttccactccctgtgggtcatggttcaggccaggccctctcgtgcactgccggctctgggcag

SEQ ID NO: 18617 - DNA, 2300 bp, Homo sapien
ggggctagaggggctttttctgccacacactaacttcagttcagctgaggtcttggtgctttcggcttgtccgaggccacactgttcttctctaattaaagacacacccccctccaccccaaccaccatcaccaaagtccccatcctcaggcccctgccctcaagccagccaagttcttaggctgactggttcagatcagactcctctatgagggtctctttgtcaaaggaggtcagtgtcctagctgctttgggaatcagtgggggagacccccccaacccagctatgccagggggtttaaatttacatgtgaaaagaatgacaggccaacattaatgaccatcctgtgacttgggatgcaccttctcttctcaggttcaaagcagcttaaggtatctatcatctgggagtgctttctctccccagcctcgctgggaggcaaggaagggccattcacaactgaacattaaggtcctcaaattaagacactatccagactcacaaaagatgtttccacccaaccagaaacagtggacccctgacccctagttgagtgcacacttccaaccaggccccttaatttatctcccacctaaatggcagctctgaagcttctgggctgccagcctcccattgccttgaacccgtgctcctcagagaccaagtgctaacagctcccctgttgacactatggaagccatggagtgatctaattgatacaggttgctataagtcagaggtcaggtgtcctagggtaaggggagtccctggagcaaagtcttctctgtggctgatgctccctgcagggaaatttaggagcagatttctgaaacagtgacgttcctcacaggaaaaaaaaaaaaaaacaaatgaacacttgggaagaagtgtgggaccattcccacaaaaacctatatgggggagtataggacatctcacctactccagcactgcttaaagttaaggtgaaagagagactgggggattgaaatcctttgggaatgggtatcctaggtggctgtcctcatgtgctgatgggccaggtcacttggggatagctcatagtcctcatacaggccacagtgtccttgggggttaacaggagaggtcaaatggatcaaaagcctggctgcaaacagacattgggaggttggtgctgtgcccaccagggtaggcagcaggcaggcgtcatgggacagccaatcagaggaggaggggactgcagaggaaccaagtgatcctgctgcagctgagctgtccttggagggtgggagccaagggaaggggaggagaagaggggtggggaaggacattccacaggcttttttggcccctgccagagacagaagggggtcaaagagaaagggaaaggagcaagccaggaagccagacaacaacagcatcaaaacaaggctgtttctgtgtgtgaggaactttgcctgggagataaaattagacctagagctttctgacagggagtctgaagcgtgggacatggaccgttcactgggatggcaagggaattctgtccctgaggacaggactgaagctggggtaaggtgctgctctgggagatgggtggacgtgacctgtcttccccctgccttggctgggattggggctcaaagtcagaaaatgatttggtcactggcagagctgggagtggggatggacaggcaggaggtgaggaccctggtgtcctgactccttgtctagagcccctgtggccccctccatgcggatgagcagccagggctggcagagatgaggatggtgctgggttcccggaggctctgctggaagatcatgggggctagggatcttcattagggccttcctttctcccttccctgcccctccactcagtgctcctgggaaaccaggtgaagcacagctttctctctcccacccttgtcctgacccccagaccaacggctgggtcattgtggatttgtgcagagaggcaggatttcctggaattccccagacttattagctgccagacaacacgtcgtgctgcccccagtcccaccccttctctgttgccatgtaattaattgtctaagctgggacacttttgagagtgaaagggcacaattaatcatgatgccaggacagcaggcatagactgggatgtatggtcaccactggacctcacaaatgtcataggtgagaaaagccttgggttaggcttgcctcaggatagcctcttctggtcacccagcctccatctgctggttctagttttgggctaaggggcctcttttcctcccctctgtccaggcgagcactggagact

SEQ ID NO: 18618 - DNA, 2300 bp, Homo sapien
ggggaggcccagcccaccatcctgcccggtgggattagctatatccttctgcccctgggacaggaaccatgggaaagcttcctcctgctgcatctacccgctccctccccaccagccaggtccctctgcagtgtgtgggggtgggggcacccatccctgccacctgcctgtagtgggaagagaaacagtaaccccagccagcctccctggaggtgcccaggtaggaagtttttgatgcttggctctgaagatgtaatctcttctcctgacattgttgccagagcctgccacaaataacgtaagggtgtcaggacctctaggccacacaccgtcctctcctctcagtctggaagccccacagcctttgccctctgcattgggggacacaaactgtttacagcagggggggatcactgaccagcctgtggggcgggatgttggctgtgggcagcctccagaagggagctccctgggccccctgggatcagaagctttcaggtttggtagggccaaccttttgggctcttgtctctcaagctgtgtccaggcagaggcccaagccttggccaggaagtcttggtgaccctgtgaccttcccccaacgggggttcctgagagaggcctgtccttattcctttcccccacttctccccacatggtggatggatggactgattgttctagggatggaagcctagggaagcactgattgtccccagtgccaagcccagcaggggctagaggggctttttctgccacacactaacttcagttcagctgaggtcttggtgctttcggcttgtccgaggccacactgttcttctctaattaaagacacacccccctccaccccaaccaccatcaccaaagtccccatcctcaggcccctgccctcaagccagccaagttcttaggctgactggttcagatcagactcctctatgagggtctctttgtcaaaggaggtcagtgtcctagctgctttgggaatcagtgggggagacccccccaacccagctatgccagggggtttaaatttacatgtgaaaagaatgacaggccaacattaatgaccatcctgtgacttgggatgcaccttctcttctcaggttcaaagcagcttaaggtatctatcatctgggagtgctttctctccccagcctcgctgggaggcaaggaagggccattcacaactgaacattaaggtcctcaaattaagacactatccagactcacaaaagatgtttccacccaaccagaaacagtggacccctgacccctagttgagtgcacacttccaaccaggccccttaatttatctcccacctaaatggcagctctgaagcttctgggctgccagcctcccattgccttgaacccgtgctcctcagagaccaagtgctaacagctcccctgttgacactatggaagccatggagtgatctaattgatacaggttgctataagtcagaggtcaggtgtcctagggtaaggggagtccctggagcaaagtcttctctgtggctgatgctccctgcagggaaatttaggagcagatttctgaaacagtgacgttcctcacaggaaaaaaaaaaaaaaacaaatgaacacttgggaagaagtgtgggaccattcccacaaaaacctatatgggggagtataggacatctcacctactccagcactgcttaaagttaaggtgaaagagagactgggggattgaaatcctttgggaatgggtatcctaggtggctgtcctcatgtgctgatgggccaggtcacttggggatagctcatagtcctcatacaggccacagtgtccttgggggttaacaggagaggtcaaatggatcaaaagcctggctgcaaacagacattgggaggttggtgctgtgcccaccagggtaggcagcaggcaggcgtcatgggacagccaatcagaggaggaggggactgcagaggaaccaagtgatcctgctgcagctgagctgtccttggagggtgggagccaagggaaggggaggagaagaggggtggggaaggacattccacaggcttttttggcccctgccagagacagaagggggtcaaagagaaagggaaaggagcaagccaggaagccagacaacaacagcatcaaaacaaggctgtttctgtgtgtgaggaactttgcctgggagataaaattagacctagagctttctgacagggagtctgaagcgtgggacatggaccgttcactgggatggcaagggaattctgtccctgaggacaggactgaagctggggtaaggtgctgc

SEQ ID NO: 18619 - DNA, 2300 bp, Homo sapien
cttagagctaagttccgtggtcccaggacttgcttggggcctcactttcctcaaggcaagctggtaccaacctgctgcctgggcagcaggtgccagagaagagctgggattccagccacagctgaggatgagctggttgggctgccttttgaaatgtgtctgtgtccacacttggaattcagctgaggccacggggaggggcatgttataatagaggaaaacaagggtttctgctggggcctgtcttccctgatgtaggctttctccttaccctaggccacaggactctggaagcacgcaagaggtattcttagagtgcatacatgagtattggaggcccagggctttgaacagtggggctttgtatagtccaagcttgacatttggggctgatggtagcagcagctgctgcttctgcagacttccaactgccattggtttctctctttatgtctttgttttcctgagtacagcttccgatcccctgatctaccccaggtcttttccgggagcctctctgtacctttagaggttccctttcagggaacccaagctgctgcccccatcctacacgtcctcccccttcactcagatcctgggccctctcctgaatcactgcatgtccaacctttctccagcacctcctgctgctgccttgttctcttatcttcctccaaggcctatagtagcatacagcatatcctccttcccccactgcatccacttttagaaggccagagctgtaaggaagcttagaaatcatctagtttaatcccctcattttcaggtatggaaattgagaccctgacaggtgaagtaagttgctcaaggccacccagctaggaaggtttctcctcaaccggctggctcatgaacaccctgccatcttccagtccaccagtgccaaacagccaataacatctccagtagcagccccattgtttttctcagcctgatcttacctgctgccccaggccctcttccctcccctggctgagttctgactggtcccaaccagtgctactggttcacaggtcagactgaaatacagcaggcaggcctctggcacttctaccaacagagagggccgtgcctgtgggtctcagttttgtccagagtgtattcaggcagaagccagtcagcctgccattgagagaggggtcttgcgggtcaggaagggacatgcttctggaaacttccacaggagcctgaccagctcagaccctacttagctcagggaatccctcaccaacaccccactcaccaagcatctgccttcccctagctgctgctctgacctttctgagcctctaatgcctctaaagcttctggggcatctgtcccctcggcatctcacctgcttgtcagaggaagagtggcccagctgggcctgggtcacgcctgggttggcctctcctgaggccctccccactgtcctcagccacaggcaaggctacaccgccctgttaaagccactcagcctctcccttctatccttccagcagatgatccctggataatttgtgcagcaaatcctctttaatctgtaatctggggtactgcatgaagggaacctgcctctaacctgccccttcacagctcgggtggaggtggagaatatctgacattcccctttaggaggtgtagtgatcagtaacttgggcatcagccggattcactttgtgaaaaccttgttgaatccctgcggtaactaatggtttctctccaactcatgcagcaactccccctcccttccaaaggcgtctccttctggggatgtcaggtgggccgttcctttttctttgggaactggctcaagcccccgcggtgcttctggagctgagtaaaaaagagccaggtgtccagtgcagcccggggacgaggagctgaggctccccgctctgtcctgggtgactctgcatactctgcgcatccgggggtcgcgggctgcgaggccggcccccagctgggcaccccgacccacttcgcgccggcaccgctagcagctgaggtacaggccccgccccggggccgactcgctccgcccccgccgccgggcccctcccgcagcggtccgcactcggggaggcgggagggtgacggcggtgctgcgaggtcggcgcgcagctccgccgcgggtcgctcgggcgctgtccaggcggagccggccccgcccgggctgcagccatggtaaggcaggcaggcaggcgggcgggcgcggggcagggctggggtgcgcagggccggtcgctcccgggcggctgcaaggggacccgcggcaccgcagccgcggctgtgca

SEQ ID NO: 18620 - DNA, 2300 bp, Homo sapien
taaaatagtaacggggtcctcttaggtgatttcaactttttataattatttgtaaaactgttttctaattttttaaaatatttatttatttatttgctggagatgggatctcaccatgttgcccaggctggtctcgaactcttgagctaaagtgatctgcccacctcagtttcccaaagtgttgggattacaggctgggccaccacacctagccaaagctgctttcattttggggaatagaaagggtttagaaatacttaaaactggctgggcacggtggctcacacctgtaatcccagcactttaggaagccgaggtgggtagattatctgaggtcaggagtttgacacgagcctaactaacatggtgaaaccccatctctactaaaaaaaagaaaatcagctaggcatggtggtatgcgcctgtaatcccagctactcgggaggctgaggcaggagaatcacttgaacccgggaggcagaggttgcagtgagccaagatcacgccactgcactgcagcctgggcaacagcctgggcacagtttatttgaaactccatctcaaataaaaaaaaaaaaagaaaaatgaagctgaccatcctataatctcaatgacccttcagagttcataatagaattttggatatggtagagtctatgtctaaaagagagaatgagagaaagagcatgtgaaagggagagaaaggtgacagagtctcctccaaaatggtcatccaaattggaaagtcacttttcaagagagaaccggagtccggctgattggatagctgacaggatcatgagaaaggacattaacatttgttgtgtgacacccatgtaccaggcagtggtttccaggtgaagaaaccaagtcccagggaaggcaggtaatttctcctaggtacacctgtagtcatttatgatggaaaccaatgattaactccaaattccttctttctttctttctttcttttttttttttttttttgagatggagtcttgctctgtcacccagcctggagtgcagtggcacgatctcagctcactgcagcctccgcctcccaggttccagcgattctcgtgcctcagcctcacgggtagctgggattacaggcacgcaccaccacgcctggctaatatttgtatttttagtagagatggggtttcaccatgttggccaggctggtctcaaactcctgacctcaggtgatccacccgcctcagcctcccaaagtgctgggattacaggtgtgagccactgcacccagcccaaatcccttttattttgtttttatttatatatattttttgagatggagttttgctcttgtcacccaggctggagtaaagtggcacaatctcagctcactgcaacctccaactcccgggttcaagcgattctcctgcctcagcctcctgagtagctgggattataggtgcctgccactatgcctggctaatttttttgtatttttagtaaagacggggttttatcatgctggccatgctggcctcaaactcctgacctcaggcaatccacccgcctcggtctcccaaagtgctgggattacaggcgtgagccaccgcacatggcaaatcccttttattaataaaacactaaactctcctggagcaagaatgtgagaattttattatttgagcaacctggatttttaccccaggagcaatgaaacaatccatgagacctggaaaaagctgaagctctctttttttttttttttttaacttgtatacagtacagtttcaaacaaaattggggcaactttgtacttcgtaccttattaaaactggggcgaacacagcgtgtttggtttgatcttgtcttcataggatcttctggctgattccttctctggatgagtcctgagaatttctagaatctcgggagagtaaaggagggtctggagccttctctatgtacaaggaaatcccagttttgttaaaaacttgccaaaggcttggtgatataactccaaagacaaatccacagattcctttcaggtacttctttgggattctgtgaagaattgtggctgtacactaggatgtttaataggaaggaagctccttcctttatgacatcaccagacagagaggtagctaaggggattatttgagacactcttagaacaacagccacttttgtgggagcccaagaaacagcagctttaaaacagggtaaatattcaggcatcattaggatcctgaatacaagccagccagtaaaatacgggatctactcagaagggcacaatctatcagatggtcaagacaaataaa

SEQ ID NO: 18621 - DNA, 2300 bp, Homo sapien
tttctttctcctcctcctcctctgcctccccctccccttccctccccctcctcctcttcttcatcttctccttcttctcctcctcctccttcttctccttctttcttcttcttttttttcccttcctcctcctcctatttgtgtttctttttcagttaaagagagaaagttccctggtgattctgatgtgtagccaggttaggaaactaaggctatacatcatatcctcaccatatcctggacacattaaaggctgtcccttcatgtctcagacagtttactggctttgttgaaatttttctgaggtgaaatttttctgaggtgtagatccttgactgcattgctgatgccaaggttttgtgctctaccacaggattttcttggggggctgtggggagacattctcaaacgagagaggtggcgccttgttaggctgtgcttgactagcctgatcccaggacactgcaggtgtgaagacattgtttctgggcagccaatatcagagtgctggggaaagaaaattggatttggaaccagatctatgcctgggaatgaacctcagctttgccgttttgtttcctcatctgtaaattgggaaatgatacttccttgaagggttgagtgaaggagggaaaaaaagggattgtgtgtgtgtgtgtgtgtgtgtgtgtgtgtacagaaagttcctgtgggcacagacaggggcctcacaaatgatgttgttatattcctcgtcaccaacgttgccttgtagaatgggagccctgtgttgcacgctgagccccgctccatggaatgcaggagcattgccatggacatcaattgtactcatctccctccccagccgctgctttgatgggagcacccctgtccatgcagcagcattttcgggcaatcagtggatccttagcaaactgctggatgcaggaggtgacctgcgactccacgatgagaggggtcaaaacccgaagacttgggctttgacagcaggaaaggagcgtagcacccaggtaagggtgggtcccactctgtagccatgcccactagaagagtactgggctgagagtcaggctcccagtggtcagcacagagcgtacagtggccttagtattggtactggagtctcaggcttggatcgaagcaaattagccagctgcgaaacttccggcaggtctagtgaacctttctactcatcgtattcgatgggaaaggcaaacaactgtaattttgtctgacccatttaactagcacttaccatgactcagatgttgttttaaatgttttttatatattaactcaatcttcacaacaacctctcaggtaagtactattaatgtccttattgtacaggtggggaaactgaggcccactgacattaagtaactttgtttggcaggtgggaattttttttttttttttgggaaggagtcttgcccaggctggagtgcagtggcgcgagctcagctcactgcaacctccgcctcctgggttcaagcaattctcctgcctcagcctcctgagtagctcggattacaagcatgcaccaccacactcagctaacttttgtattttgagtaaagacggggtttctccatgttggccaggctggtctcgaactcctgactcaggtgattcgcccaccttggcctcccaaagtgctggaattacaggcatgagccactgcacccagctggtgtgatgtgttttaatgaagactaaataacataaatgtaaaactcaaagggcaggtacagtgccaggcccctctgtgtgcagtctcctttctggggctcctgcttattaaagctgttgggccttggaccagcaaattttactcgtcttggccttggtttcctcatctgttgaaggagggagttggaggaaattgtttccctaaagcctctccctgaaaacattccatacctttagaaaatcacctgggccctttccttttgagaggtttttctgttgggggctctcagctcctcggaccacttatcttcatacccaagcttccattccattgagaactggtgcgcccgcactgggcatctctgcgatgttttgcagatagtggagttcatgcagcgctgtgcctcacacatgcaggccatcatccagggcttctcttacgacctcctgaagaagatagactccccgcagcggcttgtctacagcccgtcctggtgtgggggcctcgtgcaggggtgagtactgccttgagcagagtgggatagtctccatcacccagccttcctcgtgggagccctgcagcatgggttgcctcagctcctccacat

SEQ ID NO: 18622 - DNA, 2300 bp, Homo sapien
attctaaacacgactgattccactgagtttgaccaaactaactgaagacttattgttgaatgtggtaataccatgttttttcttcacccaagaatctgggtgctttataagcataagcatgaaatctccctgaagatagtatttatgcatccactgagcgctcaaatatagaccatattagaagttaagcaatgggttgagtggccaaccacattttggccagtcctacaagactttctttgacctaccaaatggggtataaatgcttctcgtattctccccgccagtagggactcaaaatcttaatagctcggggtagtaaaaaggatgctaggtttgaatcttggctttaagaaaactgtgctgaggtgttttgtttgtttgagacagggtttcactctatcacccaagctggagtgcagtggcgtgatcatagctcactcccaggctgaagggatcctcccaccacagacttctgagtagctgggacgaccggtgcatgccaccatgcccggctaattttttgtacttttggtacagacagtgtttcgccatgttgtcgaggctggtctcaaactcatgagctcaaagagatccacctgcctcgacctcccaaagtgctgggattacaggcacgagccactgcgcccggccagctttttttcttttatcagaattgatattaaactatatgctgagcttccatgtccttatcttccttttggcatggctatggccatttgaaatgtgtgggatttgctaaagtgctcaacatacgttgtttccttttttagatctaagtatgtagagggctctgatttgcaatatttagaaagttcttctaagctgggaagaaaagtcaagactaagaatcattgccaacagggccgggcgcggtggctcacgcctgtactcccagcattttgggaggccgaggcaggcggatcacgaggtcaggagttcgagaccagcctggccaatatggtgaaaccccttctctaataataatacaaaaattagccgggcatggtggcgtgcgcctgtaatcccaggtactcaagaggctgaggcaggagactcacttgaacccgggaggcgaaggttgcagtgagccgacatcgtgccactgcactccatcatgggcaacacagtgagactctgtctcaaaaaaaaaaaaaaaaaaatcgccaataggtagggaataagttaccccctgctaaataagttacactcacctaggcaaggaaggaactcataaaccaccttctaaactgcttgccttcctccccgaagttctgtaatttagaggcggtcactaccactgcttgaacaccccttcccaagtctgtaccacaaaaggagctcttgtgtagcccagcccctccttctcaggaccccaggagcccagacacactaatggggacattagttgcttacttttccagctactgcttaagctaggcaggccatgaagaaataacggtctcagtaacctccatgctcgggatacgactcccgggaagacgtgggtgggtgcggggaatgcggactgatccctcccagcggccgttgggggctggcccacaatccctcgcgagggcgggaaaagcaatgtggtcgttgcggggggggggggtcagaaaagggggacggtcagcgggaagagccaagagactgcaactctacaaagagcacgcagattaattctaatgattgttccctgagcttttcacaccaaaataatggtaactggctagtgtgtgcccgttacgctcactactcccactcgagatcattcctattaatgactctgaggcttcacctaacaggccacggtggaggcaaggaaatgtggcgtggagaacccactgggcctggctctccgtcctatggtctccgtccatcgttttacagtcagggtgtacatttgatgaggaatctctaaatgggattttggggaatcaaaacggaatggtgcataagtgtgaaaatttacaagactgcgcaaagctgcaaggcccggagccccgtgcggccaggccgcagagccggccccttccgctttacgtctgacgtcacgccgcacgccccagcgagggcgtgcggagtttggctgctccggggttagcaggtgagcctgcgatgcgcgggaagacgttccgctttgaaatgcagcgggatttggtgagtttcccgctgtctccagcggtgcgggtgaagctggtgtctgcggggttccagactgctgaggaactcctagaggtgaaaccctccgagcttagcaaaggtaacgactcctg

SEQ ID NO: 18623 - DNA, 2300 bp, Homo sapien
aaaaattcatgtatcactccaaactaatgagaacaattattcaaggcacaagcattttaaagaatacatttatgcttcctcgactacacaatttcacccatctgacagtgtggcctgagaaaagaaaatggcaattacaaaacaagctggtgaagaaataatggtgaggatgacatcacttatcagtttgatatatcagtgcttgatctgataagaatatgagccataaatatggggctaataaaagacaatggtgatgacagcatttaggaaatgaaaatcctatcaagagcctgaatgctggaattagattgcctgggtttgtaaatcctggcaccacttactgcatgactttgggcaagttacttcactttttcttttttgctcagatttttttcgtctataaaatgggaatgagacgatacatgtaaaaagcttggtagaatatcaagaccatctaaagtagtcaatagttgttagtgatcattattattcagggtctcacatttcttctttgaaaagccaacttgttgaagaaaaaagagcccatcaaatcttgggggacacagtctgcgcgcggtatgacttaaacagttaaggctgggtccacgagacttattctttagaggcgaattgaaacctctgtattttccatcagtaagggcagtaacttaaaattctgttccatcttcttcagtgaatagcacaggtccagacatgtcatagagagatgtgcacaacaagtgaccaccgccagcctcatatttgtatgtctcaggatgcagtggttcccatctgcaatgctctggaatatgaggttttgggtgtttcagttaattacgtaagagaatattctttctatgcttcctcaagattccggggattctactctctttctcattcttagtgtctctagtcctacacaaaatcctgcatttctgaaatttaacccttaccccttggatcttggaacagcaaaaattagacaaccaattctgactccagtatttcctaacccagttagcatgaaaagttacctaagctccccaagatatcagttctctcatccatatactgaatataataatctacgtaagcgggttgagggttaaatgagacaatcctcaaagcattcagcaggcattgccagaggaaaagcaattagtaaatgttttcacgaccacagttctcctaaccattcagacaacttgtaagtggagtcgaggagctctttcacgctgtaaacatggacgtgggaggaagcagaatctaacggagactgggctgaaggccgaggcgagagaacgaagactgaggcggcgctgacggcggccggtgtgcctcagcttgccatcaggagtcgttacctttgctaagctcggagggtttcacctctaggagttcctcagcagtctggaaccccgcagacaccagcttcacccgcaccgctggagacagcgggaaactcaccaaatcccgctgcatttcaaagcggaacgtcttcccgcgcatcgcaggctcacctgctaaccccggagcagccaaactccgcacgccctcgctggggcgtgcggcgtgacgtcagacgtaaagcggaaggggccggctctgcggcctggccgcacggggctccgggccttgcagctttgcgcagtcttgtaaattttcacacttatgcaccattccgttttgattccccaaaatcccatttagagattcctcatcaaatgtacaccctgactgtaaaacgatggacggagaccataggacggagagccaggcccagtgggttctccacgccacatttccttgcctccaccgtggcctgttaggtgaagcctcagagtcattaataggaatgatctcgagtgggagtagtgagcgtaacgggcacacactagccagttaccattattttggtgtgaaaagctcagggaacaatcattagaattaatctgcgtgctctttgtagagttgcagtctcttggctcttcccgctgaccgtcccccttttctgaccccccccccccgcaacgaccacattgcttttcccgccctcgcgagggattgtgggccagcccccaacggccgctgggagggatcagtccgcattccccgcacccacccacgtcttcccgggagtcgtatcccgagcatggaggttactgagaccgttatttcttcatggcctgcctagcttaagcagtagctggaaaagtaagcaactaatgtccccattagtgtgtctgggctcctggggtcctgagaaggaggggctgggctacacaagagctcctttt

SEQ ID NO: 18624 - DNA, 2300 bp, Homo sapien
gtattatatgaaaacagttggcagagagactccctcttctgccattaataactggaaacgatatttcagaccctaaatccaactgaaacccagaaacaatacatggagaggatggggtggataatttgtgagaacatgtttttcaaagtagagaaagaatcactatgtttttgctgaattatatgttgccatggacatggcagtttgcagtaatgatgctatcatctatacagctgtataacaacacagcttctttctctcccactccttcagtaaggcttaaaaataataggtttgtgtgtagtttggtaagaaaattagaatcacttaaagtcatttcaattccaacccaagaaagaaaaaaagagacttggggggatggggaagaagagcaaacaaaatgtagaaaaaatacatattattggccgggcacggtggctcacgcctgtaatcccagcactttgggaggccaaggtaggcggatcatctgacatcaggagttcgagaccaacctgaccaacatggtgaaaccctgtctctactaaaaagacaaaaaaattagccgggcgtggtggcacatgcctgtaatcccagctactcaggagggtgagacaggagaatcgcttgaacccaggaggcagaggttgcagtgagccgagatcctgccattgcactacagcctgggcaacaagagcaaaactccgtctcaaaaaaaaaagaaagagaaaagaaaaaatacatattatataatgaagtataatatgcattatgcagagactaaagaggggagtcttggttgcctgaaaactaatgggtaaaatccattgaagtgggtgaatccagtgaaaagacctggattgagtccttgttgcatcccttgcatgtgaccttgagcaaagtcaccatgtctttaaggctgttttctcacctataaaatggaataattggccggcgtggtgggtcacacctgtaatcccagcactttgggaggctgaggcaggcagatcacctgaggtcaggagtttgagaccagcctggccaatatggtgaaaccccgtctctactaaaaatacaaaagttagccgggggtggtggcaggcccctgtaatcccagctacttgggaggctgacgcaggagaatcacttgaacccgagaggcggaggttgcagtgagctgagatcgcgccactgcactccagcctgggtgacaagagcgagattgtctcaaaaaaaaaaaaatcataacggtaacgtcctatacctcaagggactgtggtaagaattaaaagggtgaaatcaatgtgtaaactatgaagcccaatagaaataaggtgttatacagacaattgcactattgaatctccggagacagagttgagttaaggaaaaatgcactttcggaaagctttggcgactgaacgacctgagttctccaacgccaaggctggaagtttggagaccttgaaacaagtaaattaccattaatatcataattttcagtttccttttaagaaatgagagtaacaccactttcttcacagaatcaagtgagagagaacctatgcaaaggaacttatcacttggtaggtatttgaagctccctctgcctgaaaactacttattcaaagactgcaacaaaaggtgttcacagtgtggtatctttcaaaacatacgctaaggcaaggaacagataaggaaatggaagtacatccaattgggatccaagcaacccaagtgggaaccaacagctagacttggagatgtcttagctcactcttaaccacgtgagggtagggtatccaaccaataaagacattcagagttggagagcgggcgagtggagtgtcctttagactccgcggactcgacgggagggaccctgcaatgcttaattagaaccggttgccatggcgacagtctctaggcagcgtgggctgagctctccgtaggaataaagggtgggccgccgctggaccctgcgcgcgcccgccaccaactttccctccagatccgagaggggcggcgcgctccgcccccgggccgcgcacgtcggtgctcggcggcgcgcacgcctgcgggagccctctccaggcaacctagtgctgatcgctcgtgccggtgcggccgttaaccgcccttgccggagccctaggctcaaaagcagccccttacccttcctgggcttcccccaacccctttcccggtctgccctggggcatgagcagcgatggccggctgcatccctgaggagaaaacttaccggcgcttcctggagctattcctgggcgagtttcgcggac

SEQ ID NO: 18625 - DNA, 2300 bp, Homo sapien
tttttttgagatggagtctcactctgtcaaccagactagagtgcagtggtgtgatcttggctcactgtaacctctgcctcccaggttcaagcaattctcctgcctcagcctcccgagtagctgggattacaggtgcctgccaccacacctggctattcttttgtattttggtttcaccatgttggcaaggctggtctctaactcttgacctcaggtgatctgcacaccttggcctcccaaagtgctgggataacaggcgtgagccactgcacccagcttctcaccccagtattcttgttcagtgtatctaggatgtaattttaaaaactccttcagctgactgacatacaacccaatttgggaattccttagtaaaagaaaagaggtaaaaacagttttcagctgggtgcggtggctcacacctgtaatcccagcactttgggaggctgaggcgggcggatcactaggttaggagatccagaccatcctaacacggtgaaaccccgtatctactgaaaatacaggtgtggtggtgcatgcctgtagtccccactacgggaggctgaggcaggagaatcgcttgaacccaggaggcggaggttgccgtgagtggagatcgggccgctgcactccagcctgggcaacagtgagactgtgtctcaaaacacaacaaagaacagttttcaatgtgaaggggaaatcgttttctgttatttaataggaattgcagtaatacagaggctgggaagaaaaactgtcagtgagataataatccttagaagaggaggcagaagtgggagacagtgagaacatgaggatgtgaaaagcataaattattaattggcttgaagcttctgaacaatggaactttcctcctaagttatatcctgctggatctctctgaaatactcatgggtagttggaacctgactttttaatattttatattatctactttcctgcgtgtagcattgttttaaaatgttctatctctttaaaatatatttaaacagctttattgaagaaggtcagttttaagcaacatttccatatctggtatttgttatgcattatactaggtgctagagaaaagtcagatgcttttcttggcttaaagagcatagtccaatataggggtataggcataatatctgcctacagatgtctgtaatgtgcatcagtcattaacatgacagtccaaaaacttcaaattgtaccccattatttaatcaaagtagaaaaagtctaccaaactgtcatgacctatacattttactgtccagagacttgggggagatttctattttggtgtctaattctttgtaatctgttatactatgggaatttgtcttcttttatctaaaaccaggtggtcatgggatataatctccttctccttacccttacctctcatccccccaattgtgcacatcgtacacattgtcatctgtttttttctagggctcaggatggggttgaggcttgcttctgaattctaagtactaatgaggccaccactcaatcactgtgctaatgtacaactgtctggttccttctttcttttttttttttttttttttttgagacggagtctcgctctgtcgcccaggccggactgcggactgcagtggcgcaatctcggctcactgcaagctccgcttcccgggttcacgccattctcctgcctcagcctcccgagtagctgggactacaggcgcccgccaccgcgcccggctaattttttgtatttttagtagagacggggtttcaccttgttagccaggatggtctcgatctcctgacctcatgatccacccgcctcggcctcccaaagtgctgggattacaggcgtgagccaccgcgcccggccctggttccttctttctgcttcttatcatgaacctgaactcctaagagataggtccatagacaagtattcatataatgttaaccagttcattttttcatttaagtatagctaagtttgtgcatatatatatcattttctacgcctcttttgcaggtagtagccatggttatgtgggttccagtagtagaatatcaagaagaacacatttatgctccgctgctaccagtagtttactagacattgatccattaattttaatacatttgttggaccttaaggaccggagcagtatagaaaatttgtggggcttacagcctcgcccacctgcttcacttctgcagcccacaggtaaaataataacaatgataatttcctttttttctgtggttctctaaaagaactcttggattttcatttaagtatttcagct

SEQ ID NO: 18626 - DNA, 2300 bp, Homo sapien
ttttttttttggtttttattattaaaaaattattattttttgggggggacagagtctctgtcacccaggctggagtacagtggcccgatcacagctcactgtaagctctgcctcccgggttcaagcaattctcatgtctcagcctcttgagtagctgggattacaggtgtgcgccaacatgcgtggctacattttgtattttagtagagacgtgtttttgccgtgttggccaggccagtcatgaattcctcagttcaagtgatctgccctcctcagcgtcccaaagtactgggattagaggcatgagccaccacccctggctaataattattttttaataagagggagtaatttttgtaaagtcctggtggaaagaagtttgaggacatggaagaagactagtttgccttagagaagagtgactgactgataaggttgtggcagatgatttgggctgtggttaaagatcttggttctttttaataagttaatttctagttaaatgaatattttgctaaagccctttatttataatcttgaaagagttcctacttggaccaagtgattttaagcgggcactggcctgcttcaacaaaattaaattagctaataaggtaaagttcatttgagagatttaccagtttattagtgtccatagagtgttacaaaggaatgtaaatgcagatgagatatgtgaaagtgttctaaagctactctaatttaaatagcatggcggacatacctttaaacctttggcagaaatttatgagcaacacgtcactaaagtgaatgaagaggtagccaaacttcgtcggcgtctcatggaactgatcagcttagttcaagaagtggtaagactactactaaaatataattattttgtttttaatctgtaatatataataatatatttatataatataagttaatcagatgttgaaatcaaggttttcaagatttgcaaatttgataggctgtacctatagtcaaattccataaatttcagagtatctgagaaatttgcatacaaagcccctggcttgtaaggaagcagttggagtcagagaattaccacttatgcagaattagaaaatcagtgaatttaaaaagtctgtttgttacagagtcaataattaacttattttttcttttttttgagatggagtttcactcttgtcgcccaggctggagtgtaatggcgcgatctcagctcactacaacctccacctcccgggctcaagtgattcttttgcctcaccctcccaagtagctgggattacaggtgcccaccaccacgcccagctaatttttgtatttttagtagagacagggtttcaccatattggccaggctggtttcaaactcctgacgtcgtgatccacctgccttggcctcccaaagtgctaagattacaggtgtaagccactgtgcctggccccaataatttacttctaaacagaatcagtattgacttttacagtcattcattaagttatacactctttggatccccagcttttgggtgagtttcttttactaagcaatgaactatttgtgatgtcctgatttagaactccacagacttgaaagtgcaatatttaacattactgtttagatattgtttaggtcaaacagctttagtgagctatttataatgttatttctgtgaaaaaatgtgataagcccccaagaatgaaatactaagcatgtttttagaatacattttgtttcaagttgttagaatgacagtcataaatgaggtttatggaccatttcctaacttaaaatgaagtttgtggaccatatcctaaattaaaagcagatgtcttctttgttttacctctttaggaatcaagaaccaagtgatcatttataacattctttatgcagaaaatttgtgtttttgattgcatgtctgccattttgaaatataagcaagttgggtcatttccatttgaccttcctctaactacctttttcatattatctattcttggcaatattataatgtggtgcttctgtttttaaaatttacccaattaaaattattcttacctctttatcttctaggaaaggaatgtagaagctgtaagaaatgcaaaagatgagcgtgttcgggaaattaggaatgcagtggagatgatgattgcacggttagacacacagctgaagaataagcttataacactgatgggtaagtgtttatgtatgctgctggggtacctggtgctttcagcttctttgagattcagtctttgaagaataagggtgatcatcctaggaaggaatcttgagatttt

SEQ ID NO: 18627 - DNA, 2300 bp, Homo sapien
tatatggctataccatactttttttttttttttaattttagacaggatctggctgtgttgcccaggctggagtgcagtggtgtgatcttggatcactgcagcctcaaattcctgggctcaagtgatccttccatctcagcctccagagtagctgggaccacaggtgtgcaccaccatgcccagctagatatatagtcatttttatcagttccttagtgatagacatttaagctctataacagcaagttatacaaataatataacaagtaagttgtataacagcaagttatttaaggatatgtatgaagttaggagatttttcttgtggggagggcagcaaggtcagcctttaagggattctgatggagcagaccgttggctctcaaaccccagggcttggcaaacgatgtgagtttagcatcttgccaactaaattatttattttgctcaagttatcctttttgcttgcaaccaacggcctctaatcagctgtacaggtttctaattgttcgctattatgaattggtgcaataagtccttcgacattcttaggttcttcggcaaacatacaagaatcttaactatttatcatgtaagtattgcaatttgtcttatttgtcttctgtactgctccttgagagcaagggccacttctcattactctgaatcccaagtacagcattgcattttttttttttttttttttgagacggagtttcactcttgttgcccaggttggagtgcaatggcgcgatctcggctcaccgcaacctccgcctcctgggttcgagcgattcttctgcctcagcctccccagtagctgggattacaggcatgcgccaccacgcccggctaattttgtatttttagtagagacggggtttctccatgttggtcaggctggtctcgaactcccgacctcaggtgattcgccagcctcggcctcccaaagtgctgggattacaggtgtgagccaccacgccaggcctagcactgcattctataaataattcttttaagtaaaattctcataatattaaccatcaaccatttaaaaatgtacaactgaggccattttcgtaaaaatagctccatgtaggtcaaagaccacaaataattcttactgaaagaatttttcagtctcagattaatctttctaaattatatcttgttcatgacccaagtagttaaaaaaaattgttgctacccaccacctataagcctaaatgcctgatattcaagaacttatttctagattattagtgattctctacatgtgcactctaggtcggttaagtataattagttgtttgcaataaatacaggaaaaattaaattcaaattacgaatttgatatgccctctttgtctcacaaaccttcaattcttgcaatctttacacatctggcaggaaactgtagaaagcagatcccatttataggaaagatgaatatcgctgataccctttcaatagtcccacggcgacaacttaggcggcaagaatgaagtgtgggatgtgggaacgaagacttcacagtgtgtggtcccgtcctctcaccaccgtaatgagaaatgacacctcagtttggagccttctaactcgattagctttggtaggtggaacgcaagtcctacaaaccttagactgttccttccagagagaaccactaaccatgaaccttctgcaccagggtttctcaaagtgcgggccacagaccacctgctgccgaatcacacgatgctgggtgaaaacgcggatggcctgggccccaccctggaatctcagagtccgaatacttaactacgggtgtggctctgaagtctgcgctttccaccagtacgccaggtggctccgtctttggcgcgcaagtttgagagccgtggggccccgccctccgccaaggtgggcgtgggtggcgtagcagagccccaagctcaggccgcctgcgcaggctagggccggaggcacgcaaccctgaggcagcgagtcgccaagtctcgtatgcgccccgcaacgcgggaactaggcgatcgctccacgctcctcccctcctttcccctcccacagcgtcctgcgcgcatgcgcttcgcagcttctctcgccgccgcgcccccagctgctctggttacggttggtgtttgcgaattctctgcggcaccttcttcgctgaactccaccgtcagttccataggcgcgcgcccgcgtcacgtgggccgaggttccggcgcggctgctggccggcggctgagccgggagaaaggagctgcggccaccgttcgccctacttctgcgcctcgggg

SEQ ID NO: 18628 - DNA, 2300 bp, Homo sapien
tagagacccaagattcagcttgaagaaagcagggcaggcacaaaggatacctaagcagtaatgccagggaatggcgtgggaaggagggacggattacaaacgaagaaagaagtcttttacttttttaaaacttaatcttttttttttttgagacgttgtctctgtcgcaaggccggagtacagtgacgcgatctcggctcactgcaacctccgtctcccaggttgaagcgatcctcctgcctcagcctcccgagtagctgggactacaggcgcgtgccatcacacccggctaatttttttatttttagtatagacggagtttcaccatgttggccagggtagtctcaatgtcttgacctcttgatccgcccgcctcggcctcccaaagtgccgggattacaggcgtgagccaccgcgcccggccaatcgtatttaacagacaagcaaacaaacaaaaaaagacaggagctcagtggcaggcgcttcctccaaagtccaggtttttaaggaaagcagcccaacctgggaaaaaaaaaaaaaaagaaaagaaaagaaaaaaaagataatgctgaacgaaaagggctgaagacagaacaaggacactaagaggaaaaaagcgcgggcgatcaagctggtaatctaaggatgggagggagggaataaagagaacaagtgagggacggatccttaaagaaaactaggacagccccccagctgggcgccccccgagcaggccaaacacgccagcaacaacgggagtgctttccaattcttcgcccccgttttctactttcacagatgaatgaaagtgcacaactccagagcaggatgcctttcctgtctcaatcccgcccgcgctccgggagcggagctcgtggttacgatccccttcgctcacacctcttccctcacccacggtttgccacctccggatcaaacagaaacgggttccttggccgttaggaagttgtgcatacaagtctagcatcctttctcagactttctcggcccgccttttagaacgtgagcgggttggccctacagggatttctcctcgcccccgtcagtttattccccaccccaccctccgttcccctttcttggagtgtgaaccacctctcccttcttgggacgcttagggaccgttccattcacatcttttttggtacaaacacagaatgcggtctgcacccggcgcagtttcgtaaggggtgtaaaggtgagggcaaggaacaaggaattccaaaggccccgcaccctcagcatctcccgccatttccctgacgagtttcccggatgtaaccccttacccgaggcggtttagacaccagacggtggcggctccctttggtgcaggaggagggaactcgactctggtccagcctccgccgcccggagtttccggcgactccaaattgtgccccacctccgaggccatgggggaaaaataaactacccagtagatctccttcactttgcactcaccatcagttccagcttatcgacctccgcctccatgttgaatagttgacattccgcagaccgcggcggcgcttaagccgcaagccgtactagcacggagggcctccattggacagctgtcactcaacatctcgcactcattggctcctccgttccaccggctcccgcccattggagactgggtaacgcccctctgcatgagacacattttcctgttgggcaaaggcacaaaacgccgcaggaggattggctgctgtgcaaatttttttttccattggctgccccctcctctctactttcaattttgtagttagggctctgcagagaagagcttgagattggtgcaattggaagaagagccaaccaatcacaccagagcttccaccgacagcagaggggacgtaacacaccttctttcccctccggctttccttccccttctctcccgccttctccttattcataccagaagcgcctcagctctgattggctggagctctgtgctatctcagccaatcacaagccgggctgtgctcctacaccatccgaagagcgaatcgtgcagagaccgtgtctacgattggcctctccctgacaaggatttaattttgaatttttctttatggcgtgggagaggccacagcccggactccatcgactcccccggctcttagactagtaagtgcaggaacgattatttctttgttatctgagctcgcgtcttgagtagctgggcctgttgctgcttgtgtttttatggtttagggaggtggggactttggctggacacgaaggggaaatggaaaggaggaagggga

SEQ ID NO: 18629 - DNA, 2300 bp, Homo sapien
atcctgctggactgtgagcttttcaagggtgtgacaaatttcattcatctttgttttcccagcatctagaatacagcaggagctaaataatgtttcattcaataaagaatgaaaagaagcattcctgctaagtgttagctagcaagtgttattttagttaaggaatatattctaatattgtcaaattctcttggttagggaggtttttacttcttcatatcataccacatcttcatatggctaaaagatgggtctaaagctattttccaataggaagatgcaataaataatacagtaagaattacagtcttttgcaggagttggcgctgctgcttctgtgaaaactccacccaatgatatgaaaagttctttgcggccgagcgtggtggctcacgcctgtaatcccagcactttgggaggctgaggctggtggatcacgaggtcaggaaatcgagaccatcctggccaagagggtgaaaccccgtctctactaaaaatacaaaaattagccgggcgtgctggcgtgcgcctgtactcccagctactcaggaggctgaggttgtagtgggccgagattgtgccactgtactccagcctaggcgacagagcgagactccgtcacaaaaaaagaaaaaaaaaaaaaagaaagaaagagaagaaaagttctttgttctggggtactttcaaagctgtagcagcaacggaaatgactgttgcatttcattgccatcttcctaaaacacatttttatggaagtctcttgcgctcctccacaaatagccttcaattacttaatttccattagcagtccaattgattcttcttgaacacccatagcactatttctgggtacttgctttttttaaattttatgttttatgcttttttttttttaagcattgctgtttttgttctgtcttgtttttccaaagagactgcagctccctaaagtctcatcccgcacagtattaggcactcagtaaacaggacacgcatttaaaattgacactctaacagcatgccagacaatatcgagtaacatagtaatattcccagtcaagaaatgtaccaacttaaactttaatgtgcatagaaatcactcagggaaatcttgttaaaatgtatattctgatttagtaaatttgggtggagtccgataatttgcatttgtaacaagcaaacaagagatgcggatgccgctgatctgtggacttgcattgagcagcaaatatgtaaagaaatgttcaaaaggaaggcagatgctttgctccaaaacgtatcttgcgaagtgttaattaaatagaagtatggttaagatgaagccaggccgagcacttcttccccagccccaaacctccccttcctcctttccatttccccttcgtgtccagccaaagtccccacctccctaaaccataaaaacacaagcagcaacaggcccagctactcaagacgcgagctcagataacaaagaaataatcgttcctgcacttactagtctaagagccgggggagtcgatggagtccgggctgtggcctctcccacgccataaagaaaaattcaaaattaaatccttgtcagggagaggccaatcgtagacacggtctctgcacgattcgctcttcggatggtgtaggagcacagcccggcttgtgattggctgagatagcacagagctccagccaatcagagctgaggcgcttctggtatgaataaggagaaggcgggagagaaggggaaggaaagccggaggggaaagaaggtgtgttacgtcccctctgctgtcggtggaagctctggtgtgattggttggctcttcttccaattgcaccaatctcaagctcttctctgcagagccctaactacaaaattgaaagtagagaggagggggcagccaatggaaaaaaaaatttgcacagcagccaatcctcctgcggcgttttgtgcctttgcccaacaggaaaatgtgtctcatgcagaggggcgttacccagtctccaatgggcgggagccggtggaacggaggagccaatgagtgcgagatgttgagtgacagctgtccaatggaggccctccgtgctagtacggcttgcggcttaagcgccgccgcggtctgcggaatgtcaactattcaacatggaggcggaggtcgataagctggaactgatggtgagtgcaaagtgaaggagatctactgggtagtttatttttcccccatggcctcggaggtggggcacaatttggagtcgccggaaactccgggcggcggaggctggaccagagtcgagttccctcctcc

SEQ ID NO: 18630 - DNA, 2300 bp, Homo sapien
tgacttgatgaaaaagtcacatcagagcactcaatttggcagagcttttctgccgaatgtttactgacattcactgtccgagattctatactgggggtacacgtgtcctctgccgtaaggcatctttgagtccaagagacattttgaggcctgaaaatcataggaaactgcccatgagctcactcatatttccaatggtgtccccagtttcagggagtccatggattacctaaggccagcccctccagttcggctaagaaactctagtctatatattaagttttgtatcatatgtattgctctgaactcagaaatttccctaccatttatggattctatgaataaaatatcgcatgtacaaaaagactaagtcgaaaaatctcagctgtgcacagtggctcatgtttgtaatcccagcactttgggtggccaagggaggaagattgcctgaggccagcagttcaagaccagtgtaggcaacatagcatgaccccatctctaaaaaaacaaaaccaaaccaaattagccaggtgtggtggctggcaccttgttccaactacttgggagactcatgcgacaggaagatcgcttgagcccaggacttagaagctgcagtgagctatgatcttgccaccgcactccagtctaggcaacacagcaagacgttgtgtcaaaaaaaatttttttgataaaaaataaaagagttggatgacattcagagaccatccaaaaaacctgtcagttcctggccgggctcagtggctcacgcctgtaatcccagcactttgggaggccaaaggaagtggatcacttgaggtcaggagtgtgagaccagcctggccaacatggtgaaaccccgtctctactaaaaatacaaaaaattagccaggcatggtggcgggtgcctgtaatcccagctactcaggagcggggactggagaatcacttgaactcggggtgcggaggttgccgtgagccaagatcgcaccattgctctccagcctgggcaacaagagcaaaactccgtctcaaaaaaataaacaaagaacctgtgagtgagttcccatatggcttcctaatgggctgtggctctcctaggagtctcttgctcatgggaaaggcccaaactgaatgaggaagcagatcccattgctatggaagtcccattggtaggaagctctgcttttctggagttcaaatttccattcatgacgctttaaaccgccagagctgggtgggtcctgacaaaacagtttgctatctctctcctagttaacaggctttcatatattagaagatcaatgttctgaccccattaaaagttctcttttgtggaatgaaaagctctgatttaacccatcttcaaacctggtttgcatattcttctctcttctggcacaccaccatgcctgattaagttttttttttttttttttttttttttggcagggacagggttttgccatgttgccgaggctagtcttgaactcctggtctcaagcaatctcctcacctcagcctcccaaagtgctagcagtagaggcatgagccaccacaccaggccaaggctattattctgacttaggggttttttatttgtttcattttgtttttcctacagagtcggtatttcttcaatagatatatctcaaagcagaagctggctaacatcatcctggaacttcaattttcctaacatcagagatgcaataaaactttggacaaatagagtatggtctatatacagctggtgccagaactgcataacccaggtatggatgtgacatccctgttttcagtgctatagtttttctacacacttggtgtttatatacatatgtgctcaagtcagtccaaccctcaagctaaacttagataagatgaaattattgagtcaagtctgcctttgcttctataaaaacatacatcaagtcactttctggttcctgttttcttgtccttatcatattactcataggactcagaattgtttattattaatttcagagtttagaagtattgaaagacaccatctttccatctcgtatctgccaccgagaactttacagtgtaaaacaacagttttgcattttggaaagtaaattatgcaagctccaggaagcactgaaggttggtattgtcaaataaaaagcaaatctggaattaggtaaggagacactttttttgaaaagactattgcaatagggaaaatgctcaagtcataagatttatatctcaaacattaagcgaaaaagttttctttgttagcaaggaatacaaagggtagaacaaactgggtt

SEQ ID NO: 18631 - DNA, 2300 bp, Homo sapien
acaaaaaagtatatagtaagtatagaaaatatatgaattaaaaaatcaatgccgagcgtgatggctcaaacctataatcccagcactttgggaggccggggtgggcagatcacctggggttggaagttcgagaccagcctggctaacgtggggaaaccccatctctactaaaaatacaagtttaggtgggcgtggtggtacgtgcttgtaatcccagctacttgggaggctgaggcagaagaattgcttgaggagacggagacagggaataggagatggaggttgccgtgatcccagatagcaccactgcacttcagcctgggtgacagagtgagactctgtctcacaaaaaaaaaaaaaaaaaattttaggccggaggcgaggtgtggtggctgacacctgtaatcccagcactttgggaggccgaggtgggtggatgatgtgaggtcgggagttcgagaccagcctggccaacatggtgaaacaccatctctactaaaaatacaaaaattagccgcccatggtggtgcacctgtaatcccagctccttgggaggctgaggcagtagaatcacttgaacctgggaggtggagtttgcagtgagcttagattgcaccactgtactccactctgggcaacagagcaagactctgtctcaaaatatatataatatatattattatgtatatatataatatatattattatgtatatgtgtaatatatattattatgtatatatataatatatatattatatcataatcccttccctcactaagtaatcactgacctacttggtacaataaatatttccttgcttttagtaagaacacacccctaaatgcaatggtttattttgcttgcttttgaactctatagaaataaaatcaggcctggcgcagtggctctcgcctgtaatcccaccactttgggaggccgaggcgggcagatcatgagatcaggagattgagactatcctggccaacatggtgaaatcctgtctctattaaaaatacaaaagttagctgggtgtggtctcacgcacctgtaatcccagctacttgggaggctgaggcaagagaatcacttgcaccggggagccggaggttgcagtgagtcgagatcgcgccactgaactctagcctggccacagagcaagactgcatctccaaaaaaaaaaaaaaaaaaaaaaaaaaatagaattatagggtatatacacttttgtttctgatttctttcaatcaacatttattttaaagattcagtcatgttattgtatagtgctatagataatttttttagattcaaagatttttattttttacaaaaccccagaataataaacgttataattatacatttaaatctggttgtaagttttatcctggcagctatttgtcaatatgccttctagttagagaggttctgcaagttataatttacatacaaagatatttcgcaattttttttttttttgagacggagtctcactctgtcgcccaggctggagtgcagcggggtgatctcggctcactgcaacctccacctcctggttcgagcaattctcctgcctcagcctcctgagcagctggaactacaggtatgcgccaccacgcctaatttttgcttttttttttttttttttttttttttttagacggttttcgctcttgttgcccaggctggagtgcaatggtgtgatctcggttcactgcaacttccgcctcccgggttcaagcgattgtcctgcctcagcctcccgagtagctgggattacaggcgcccgccaccacgcccggctaattttcgtatttttagtagagatggggtttcaccatgttggccagcctggtctcgaactcctgacttcaggtgatccgcccgccttggcctcccaaagtgctaggattacaggcgtgagccaccgcagtagtcccagttttgttttgtttttttgttttttgtttttgatatctcaattcctacagttgaggaaacaaactaggagaggagaagaggaggcggaactcaagtgacgggaaagcaggaactgaagaagcggaggaaggatttcaaaattggacgaaagccggtcggttttactaacggaccggaaggactctagagaacgctctgcactatggctggtcccgtgagcttgcgagaccttctaatgggagcatcagcctggatgggctctgaaagtcccggagggtcccctactgagggcggagggagcgcggctggcggaccggagcctccatggcgggaggatgagatctgcgttgtgggaatctt

SEQ ID NO: 18632 - DNA, 2300 bp, Homo sapien
cacacccctaaatgcaatggtttattttgcttgcttttgaactctatagaaataaaatcaggcctggcgcagtggctctcgcctgtaatcccaccactttgggaggccgaggcgggcagatcatgagatcaggagattgagactatcctggccaacatggtgaaatcctgtctctattaaaaatacaaaagttagctgggtgtggtctcacgcacctgtaatcccagctacttgggaggctgaggcaagagaatcacttgcaccggggagccggaggttgcagtgagtcgagatcgcgccactgaactctagcctggccacagagcaagactgcatctccaaaaaaaaaaaaaaaaaaaaaaaaaaatagaattatagggtatatacacttttgtttctgatttctttcaatcaacatttattttaaagattcagtcatgttattgtatagtgctatagataatttttttagattcaaagatttttattttttacaaaaccccagaataataaacgttataattatacatttaaatctggttgtaagttttatcctggcagctatttgtcaatatgccttctagttagagaggttctgcaagttataatttacatacaaagatatttcgcaattttttttttttttgagacggagtctcactctgtcgcccaggctggagtgcagcggggtgatctcggctcactgcaacctccacctcctggttcgagcaattctcctgcctcagcctcctgagcagctggaactacaggtatgcgccaccacgcctaatttttgcttttttttttttttttttttttttttttagacggttttcgctcttgttgcccaggctggagtgcaatggtgtgatctcggttcactgcaacttccgcctcccgggttcaagcgattgtcctgcctcagcctcccgagtagctgggattacaggcgcccgccaccacgcccggctaattttcgtatttttagtagagatggggtttcaccatgttggccagcctggtctcgaactcctgacttcaggtgatccgcccgccttggcctcccaaagtgctaggattacaggcgtgagccaccgcagtagtcccagttttgttttgtttttttgttttttgtttttgatatctcaattcctacagttgaggaaacaaactaggagaggagaagaggaggcggaactcaagtgacgggaaagcaggaactgaagaagcggaggaaggatttcaaaattggacgaaagccggtcggttttactaacggaccggaaggactctagagaacgctctgcactatggctggtcccgtgagcttgcgagaccttctaatgggagcatcagcctggatgggctctgaaagtcccggagggtcccctactgagggcggagggagcgcggctggcggaccggagcctccatggcgggaggatgagatctgcgttgtgggaatcttcggcaagacggctctacgcctgaattccgagaagttctctcttgtgaatacggtgtgcgaccgacaggtctttcctctctttcgccaccaagatcctggggatccaggacctggaatcagaactgaggctggcgccgtgggtgaggccggtggagccgaggaccctggggctgcagccgggggttcagttcggggaagtggagctgtcgcggaaggtaaccgaactgaggcaggctcccaggactacagccttctgcaggcctactacagtcaggaaagcaaagttctgtatcttctcctcacctccatctgtgacaattcacagcttctccgggcttgtcgggctcttcagagcggggaagctggaggtggactctctttacctcatgcagaagcacacgagttctggaagcatcaagagaagctgcagtgcctcagtctcctttacctattctctgtctgtcatatcttgcttctggtccatcccacttgttcctttgatatcacttatgatcgagtattcagagccctggatgggctgagacagaaggtcctgccgctccttaaaacagccattaaggattgtccagttggcaaagactggaagctaaactgccgaccttgcccacctagactccttttcctctttcaactcaatggagccctcaaggtagaacctcctcggaaccaagacccagctcatccagacaagcccaagaaacattctcccaaaaggaggctgcagcatgccctggaggaccagatctatagaatcttccggaagagtcgtgtcttgactaatcagagcatcaactgcctctttactgtgcct

SEQ ID NO: 18633 - DNA, 2300 bp, Homo sapien
atacccatgagatgtcatacttttgtgacaatgtctctcatctctgacaggattagaattgttcccagggaggagatttatgacagttaagttcttctgggagcctttgattttaggttgataagggattccaggaacttaaatgccttcagctcaatatatatatattttttaagagacagagtcttgctctgtcgcccaggctggggtgccgtggcatgatcttggctcactgcaagctccgcctcccaggttcaagccattctcctgcctcagcctccctagtagctgggactacaggcatgcaccactatgcctggcttatttttgtatttttagtagatacggggtttcaccatgatggccaggctagtctcgaactcccgacctcaggtgatctgcctgtctcagcctcccaaagtgctgggattacaggcgtgagccaccatgcccagcctcaaaataatttttatgccacagtggtttattctagacgcttccatagtcatcaggtgatattttgaaaaatagaactatgtgcgtcagttgatctacaggaaatagtttaacagccctaaacagaacacatgattttttaacctgtaagtttcctcagaatgttgctctgttgcccaggctggagtgcagtggcaccatcaaggctcacttcaacctcgactaaaggaatttttttttttttttttttttttttttttttttttttttttgagacggagtctcgctctgtcacccaggctggagtgcagtggcgccttctcggctcattgcaacctctgcctcccgggtccaagagattctcctgcctcggcctcctgagtagctgggatcacaggcacacgccaccacccctggcaaatttttgtatttttagtagagatggaatttcgccatgttggccaggctcctgacttcaaatgatctgcccgcctcagcctcccaaagtgctgggattacaggcttgagccaccgtgcccagccaccccctattttcttctaattttctttttatagttgagatagggtcttgctctgtcgcccaggctggggtgcagtggtgcagtcatagctcactgcagcctcgattttccaggctcaagcaatactcccacttcagcctcccaagtagcgtgactacaggtgcacgccaccacgccgggcttattttgttttattttttgtagagatggggtttcgccatgttgcccaggctggtctcgaactcccgggctcaagcgatccacccttccttcccggcctccctaagtgctgggattacaggcgtgggccaccgcgcccggctgaatcaggattttaaatattcactctgcttttctagtcctgtgggagatatggtcttctccgtaaaatttctccctcagtcctgggtgatttatttcttttgcattgaagtgtgtggcttttcgtgtgttagcagtttgtaatttgtcgggtaaaaggaaaactagtagggccttctggaacttagttatctgtctttctaggacttttaggtaataccttataaccttaacaaagtttccttattttatacggacttgtaagtcaacaaatacttctacagtgcctattgtgtacaaagaatgaggattgcactttcacaatgaaatgagggaggacaggggccgatctctcagatatttgactgataaaccagtaccttttctagtatatgcgaccataggggaaattctctctaggctagataaacggaggagtttatttagtgttttagcaagctttatcgcctccataggtacaaattatttgcattttctagagcaagggataagacgcgccctggaatctttcctttttgatgtggattttccaattaggaaaggctgcccgtgaatagtcttttctgcttgagtgatggccaacacactggcaggtttgcaagctttctcttcatgagggtccgtccacagagctaggtgacaaacgctcagtccaggatctctgcaggttcctacacgggagccggagagcgcctgcgcgtcggagcctctttgttgctggggcgctggggtccagctgcgcgtgcgcagtaggccggcaccgacaagtgcgctgcaccagtggcaccggctgggggcgagccgacctcgagcagccgccgccgccgccgtcgttgctactgccgcagcggagttcagagggcccggaggtgggagacttcccacacggtgactgagatgtcgtccactgcggctttttaccttctctctacgctaggaggatacttggtgacctcattc

SEQ ID NO: 18634 - DNA, 2300 bp, Homo sapien
gattctcctgcctcagcctcccgagtagctggggttacagttgtacgccaccacgcccggctaatttttgtatttttagtagaggcaggatttcaccatgttggccaggctggtctcgaagtcatgacttcaagtgatccacccgccttggcctcccaaagtgctgggattacaggcgtgagcaaccgcgcccagcctagaactaactatttaaaataaattatttttatgtgatttttaaaaatatatattatgtttttattaaaagttcactgtaagcataatttttttttccagtaaatatagcagggcctggcatggtagctcacgcttgtcattccagcactttgggaggctgaggtaggagaaatgcttgtgcccaggagttcaagaccagcctaggcaatataatgagattctgtctctacaaaaaatttttaaaaaattagctcggcatggtggtgcatgtctgtagtcccagctgtttgggagtctgaggtgtgggatcacttgagcctgggagatctaggcttcaatgagccatgatccagccactgtactctagcctgggtgacagcgagaccctgtctaatatatatatatctatatatagtacacataggagggcaaggagagagggaatggagatttgttatttaatggtataaagttggccaggcaaggtggctcacacctgtattcccagcactttgagaggctgaggcaggtggattgcttgagcccaggagttcgagaccagcctgggtgacatggtgaaacctcatatctacaaaaaataccaaaaaaagtagctgggcatggtggcacacacctgtagtcccatctattacaactcaggaggctgaggtgggagtattgcctgagccagggtcgaggatgcagtgagctttggttgtgccactgcactccagcctgggtgacagtgagaccttatctcaaaaaaaaaaaaaaaaaaaggcatagagttgttttcacttttgcaaaatgaaaagacttctggactttggttgcacaacagtgtgaatatacttaaaaccaccaaactgtacatttaaaaatgattgacattcaattttgctgggtggcggggggtgggggtggtgagaaaatagatttaaaaaatgattaagatcttaaatttggctggtgcggtggctcacacttgtaatcccaacactttgggaggccaaggtgggcagatcatctgaggtcaggagtttgagaccagcctggccaacatggtgaaaccacatctctactaaaactacaaaaaattagctgggcatggtggtgtgcgcctgtaatcttagctacttggggggctgaggcaggagaattgcttgaactcaggaggcagaggtttcagtgagccgatattgtgccactgcactccaacctgggtgacagagtgagactccgtctcaaaaaaaaaaaaaaaaaaatcttaaattttgtgttatgtgtattttagcacaattaaaattatatatatatgtatgtctatcttgtatttttaaagttttgggatattgagcatattttccaatagaaacttaaaatggtggttagattcttggattagtttacaaatcctatttatattttatatttgattcataacatagctaaaagatgacacatttgcaacagtattgatatgtatctatatatactcatatatagagatatatagctacatattttttaaacaggagtaaagttactgaatattccatatattcatcttttcattttgttccattggattctgacatgtttagtctttagctgtaagtactgtaaccaacgcagaagtggtattgcaaaagcagagacggtaatagagaaattttagtaacatcattatactatgaggctccaagatcaatcctgacccatttatcaaggactagccactattaagtgtggtgttatttgcaaatgaatattcataatcccaggaatgcttgtaatagatttcaacacattgtcttgggaaatactgagagttgtgaagtaatcctctttatttgagcagttgtaaaaataacatgtaatattgcttgtgtcttttagaattcagatattcctatactcttcagtctacaacgtgtcctgctcattcttggccttttcttcactggcctcttgccctttgtgcccattcgagaacagttttttgaaatcccaatgccttctattatactgaagtaagtggttacccttttattttaaaatcaattatcaattacagaaagactaagataaaagctcactaa

SEQ ID NO: 18635 - DNA, 2300 bp, Homo sapien
acaagtgatagaaaacaatgttttaaaaaggaaaaaaaggtaacattactatgtgctgcatgaatatgtacaattattgtcaattaaacacataaataaaataaattccaccttaagacaaatttatttttgttgtatattccttatcctctccttgtattttatctttcaaatcaaaaagagcattttagatccggagggaccatttcctctacctgcatatgtcaccctgtaaatatcacattttttttttgttttgatttgtttcactttgttttgagacggagtctcgctcttgttacccgggctggagtgcgttggtgcaatctcggctcaccacaacctctgcctcccaggttcaagagatcctcctgcctcagcctcccgagtagctgggattacaggcatgcaccaccacacctgtctaattttgtatttttagtagagacggagtttctccatgttggtcaggctggtctcgaacccctgacctcaggtgacctgtccgccttggcctcccaaagtgctgggattacaggtatgagccactgtgcccagcactatcacatttcttaagatttgctttcctaattctgtctgattccagggtcaaagtccttgactatagcacaagcagtttagcttaggaagaccatggcttattcattttcctcttcctccactctactgccttcttagctttgggcttagaagtcaaccaataaaatctcagtgcctgcaacacatggattgatatcattgtccccaaacccattttgcaatctgtgatcaacttttaaattagtcatagtgcttattatcaggaaaggggagtatttcatgtccagacaaaaactaatttgtaagtggatccacagctgaagctgcaatataacaattcatttatttaacaaatatttattgagaccttctatgtgccaagcattgttctaagctctgagataaggcagtagccaaaacaaattccttatggttatggacttatatcctggtgggaagagacagataaaaaactagcaaatatatcaatatataaaaaaaatgtcagctagtgatatgtgctatggataaaaatgaaactggataagggtgagagataatgagaaggtataaagggctatttcagatgagtacctttgttttctttctttcttttttttttttttgagacagagtttcgttcttgttgcccaggctatagtacgatggcccgatcttggttcactgcagcctccgcctcccgggttcaagtgattctcctgcctcagcctcctgagcagctgggattacaggaatccgtcaccatgcctgctaatttttaaaatatttttagtagagacggggtttcaccatgttagccaggctggtctccaactcctgacctcaggtgatccgcctgcctccacctcccaaagtgctgggattacaggcgtgagccactgcacccggacttctttctttcatttttcatttcttaattatcaagggttgtggcattgtaggaagtaagaaggtgctgggcgaggtgttagagccccggcatcgaaaagtggtcaacccgctgtctggtaagaagaattgactgacaacagtacaggtttgataaaggaaagttgtattagaaacaaagaacattgcagaagaagccaacgaggtgcctcagcaagaaaggacttggattttccttagaaatatttatggaccttaaggcagaagcttgagggtaatttggaccatattagtaggccatgataaatgattacgtttgtagctattttggtgccttaatgtcagcaaggattgcataatgattttccatatgacattcctgagatgtatagaaattctagctacttagaaattgttttgaaagagacctggaaccagatgcagactttagatacaaaggaagtttaattacttctaaattctccaggtaaggaatttttgtccccagtgcctgcttgatcatcaggtgatctttgctctcctcagaagggattggattctggatacattttgaaggtagagctgacaaggttctttgatgggattgaggtataagaaaaagggagtatcggccgggcgcggtggctcacgcctgtaatcccagcactctgggaggccaaggtgggcggatcacgaggtcaggagttcgagaccagcctggccaacatggtgaaaccccgtctctattaaaagtacaaaaattagcctggtgtggtggcatgtgcctgtaatcccagctactcaggaggctgaggcatgagaatcgtttg

SEQ ID NO: 18636 - DNA, 2300 bp, Homo sapien
cagctcaaaatgcttggctctttttgactgggaggaggcatgatcaggcttaacactttttttgttattggccggctggctggttttattgtctcctgaccctaaggtctggggcctcttccagtcccctgcatacacacagcaggcctgaaggggtcctcagagctccctctgaaaccactgtatcaggctagtcttctttagctaacgttatcttttatttaaacagaaacagtagccaccagtcttgttacataacataccaatatcctagggtgttaaactaattcagcatctactgttaggaagtggtgatgtggcaacacaaatattcgctcacacaatattgcggaaacgttgtaacaaacatgactttctggccctacttagaatttcagagctggaagggacttgagatcatcctatttcaaccctccttgttttaaactgtggaaacctaggcctggagagacaaagaaacttgctcaagaagcagatcagggcgagacggcaagctcttactaatctaaagaatccatcacatcttagattaaggattaaatgctaaacagttcttgtttgtgattcctctcatctgaaagcattccccccccccccccgttttagactctccaaactagtcagttgtgaaccaggacatagcctttgtttacactgaaactgcaaatctgaggctgatatgtcagccccacaatactgaggtatttggggtgttttgttgtttttactaaccttggtgactggattcacatgcaatagatattaactgaatacaatttggttgaccaagcatattttaaaaacagctgggtggagatgcaggtgagccagcattctgggtgtacgtgcaaaccagtgtgtggaaggcggagagtcagctgcacctcctgcagcacctcacatcctgatggctgcacagtaaaacactagtttccttggaggaagagttcccagaggaactgcggaaccccagtgtcttgagcgaaaggcaggacctgctttgttcaccttgtccgtgccaacattctttatcaaactgtcctgttttcctgctgggaaactgccccactccacccacctggtgcctccctggtttcctgactgccacgaggttattttttaacctgctcttccttgaaaagcaccaccccggtgacccagaacgtggactcctcccctctggtcactcggaccatcccactctaattaccgtcatctgcctctgaaagtcatggaaaattagcagcaatggggcggtcttcaattccactaagcccctttcgtacttttaattcgccgaaattactagcagggcagagagaagaggggaaatgcctggcttctgagcaaggcatgggtgggctgggtgcaactagcactatcattttcttttaattttattattattatactttaagttttagggtacatgtgcacaatgtgcaggtttgttacatatgtatacatgtgccatgttggtgtgctgcacccattaactcgtcatttagcattaggtgtatctcctaatgctatccctcccccctcccccctatcattttaaattcaattacccggggcctgagggccacttctggtaacttaggctatggcttagggcgaggtttaaaacgtaagaaaggaatgactatcttgagcctccagggagatgcactgcaaatccccccgccccaaaatacaacccaggttctgggaatcccagccctgccctggggacaaaccccaaactcaaataaacggcctcctcctaggcgctgagagcccacccagctttggcactctgggtccctgccctccggcaagttgccgggacgggcgggaccctaaccagccgctctcccctagcccaggctgggccgggccgaggggtgggggagtgggcggtcggggaagcggggggcggagttccgtcctctgatgattggctctgcgcggatgggctgcggctgcgcccggccaacccgcggcgtgttgctatgtgctgagccgaggggataggtgcgggggcgcgtccatcacggggtagcccccggcccggacccggagggatgcggagtggcggccgcggcggtggcggagactgtggctttaagagcgtgccgggagcccgagccccagccgggccgcgcttcgccgctgcgcaccccagcggagccaagccccacgctggccggacagggccgcctgtcgccgggtaagtgcaccggagtgcggcgcgggccgggcgcgcgtgggcgtggggcgcgctgtcagctcgggct

SEQ ID NO: 18637 - DNA, 2300 bp, Homo sapien
ctcctgaactcaggcaatctgcccaccttggcctcccaaagtgctaggattacaggtgtgagccactgcattgggccaaaatctgtattacttgactccccagagcttaactgttaataccaactattgcctggaagccttaccaataacataaacagttaattaatacgtattttgtatatgtattatatactgtattcttaaagcaagctagagaaaataaaacattaagaaaatcataagagaaaatatatttactattcattaagtttaagtggatcatcataaaggtttccatcctgttcagtaggctgaagagaaggaggaggaagacaaagggttgatcttgctatctccagcttagcaggtgcagaagaaaaaatctgcctacaagtggacctgcgaagttcaaaccagtattgttcaagggtcaactgtatcagaaagatttgactactatgagctaagtggtaatcatcattggtctgaaatgatgatttttagaaagtgactttattatatcactgatagagatgccctatactgaaatactgagattaccaataccttgcctgtaccacaaatgtatttttgccattttgctttctgtttctataatattttgaattcctaacatgatccagaaggctgggagatgctcctaatgaaagagagaaacctggaatgttctcctatttaccagattgcttcctctcatacccaggttttgagatataaagttgttacaaagttccaacttatttggtatcattcaaaatctgatgagcttgcattttaagaagtgttgatcagttccatttaaaagcagttggtatgagttcactttattttttgaggtggaatctcgctctgttgcccaggctggagtgcagtggcatgatcttggctcactgcaacccctgcctcctaggttcaagcgattctcctgcctcagcctcccgagtagctgggattataggcgcgtgctaccacacccggctaattttttttatttttttatttttaatagagacggggtttcaccatattggccaggccggtctcgaactcctgatctcaagtgattcatctgtcctggccccccaaggtgctggcattacaggcatgagccaccatgcatggccatgacttcacttcaaatgagcacagaaaaatctgggggcccaacaaccttatggtacatcttttgaagcctggtcagacaagagggtctttaggtgatggtgaagtgacagttttgagttgtcttctttggtagtaagtgttggctaattctaacagcaggaacaattgaggagtccaacaaacaatcttgttcacattgcaatgattttgttacagttgacactaatttaaaaattggcaggctctagaccagaaagacctgcccccaaagtaccttttctgaaaaagttgccctgcctcagatgctgtgtatctgttgaacttttcagctactgtggtttccaaggaatgcacctctatcaaaaatgagcttaattcctaaggaagtcaattattattcctccattccagcaaagtcaacaaatattgacagcccaccttgaatcactgtgctgggccctggatgtagcagtgttttaatatttcgactcttgtgggggggggctttacaatctagctgggcagaagaggaaacatgcaaataaattaaaatgcagggtcctatgagggaaatgaacagccttggtgacctaagttttgataataacataactaaaagttcggctccacaactcagtagctgtgtgccttggacaggtcatatcagattaggaaaggtgagaatgagttgaggaacgcagcactctgggatcatggttccagctccgggcagagggttacatcgtgtcaagtgtgtgaaggcagaatagcctgcagagaccactgtggcgttgaaaagaggtgtcgtcgcgaccttcggcgccggagaggcgaaacaagagggggtcttcgggccctcaggtatggctcagccgcccaaggcgaagcgcacgtggcagttggcgggaaatccctggggggtggagcctcggctcgaggtccggccgccccgtaccacgtcatcgagcagctccccctccccttgctacaagtcgcacgcgcggaagtaaacacctctacgtcatcagggcgcgtcctcgtctttcccctcccatctcctcagatcggtggacgtgctcgcctccactcggggccaggtctatgtcccggtttcccgcagtcgcgggcagggcgccaaggcggcaggaggaggg

SEQ ID NO: 18638 - DNA, 2300 bp, Homo sapien
acctccactccctgcaacctctgcctcccaggttctagtgattctcctgcctcagcctcccaagtagctgggtttacaggctcctgccaccacgcccagctaattttttgtatttttagtagagatggggttggtctcaaattcctgaccttgtgatctgcccacctcggcctcccaaagtgctgggattacagggtaaaccaccgcgccctgctgtatcttctgttctactttctgtctctacaaatttgcctactccgggtacctcattcaagtggaatcacacaatattttgtacttcgtgtcactcttatttcactgagcatgttttcaggttgatttattttatgtgtttgtattcttgaagtcaatggaaagctgaattaacaaaatcagccaattaacaaaatcagcaagtgttaaagcatcttctatattcatggcaccaacaaatttaaaattttctttttaatagtgaatattataatttacattccctgtggatttcttaatcctgtccagctacaaaacgatccctggtttacatatgttccctaatgggaatggccatcaaatgtggcacaagatgactccccaaaatactatctttttgccttcctagtggtcactgttttttctttcttctttcccttgttttatggatgtcgttgctgttattcctaccctttggacctttttctcaccctgttttaatgcttgttgagtaacacatttttatttggagatagtgtcttactaagtcacccaggctggagtgcaatggcgtgatctcagctcactgcaatctccgcctctcaggctcaagcagtcctcccgtctcagcctcccaagtagctgggactacaggcgtgacccaccacacctggctaatttttatatgtttattagagatgtggttttgctatgttgtccaggctggtctcgaactcctggactcaagtgatccgcccacctcagcaacccaaagtgctgggattacaggcgtgagctaccgtgtctgacctaagtaacacattttttaatagagaagaggagagagtgggtggaaagtatgcacctaccattttctcatttcccccgaatcctctaaaataggggctgagtcagaaagataaatctcatttcactgttgtttcccacaacttgcttacccaatgccattgcatcatcttgccactttcctctgactttattgtatttccttattggtgatttttgttgctttgtccaagaatacccaagtgagttatttgtccctttttctgtatagacagcatgttttgtaacttaccatcattttgtatacataagttagactatttttatgtacccttttgtttagtcagagtggtttgatcacttaatgtttgtacctcttgaggaaaaatttagttgggaaaatagtggtgaattcctgtgacactgctgtttgaacattaggagacagcaatcaaatatatgactgatggatgtttactgaaacatattctgggagacccaaatcttaccaaattcagtgtcattattttggatgaagcccatgaaagaactctaactacagtgagtattttaatttattattatttttttattagcaagtagtttgtttgggtagctttttattgtgtagagaattgcctcctcttactttttaatttaatttaattttttagagatggagtcttgctccatcacccaggctggagagcagtggcacgatcatagctcactgcacccttgaactcctgggctcaagtgatcctcccatctcaacctcctgagttgctggtactgcagacgtgcatcaccatgtctggctaatttttaagaatattttttgtagagacagtgtctcgttttgtttccctggcaggtctcgacctcctggcctccgaccttggcctcccaaagtgctgggattacaggtgtgagccactgcacctggctcctacttatattttaatgtattaaaataggaattccttggttagaatagcagtgtatctaaaatagtttggctgttaagtgtacttgtgacttactagaaatttacttttctttcaggatatcttatttggtttattgaagaagctatttcaggagaagtctcctaataggaaggagcatttaaaagtggtggtaatgtcagcaactatggaattagccaagctctctgcattctttggaaattgtccaatatttgatatacctggaaggctttatccagtcagagagaaattctgcaatttgattggtccacgagacagagaaaatactgc

SEQ ID NO: 18639 - DNA, 2300 bp, Homo sapien
aacttataaggagtggttgacagaattggtaattggaggaatcaaggggggaaattaattgcaatattttagaataagtagtttttccttttatatagaagaagcagctgactggtttggtattgctctagcacaagggtggcaaactgtggtctaatctcactgactgtttttgtaaataaaatgttagaatgcagccatacccatttgtttatgtgtggctgctttcactgtaatagcatggttgagtaattgtgacagagaccatatggcctgcaagcctaagctatttactatctggccctttacggaaaatgtttaccaattcttgctgtagaagctaccaggacctattggtacaaattgtaggaaagctggcagtagaacagtgtaagagattattgtttgcttattattttttctttttataagagatgggatcttgctgtgttgcctaggctgttgtcaaactcctgagctcaagcagtcctcctgcctcagcctcccagagtgctgaaattataggcgtgagctaccatccttggccttgttttatttatttatttttaaatagggttatcaatcctggaatggacattttatataaggtattggaccttttgtcttctattggatttttttcaaggtgagaagttggagtagatgatttttcatatccagatttaaggtggaaaaaataacccagtgcagatgatatcaagtaattatttttcctgtttttaaaaaatatatattcatgtttgatgatgctatcccttttgaatattattgttaattgttaattttattatatttattaatagcgcattatggtgatgtaagagaatgtccttattttcaggagatgcatgccgagatagttgtaagtgtgcaatggcattgtatttgcaacttattctgagatagtttggcagaaaataagtacatacacatgtacacatatgtgacacaaatatggctaaattaattgaatatatttccccatttatatgaaagcattttgtccggccgggtgcggtggcttacgcccgtaatcccagcactttgggaggctgaagtgggtggatcacctgaggtcaggagtttgagacaagcctgaccaatatggtgaaaccccgcctctactaaaaatacaaaaattatctgggcatggtggcaggtgcctgtaatcccagctactcagcaggctgaggcaggagaatcacttgaacccaggagacggaggttgtagtgagccgagattgccacactgcactccaacctgggcagcagagtgagactccgtctcaaaaaaaaaaaaaattaaattgtatttaagaagcattttgaggctgggtgcggtggctcacgcctgtaatcctagcactttgggaggccgaggcgggcggattgcttaagcacaggagttcaagaccagcctgggcaacatggtgaaaccctgtctctactaaaatacaaaaaattagctaggcgtggtggcatgtgcctgtagtcccagctactcgggaggctgaggcaggagaattgcttgaacctgggagatggaggttgcagtgatcagagatcgtgccattgcactccagcctgggcaacagagcgagactccatctccaaaaaaaagcattttgaggtactattgaacaatttataattttcagtactaattaatatttctctactattaatatttctctactatttttataaaagtttggaaaaaaattatggactgcagaaaagagtagacttgacaggctgtgaaggatgggtggggcaggattaggataagtagactggtgagagtatttcagctaaggggagtcaaaaagaatcacttcttgaagtagaggagtgtgattcagaaaaaaattatttcctcttttgccaaatgctgatcatgatcatataatttttttttagaaaaagaagatgacttgaaaaatagaaataaaaccttttaaagaaattttcgtcatgtctatataaaatcctaccatgttcaaggaatgcctctcacttcatatctcatttaaacacacaggtttccctatttggatccacctaatgagagacttattttagaagctcttaaacaactttaccagtgtgatgctattgacaggtaaaaaaaaaaaaaaaaaatcacaatcaaaacagatattgatctctttttaaacagggctctaaatacctttctctaacagtagaaaataatttctttaaattgaatggattgttagtctttcatcacaattctgattgaaaaaccagccgggcgc

SEQ ID NO: 18640 - DNA, 2300 bp, Homo sapien
gcatggtagctcacgcctataatcctagcactttgggaagccgtagtgtggggatcacttgagcccagcaagtttgagaccagcctgggcaacacagtgagaccttgtctctactaaaaaaaaaaaaaaaaaattagccaggcgttgtggcacacacctgtagtgtcagttactcagcagggtgaggtagaggattgcttgagcctaggagatccaggctacagtgagctgtgatcacacaacttcactgcagcctgggtgacagagtaagaccctgactcaaaacaaaaacaaaaaaacctacccattatcttctttctccagcctctggaaaccactgttataatttctctgtttcgttatgagtgttttctgtttgccttatcttaaagttcattaatcttttctcctgcagtgtctagtctaatctgccattaatcccatctagtatatttgtcatctcaggtgttgtattttcatctctagatgttggatttcagtctttaaatttttacattttatttttcaggtctctactttttgaacatatgtaatccagctatacagaaaattataataaaatataattagatctgtgtcagttctaggttgattttgatagatgtcctcattatggattgtgtttttttgcttctttacatcatacctgataatttttcagcggatgccaaacattgtgaatttcaccttgttgggtgctggatatttttgtgttctagttacttggaaatggtctttggtctttcttgttgggtcttgcttgcatgatttgttaggtgggatcagagcagtgctcagtgcagggctagttattcccctctactgaggcaaggcccatctgagtactcttcctaacatcacatgaattactgtagtgtagtattctcatgtggcttataggaacaggcgccattactagccctgtgaaaacaccatgcccttacttatccttttaagaggttcttttcttgggctggtagtttcctcacattcatgtgctaatcactactcagctcaacacttgaggaggaccttctgcatctctctggagttgtgtctttgtgcacttctcttctctcctgaactcttgtcctgtgaattctagccaccttggtcttcctggactcccagctttctctccctaacccagggagttctctgagttccatttgggctttacttccctgtaccttggtctgcagtctttatcaaggctgaagttggggcagttgttgggcgtactgcgtttatttcctgtctctgtcctttattgcctgatattacagtgttttggaaatcattatttcatgtattttttccatttttttggtttcaggtggaagggtaaatctggtctctcttaatctatgttggccagaaacagaggtctttagaaatgtggatttttcaaaataaaagattatttcaaattgtactatgagatttaccactctctacatattctttttatagcaaagtgatttcccaaaagagacctttgaaggccctaaacatgaagtactacgaagatgtctttgtgcgggctatttcaaaaatgtagctcgaaggtaagcaataaagacttgagagatggatcaagatataatactgtatttgactataatattggactatttaatattaaacattgaagatttgatttaagctctgtgatgattatgacatgaattacagtgacgagggagagctacagtgacgagggagagctgcagtggctcagaatgtggtattagagctcaagtagggtaggaggggtatgtttgtagggtggctgtccagcatgggttatcttcacttaaggcaagtaacaagagttttctttcagagaggtggccctgtgtatagtgtgaaagccaagtaggttgagcatagcatccctgaggaagggtagcttggcatggagtgctagggcttgagcaaggtggggaggggttatttggtttggggcatcagtcagagtgtagtgaggaaggcatctttatagagaaaggggtaacagtgatggtgatggagattcattaaatacagaggaattgaacacataactctgtgagtgataatggtgaagggagttagaaatagcgaaagtgagaaaataggaatgatctctgtgctgttggattgaaatttcagtgtatcatgatgaagttatgggtttcattatagatggatgcatggatggacactggaataaaaatagatgttagtgtgtgtatatagaatgtatttgtatgtatgtaaatatttatatgtatata

SEQ ID NO: 18641 - DNA, 2300 bp, Homo sapien
cctaaattatttctcaaaacagtgtaatttctatgtgtgatgacgtagcagtcactaacaacctcagcgcactttttggttagatattccactccaaatagctaaaatcaactgcttttgggattctaaatgtacttaaagttacagggtctgtatgaaaatgccagacactaattaaattttggtggcccattcatgatacggctcttttatctccggattctgagattgaaaaggtgacttgatcaagctattgaattactgtaataaaacaattactcccttagaattttaatttagaatttgtctacttccaaaaagggtttaaagcagttattactagactggcattaggttatttcaaatgttgcggaacagaggatcttcgtgtatttagcttaacaatacaaaaagaaattttgcaagcataaatattcactcttacaacatggtggcaaggcttttctttgcagaacaatctttgccctcttacctgccagactcttctctcatgctcagtatgtgagacagttaagtaaagggaaaaacactaaaagcaactaaaatgattggcaaacttctcactgtaacctaaactgcttagcatacaaaactatcgtctacccaatagggttttatgtcctttaactgaaaaggacactaaaaataattattgtggacttgagcttttctctttcggcggggcggggggtggggggggagaatcacctctcttacaaagataaaaggcacagaactaacgtctttcatcctttattgtattggtgcgattatgaaatattattatggcttatactttagcaagaaagtaccagaaaggttattattaatcgacaatgaatgccgttgataccttcatgctctttgaagacaggatgctccggctttgaagcgctacatttctacattgctaacctacaggaacctatgttgaggtggtcccaccgaaatacacggctaatagttcatctctttcctccaggaaccttcaggtttttttttgtttgttttttttttgagacggagtctcgctctgtcgcccaggttggagtgcagtggcgcgatggaaccttcgggttttactaagcatccttaccctaattatctaaatctttgagacgtaaattatttgatgtggctaaaaatcctcctgctagaatttaggtccaatcctttaatgttcggatactcaaattctttaacgaaactgatcactgagctaggccgacacaagtccgccaaaatgtccgcagaaacgttaagaaaagctgtcataaggccagcttgaaagacatcataaaaggccttcgctgtcctttgagttaattatctaacacccgaagagagtgccagttctagttagaatccgcgcgtcaggttctccaacagtcagaagggcttgtgtgagggcagggaagattttaaaccccgtttcaggccccctccctaggctgtaggaaaccacccactctgaagcccggcgggggaggagtgctgcagccagctgccgagggagcgctctgcggcgaggccgtttccctgagtcacggagagggcgggaggctgcgcccgtctgcccccgccacgtcctcctgtgaggggctcagtcgaaacaggcagcggtcgcagggaaacgaagcggcacccgtcatgcctcaaggtggcccaaaagcctcttcactcccaggagacgccgcatttccttaaaacgagctctccatttctggcagcaatcagccgacccttccccatcagtatcacgtgcacctggaagtacgtgggtgggacctaaagcgcccacggaagtgacgtcggtcgccccgagtcgcatgatgtggcaaaatgaaaaaaaaaaagtggggggagaaagagaagactggcgaaagtgatgagtctaaaaaagtagtccctccggttcctctgtttccccccatgtggcgtcaggaagcgaggcaccgggcgcactgcgccccgaattcctgcgcccgccgcgcgcggcgctccgtggaggggtacataaggcggagggggtgaggcgactgggcggagttctgtcgccgggatccttccgctgggctcagccgtttccggagtctgcgctgcgcccggttccgccattgcggctctcctggcccctggagcctccgcccccgacccgagctctttcgtctgcctgccagtttcctgcgtccccggagaggatcctgctgagcccagcctcccccctccccttctcctcctctcccttggagagcccgggcagccactgccccgcagcc

SEQ ID NO: 18642 - DNA, 2300 bp, Homo sapien
aaatgaaggtgacaatggaatatatttgctcattttgagtagcatcatggtagaaaggaaaatggttacagacttgtagggttgtgctttggaggcagactgccagtactgttaatacttcttgttcctaatccttaggtaaataaggattttcttcaagttctgaagtaagacggttttaaagattattgctgaaagaataggaaccagatccattaaagccatattttgtcacattaaaaaactctgcagtgtgctattctggaaaatgtctcagatgtttaatctgggcttatctattgattatgtcaggttttcaacttgtctcaacttcctcatttattaaaacaatatttcctggcaattttaaagttagactacagtatgtttttgtatttgtagtataatatttagccccttaaccccttacaggcactcgaatattagttcttcccctccaccctggaagagtttccctttgtccacttgagttgaatatatgtgccgtactaaaggagaaaaactaccatctacccagttattgaagccaagatcttgaagttacaccagactctctaatttctcattttctgcatccgtcgatttctggagttcctcagtgatgcacactgggggtctcagggatgacagtttttcatgaccctaggttgaaactgggagtcatagaagacgaaaaaacgagaattggattgggagttgactctgttgcccaggctggagtacggtggtgcaatcttggttcactgcaacttccgcctcccaggttcaagcaattctcctgcctcagcctcctgagtagctgggactacaggggcccgccaccaggcctggcgaattttttttgtatttttagtagagatggggtttcaccatgttggccaggctggtctcaaactcctgacctcaaataatctaccctcctcagcttcccaaagtgctgggattacaggcgtgagccatcgtgcctggccaacttgcatttatttctgattagctgctcatctgagaaaggtggcttaaaaaaaaccaccaaagtggacagactgaagctaaagactgtcagtatatatgctctgcttggcaaacagctgactttggatagatctcattatttaaagatgaataataagggggaaaaacgtgtagagagaacatggtttacaaaaacccatctctttctccagtctctgcaatattctatatttggtcatattgaactatgaaaatctaaggcaggtttctttattttaccacagatatcctcaggaaagagtctccttattaaaagccttactgaatctccatagtattgtgtcctctcacagttgcttctgttctgagcaccagaatgctgtttggcaaaggctgctgtaggcttgaaatcaactggattagtgagagacaaattttacacatctaaaattctcctgtgtatggcctcacagttggaactgttggatgttataagcagatgatttaaatatcccgtgaaaagcagtccattcgggcatgtttctagagatcataattttttttttttttttttttgagatggagtcttgctctgtcgcccaggctggagtacagtggcatgatcttggctcactgcaacttctgcctcccgggttcaagcggttcttctgcctaagcctcccaagtagctgggattacaggtgcccgccaccatgcctggctgatttttgtaattttagtacagatgggatttcaccatgttgtccaggttggtgttgaactcctgaccttgtgatccgcctgctttggcctcccaaagtgctgggattacaggcatgagccaccacacccagcctagagatcataatttacatagaaagataagagaaaaacaactctcctgataacgcaaatagatttgatgttacaaaactgcaccattatgattgctctgtaatggatttttgaaaagcattgtgaaatggagatgactttccagtgctgatgtcaaaaatgcatatgcagagtttaaatataattttgtgtgttttgttttttgagacagggtcttgctctgtctcaagtggagtacagtggcgagatcatggcttaccacagcctcaacttcccaggctccagccatcctctcacctcagcctcccaagtagctaggactacaggcgtgtgccaccacacccagccaatttttgtatttttttgtagaaatgggctttggccatgttgcccaggctggcctcgaactcctgagcccaagcaatctgcctgcctcggcctcccaaagtgct

SEQ ID NO: 18643 - DNA, 2300 bp, Homo sapien
atactaacagcttaaatgtaattgctttgggtaggattgattttactctaaccctaatttcaaacttggatacttaggtcttaattgagcatattggaaacttggatcgggcatatgagtttgctgaacgttgcaatgaacctgcggtctggagtcaacttgcaaaagcccagttgcagaaaggaatggtgaaagaagccattgattcttatatcaaagcagatgatccttcctcctacatggaagttgttcaggctgccaatactagtggtatgacttcttaccttatgtattgaaacctcataaaatgattaagctaagcattaagatatctgtctattctgaattttagaagagttggatactgcatggtttcttttagtgctccatcttagtccagataaaaagaggctgtattttgtgaatttgtaagttcacaaaacttacaagtggggaagatgaatcttctgtttttgaagtctcataaaatcctgatagtgctctaatcttaaaactttaaggaaaaagaattcatctattcatttggtccgtgataatacagaagtgaaatattgcacggtttacatttgtcattatccatgtttccttgaaaaggaaatgaatgcaattttcatttacttgggtgaaagataaactaggatgttagtgtttggatatattttttctttttctatacttaggaaactgggaagaactggtgaagtacttgcagatggcccgtaagaaggctcgagagtcctatgtggagacagaactgatattcgcactggctaaaacaaaccgccttgcagagttagaagaatttatcaatggaccaaataatgctcatatccaacaagtgggtttccttttcagatttaagaaaaactagttgggctacttgattagcttggtaggatcaaaacatcataactgaagaattccaaggaaaaatctataggaaaacaaattctttctcattgtgaagatatcaatttgaaaagaggattaagctcacactaatatcttgctgaatgtgggttacctttttttttccaggttggtgaccgttgttatgatgaaaaaatgtatgatgctgctaagttgttgtacaataatgtttccaattttggacgtttggcatctaccctggttcacctgggtgaatatcaggcagctgttgatggggctaggaaagctaacagtactcgaacatggaaagaggtaatctaaacccaagtttgagtgaagaattaaagaaacgctatttaaacattagtttaaataactagccatgttttacatttgagttcacagaaaggaaatgtttattctaggtctgcttcgcctgtgtagatgggaaagaattccgtcttgctcagatgtgtggacttcatattgttgtacatgcagatgaattagaagaacttatcaactactatcaggtattaacgagacttttatatgacctgagatcttttaccatagatattcttatctttaactgcacatttctcttgttcaggatcgtggctattttgaagagctgatcaccatgttggaagcagcactgggacttgagcgagctcacatgggaatgtttactgaattagctattctatactctaaatttaagcctcagaaaatgagggagcacctggagctgttctggtctagagtgaatattcccaaggtaaccagtcattgtaacacagtgaagcaactgtgtagttaaaactaatgcttcaaaatatcttattctttttaaggctgttagctagactcatatctaaagcaattaagtctttcttatgcaggtgctaagagctgcagaacaagctcatctttgggcagaactggtgtttttgtatgacaagtatgaagaatatgataatgccataattaccatgatgaatcatccaactgatgcctggaaagaagggcaattcaaagatatcattaccaaggtgtgtactttcttcagaagataaaggattcagaaggagaaagctcattaggaagtaactgacttatgtatggattttcccattgtaggttgccaatgtggaactatactacagagcaatacagttctacttagaattcaagcctctgttgttaaatgatttgctgatggtgctgtctccacggttggatcacactcgtgcagtcaattatttcagcaaggtaaagtaataattttaaaccaaagcttcatagcaaggaattaggacatacttcgataacttttgtccctgggacttcaataatgtgctatatttgtaacaaactctttattt

SEQ ID NO: 18644 - DNA, 2300 bp, Homo sapien
tacctaaaatttgctctcctatttatcagttggcttgtccaaggatgtcaaattcaggcaccttttggttgctgcttccttcattggcttgtctccatcccaatataaatgaaacaaacttacgtctgttatcaaattgtggttagaaaagggtgggaaggtaaaggagagttgaaacaaatttaaaagaatttgggtgggggacaatgccttgggattatgttgaaccaaactggaatcaccactggaacttagggcaaacctgagtaaaatgcattgtgtgtgagacccttcagcagctagtaagcaaggcagttagaaagcgtgtgtgtgaaaaacaggtaattgaactgcagtgttatgcattgttttaaatgaagcatgtacaacagtcattgcaattacatcatactatttttgaaactcttatagcattgctgtgggctgtgtgtgtttcttgagagcctgtatagcaagtcatcttcagacctcacttcttgcttcagtacttttgcctttttttcatgcacacatacaccaaaataactgactgcatgttacttttcctctgcagcacattgcagtctttgtggaaaagccttttacattttagtgaattttcagtagtacagatggaactgaattcattgacatgcttacctgtaatttttctttttaaatccaaggatcagaaactttagttacagctcttaacaaaagcttgtgttcttaaaagacttctctgctttttttttgagcaatctaaattggatcagtggaaacaaaaattgaaagtccctgtgccagaggctgtcccattatatagaagaatcaaactttttgcttagcttgatgctattccttcagaattcttccccctacgcccaaacttcctatgtgtatgccagggcattgtgatattgccagctcttctaagtcttccatgtgtttctctaataggacttctgtgttcaacatctgattcagaccttaacttttaaacacatgttcacttcagattcttttccctggaagtccggaaatgtattatgcagtggtggctttttggttgtttcatttttcttcttttttcttagaagttactaatatacaggcatccatgtatttttctttataacttctgtagctctttcttgaatactggttagttagcaaaaccccatctgatccttgatggcacagagctgtgctttaagttctataactaataatttttgttctaagtgtggatgccaaaaaatggacatttcatatggtacttatactacataatagtctttaatttgatattagggtaatttgtaacacatcatttagactataaagtaggataatagtgtataaaagtaaactaatccatcttcctaggctagaaattaaaccacatttcatctgaaggagcctacttaggcttacttttctcaaactttcagttccctaacaaattaagatggattagactcatatttatggtatttaatatgaaacaattaaatataaaacagtgccctaaccttaatggcctatgtgaagactgaaagatacttttttaatagtttcaaacagaaatgaggtgctgccttaatctttttaggacctggtttttagaaacttttccactgaagtctacaatttttttttttgagtgatttttcataatttgcctttttgaagaacatgcagtgagcattcataaagtgtttccccctgcaccttggccccccgtctcatgcagcacatttatgacattgaaaaccaccagtaatagataacattgagatttgaaatttagttttacttaggtataatgacagaccaagtataaggctttggttgagagaccagcttttaaatattgaaagacaaatatagtgtaaaaggcgcaatggaatttgtatagtgaaggagattctctagtcccagggttgtaatgtcacttctgtctaattcattacagaattacagaatcaaatcatgttagccctagaagaaactgcagatcattttgttcaatcttctcattatataggaaaggaaatttgagggccagtgcaatggtttgccaaggtcacacaactagttagtggaaggatccaggcattctaattcctttctttcactaatacatttggcctgctctacagaattacttctgtctgatactatccactttgaagagtagctagcatatagtagccatttacttttggctcaattaaaagcaaacatttttgggacaaaatcaggctttcctgattacttcttagataacagagccc

SEQ ID NO: 18645 - DNA, 2300 bp, Homo sapien
tccaagtagatgggactacaggtgcatgccaccacaccctcctgattttttaaaaattttttatttttgtatggacttggtcttgctatgttgcccaggctggtctggaactcctggcctcaaggagttgcttgaggtcgaggcagcagcatctcgagtccagttcaaaaccaatctgggcaacccagtgagacctcatctttacaaaaaatttaaataattagccagatgtggtgccacatgcccatactcccagctactcaggggataaggtaggaggacacctcaggctgggaggtggaaattgcagtgagccatgatcgtgccactgcaccccaggctggacaacaatgcaaaaccctgtctccaaaaaaaaaaaaaaacccaataagatcaaaaacaggacagtgaaagttccaaaagttaccaagtttatttattatgtcccatatctcaatggagtgtctaatcataaaaatgctaaaattaacacatatttttgttctttaggatgttctaatctcatattaatctgatcagattatcatctaactcctctaaaacaacatgtctgtctctttttctgtacacttacgacaagcgtatcaataagcctagtgcctaagactaaggtaaaacaaataaccattctttgtctcataaataattctgggcaatgacagcagaacaaaataagtacatcctataaaatcttcttcttggtgccttctaattcccctgcctcagtaaacccatttcagtagtgctcttgatcccattacctccttctgcaccatgctccacccgttaatctttttttaagagacagggtctcactatgtggccccctatgtggcccaggctgttctcaaactcctgggctcaagcaatcctcctgtctcagcctcccaaagtgttggattacaggctgagccaccgcgccgggtctgcagtttacaaccgaaaaaaacaaacaaacctttcccaaatcttctctgacccttaagccactgccccactttccctgtataacatattcccagagtctagtatggtgcctggggtatgtcagtaaggattaatacctctctagttaatctctttgtgtgaaaaaggggggaaattttttctttcttttttttttttttctgagacgaagtctcactctgtcgcccaggctggagagcaatggagcgatatcggctcactgcaacctccgcctcccgagttcaagtcattctcctgcctcagcctcccgagtagctgggattacaggcacgcgccaccacgccggctaatttttgtatttttagtatagatgggttttcgccatgttggccaggatggtctcgaacttctgacctcaggtgatccgcccacatcagcctcccaaagtgctgggattacaggcgtcagccaccgcgcccggccccaaattttcgactatattcttagaaaccaattctttccacgcagagctcgacagctcgaaacgctggggatattcataagtgcccagctgagggtatgaggcctgctcgctattttatcaatttcggagagagcgcatcgatactgcctgcctggaggctttgctgggaactagaaattctgagtcttcccctccccagcagcctgttcctttcctccaaaggacggttcgcagaacaggaacagagggctcagcggcccctgggcggaagacagtttataaaggagaaaatgaagaaggtgggtaatgcaacgaggtgaaaagaaacgttcctactggcgagaaaatgaataatgatattggtctccttcgccctgtaaggagccaaccaacctacctacagtacctcctttcctcactcgcgccttcccttcttctgggcagcgaacacgtttctatcgcgtgagctacctcttccggggttcctgggtgacaagttccggatcaagaatcacaaagcgagcagtcattcttcctcttgccacacccacagggcccgcactaagagcctaactgaaatcccgcgaggatcaaccgagctcgccgaaaggagggaggaacgtatcccttctggaggctgtctcagggggcagagggaccggaccggaagtgacgtgagcgggttccggttgtctggagcccagcggcgggtgtgagagtccgtaaggagcagcttccaggatcctgagatccggagcagccggggtcggagcgggtaggtaaactaactcagggaattggggaccgaagcctgaggctgtcctcagagcttggcgtcttccggagctctcccacttaggcattgcgg

SEQ ID NO: 18646 - DNA, 2300 bp, Homo sapien
ttctacactgacatatctccagttctaagagtaaagtgataccatattttcatatttaataatttcatgtttactagctcatttaatctttgtgacagttgtatgaaagaaagtgagcagaatttttatcaacacaatctagaccagctcagaatgttaggtaacctatcagccattacttaacaagtgttggagcccagacttcaatccaggtcttctgatttaaagtttaatagttaccaaaatcctaaaaagtggtgattcaagccaaaagcgagaagttggaaaagtgagaaaaactggataatcagtccttcaattgaacataaagaagataagatcagatttggcagttatataatcaagaagcaaatttaccgaatgttaaactaatgatacatctatcataattccatatctcaaattttgtcaccttgtttcaaagccaagcgtgaacaaattttcaaactcaaaataagaaaaatatgtaaactgacaaactgatttaactagctataggtaaactggtaaaaggcatcatggttctatgtatattttcttctggaatgtgactcatagaaattaaactgtattaatcaattgtaatcaagtaggatatatccctcaaaggaaaaaagtaaccttcagtgccttaagataatgtaggcaaagtagtaaaatataaaatttctactcgagagagtcacttcatacctacacaaatcagtcacatttgtctaggtaccaccatccctcttccacagtaaaaacataagctacaatgcatacaatgatgcctagtaagtaagtttcttcctttcatcatctatgctaagaatacacaactaaaatcagagctaatgacaatacaattactaggtagtagcaactggaatattaaattctatcatgacaacaccagaaacacttgtacaagcttcttcaaatgatcaatgtaatctgtccacaaaaatctctgacaagccccaaagtagaaatgaaagacgttaacattaggataaggagcgatgctgccaaaacacatcaacagtggccagtctacgtgtattattagatttttacatggagttgcaggtaaataaaagatgattgtgtaaaatcttctggaggtcataagtaatctagcagtgtgacacagggccacatatggtttctggaattttagagattaagtcgaccttcacgttttactgcaaatacctccactgtaataagatatagaggtcggggttcaggggtttggaaaggcagacaactctttttcattaaagcagtgaaaaatctgagaagttcctctccaagggctctgcggagcgaaggcccattcccttggctaccctgtaccaccagagctttagatggcacttgcacgcctggatttcgtttaggagcgaatacatctagcatcatgcgccagaggttcgggagagcaaaaaccaaactgacagatcctgagaaatagctcagtcatcagcagggaagaccttctccacttactccaaggtcctggacatcccgggactaagaggttctctaaagaagcctagcaaggcttccaagtacgcggagaggagaacgaacagcccggtgtctgggttcaatgtccgggtgaccaaccatgagaaggtgtcccaaataacctggctaccgccagcgtgagacatccagggtgagacatccagtcagcagcgtcctaaaacactgctggaagtcggaatcacagtgccccagatccgcaatgcctaagtgggagagctccggaagacgccaagctctgaggacagcctcaggcttcggtccccaattccctgagttagtttacctacccgctccgaccccggctgctccggatctcaggatcctggaagctgctccttacggactctcacacccgccgctgggctccagacaaccggaacccgctcacgtcacttccggtccggtccctctgccccctgagacagcctccagaagggatacgttcctccctcctttcggcgagctcggttgatcctcgcgggatttcagttaggctcttagtgcgggccctgtgggtgtggcaagaggaagaatgactgctcgctttgtgattcttgatccggaacttgtcacccaggaaccccggaagaggtagctcacgcgatagaaacgtgttcgctgcccagaagaagggaaggcgcgagtgaggaaaggaggtactgtaggtaggttggttggctccttacagggcgaaggagaccaatatcattattcattttctcgccagtaggaacgtttct

SEQ ID NO: 18647 - DNA, 2300 bp, Homo sapien
tagccaggcatggtggcgggcacctgtaatcccagttacctgggaggctgaggcaggagaaccacttgaactcgggaggcagaggttgcagtgagccaagatcatgccactgcactccagcctgagcgacagagactccatctcaaaaaaaaaaaaaaaaaaacctttggtctgttaacagtgtcactatgaacattcctgaattgctgagtcatatggtaactgtattttaccttttgaggaactgacagattgttttccaaagcagctgaactcttttgcattcccaccagcagttccgatttctccacatcctcactaacacttgttattattatcttttttttgtttcttttttttttttttttgagacagagtcttgttcctgtcacccaggctggagcgcaatggcacgatcttggctcactgcaacctccgcctcgggggtccaagcgattctcctgcctcagcctcccgagtagctgggattacagccacccaccaccacgccaggctaatttttgtatttttagtagagacggggtttcaccatgttgcgcaggctagtcttgaactcctgacctcactatctgcctgccttggcctcccaaagtgctgggattacaggcgtgagccactgcgcctggtctattatctgtcttttactataaccatcctaacaggtatgagattgtatctcattgtggtttaatttgcatttccttgatggctaaagatgttagacatctttttatgtgcttattagcaatttgtgtatctttggagaaatatctgtgcagctcctctgtccgtttattaattggattatttgctttttattactgagttgtaagagtttgcaggcccgatacacgcttcttatgaaatatatgtgatttgtaaatactttctcctgtgggttgtatttattttcactttctttttttttttgaagcagggtctcccttttgcccaggctgtaatgcagtggtacaatcatacctcagtgtagcctttcactcctgagcccaagcaatcctcccacctcagcctcctgagcaactagaactacaggcatgggtcatcactcctggctaatttatttatcttatgtaggatgggatctcactgtgtagtccaggctgggctcaaactcctgacctcaagtgatcatcctgccttggtctcccaaagtgctgggattataggcatgagccactgcacccggccccagttgtctttttataagtgtctgggcaagttttaatattgtattaaggactcagcatttattgtattaaggactcagcattttagccttttattgaagtgatgtgctttttgagtagaaagttttgctttactaacacctgaagaatgatacaatcacaggcaatctggtttttatatgttgtattacattaaagtaaaagcactgatacctgtagtatgaaatgaagcatgttataaataaagtacatttaactatcttaaacatttcaagtttggtttttttttttgcccatatcattttattcagtagaattgtttcctaaataaaactggtctatgatcttagatttatgtatcaacagttgcagcatcttttgtagtatattctatttttatataataatgttaaagggaatatgaaagaaaactgtaaaaaggtaaaatgataagattaattttgagtacacagtagtatgatatttaattgtaaattagaaggagttagactttatagtgtgttaacatttggagttactagtgcttgatatcctccttctgtggacagattacctccaaatttcaatctggaagatccctgaaataactactaggaaaaggtttacaactatatggcttttatatttttactatttgtattagaatatctatataaattgttcaatagaataactaaattgttcaaattttggttataaaagaaaaaaagtgtaaacacatcatacatatcatgtggcttattactgtgatgttattcctgtattcagttttattcagtcacagctacacagcagaagtttgtaatgtattgctggattttattttgctgtattagctcctcaagagttactgatctatgaaatggcagagaatggaaaaaattgtgaccagagacgtgtagcaatgaacaaggaacatcataatggaaatttcacaggtaaattttgatggtttgcagggaggagtgctatgggtttaaatgatatacttttcattggaataaaatagagatatattacttcttttatttttaatcttatattatcttc

SEQ ID NO: 18648 - DNA, 2300 bp, Homo sapien
gtatggtggctctcgcttgtgatcccagcagtttgggaggccaaggagggcggattacttgaggtcaggactttgagaccagcctggccaacatggtgaaaccctgtctctactaaaaatacaaaaattagctgggcgtggcggcctgtgcctgtggtcccagctactcgggaagctaaggcaggagaatcacttgaacccaagtggcagaggttgcagtgagtagagatcatgccacagcactccagcctggacaacagggcgtgtctgcatctcaaaaaaaaaaaaagaaagaaattagccagggatggttacatgctcttgtagttctagatacttgggaggctgagatgggataattttttgagcctgagaggtcaagacaaggctgcagtgagctgtgattttgccactgcacttcacatttcactccagcctgggtgacggagtaagaccctaactcaaaaaggaaaaaagatgtgggatggggggtgccaggtgccgtggctaatacctgtaatcccaacactttgggaggctgaagtgggcagatcatttgaggtcaggagtttgaaaccagcctggccaacatggtgaaaccctgtctgtactaaaaatacaaaaatcagccgggtgtggtggcgcgcacctttaatcccagctactcgggagactgaggtgggagaatcacttgaacctgggaggcggaggtagttttagtgagctgaaatggtgccactgcaccccagcctgggcgacagagcgagactccgcctcaaaaaacacaaaaacaaaaacaaaaaaaataaaaaaggagaaaatagcctacaaaagagagcttttagaggaagattaaaagaagttgctcactgggctcagtggctcatgcctgtaattccagcgctttgggagactgaggcaggagaattgcttgaggccaggagttcacaaccagcctgggcagcatagtgagaccctgtttaaaaaaaaaaaagaagttgctaatgggtacaaaaatacagttagaagaaatacactctagtattcaataatacagttaggaaattatagttaacaataatttattgtatatatcaaaatagtaaaagcggccaggcgcagtggctcacacctctaatcttagcactttgggaggttgaggcaggctgatcatctgagttcaggagtttgagaccagcctggccaacatggtgaaaccccgtctctactaaaaatacaaaaattagcctggtgtggttcgggcatctgtaatcccagctactcaggaggctgagacaggagaatctcttgaacccgggagggggagtgagccgagatcgcgccattgtactccagccctggtgacaagagtgaaactctgtctcagaaaaagaaaatagcttaaagagaagaattgtaatgttcccaacacatagaaaaaataaatgtttgaggtgatagatatcccatttaccctgatttgatcattacacatgtatacacatatccaaatatcacatgtacccccaaaataagtacagctatgaaaaccccaaatattaaagtatctgattaaaacctcaaaaataaagagaactttctatactctgtaaattccctctgctagcagtcctgttcgcctgttaacccatttatgccagaggttgcaattttttaaatttttgcatgagtgaaaaatccgaccttagcaataaccttgagcaataggatataaataactcccacatgcttagcgttccaataatggaacactaggcataagtgggttaaatatattcaacttatgtatttaaaattttgtcagtcagggtacctgtacctttcatgagagttccttcacttccgtagttttgaaaaaacctctctatcctgtatctttctctctgaattacatatctgtggttaaattgaaaagtgtttgtgtttgtttcttttgccattgcatagttactctgttcatggacccaggcatgaagaatctataatgaacataatccggaaggaagtggagaaatgtgactctttcagtggttttttcatcataatgagtatggctgggggcacaggatcaggattaggagctttcgttacacagaatttagaagatcagtactcaaactcattgaaaatgaatcagattatttggccttatggaactggtgaggtatggacatgttaattgaaaagtttatgttttatgttctttgcaatagaaataaatatgggtaaaagattgctctcaccacccaggtgcggtggcttatgcctgtaatcccagc

SEQ ID NO: 18649 - DNA, 2300 bp, Homo sapien
ttgcactgttacaattgacatgctgagccacaaactaggtgtattacctctaaaaacaacctgtaatcgaaaaaaatacgctttgagaaccactacattactaataagaacaaataaaatgccatgtatgttaattatacatcaataaaaagtcttttttcccccctgagacggagtcttgttctgtcacccaggctagagtgcagtggcatgttctcggcttaatgcaacctccgcctcccaggttcaagcgattctcctgcctcagcctcccgagtagctgggattacaggcacgtgccaccacgcctggctaatttttgtattcttagtagagatggggtttcaccatgttggccaggttggtcttgaactcttgacctcgtgatccacctccacctacctcagcctcccaaagtgctgggattacaggcttgagccaccacgcccggcccaaaaagtcattttaaaatgccacatacgtatataatattggagatagaacagctgtgttgtctaaggagctagtcattcaaggaagttctcatactctctacatggttttgggatttgtgatttactgtacctgaatccattcatacacagctcaatagtttccaaaatctgatttgtaatcacttttttcctaaacatatgtttaaaacaaaacattctcctcagttgaggagtgataaaagaaaaaaagaggctgggtgcgtggctcacacctgtaatcccagcattttgggaggctgagttgggagaatcacgtgagcctggctgttccagacctggtcaacatggcaaaaccctgtttgtacaaaaaatacaaccattagcttggcgtggtggtgtgcgcctgcagtcccagctactcgggaggctgaggtgggaggatcccctgagcctgggaggtccaggctgcagtgagccaagatcttgccaccgcactccagcctgggtgacaaagtgacatcctcctgtctccagaaaaaaaaaaaattaaaattaaaaaaataaaaacaagacaaaacaaatgctgattgaagaaattagtagtaccacccttcacaccacatgaacatgtagaacacagaagtgtgctcaacattgtacattcaattaacattaattttctctcttctaaataatagcttacgctttctccactagtctagcctggtaactttagtaagacctgtaagaaagattttgtgtttagctcaggtaggacagcaagaaagatgcagcttggagaaagaaaaccagatgaaatattaaccgggcgcaatggctcatgcctgtaatcccagtactttgggaggccgaggcgggaggatcacctgagcccagggattccagaccagcctgggcaacacagcgagaccctgtctccatttgaaaaagaaagaaagcaaaagaaacattagagcagttcctcattatttttacctaggaaaagacaagttttgataaagacttcacatcaggtctatgcagcactggaaatgagccgtgggttgtgagacagactctgtgcttaaaatgtcaaaccggcaaagtaggtttattattatcctcattttacagataaggaaactgaggctctgaaaggttattgacttttccaaggccacagaactagtaaagagcaaagccaaaaggtcccccgttccccacgggccccaggagttctccacacgtaacccgactcaccgccagacgccgaccagcgcttctgtccggttcaaacttcggaccaacctactcaccatgcgcatgctcactttcaaaacgaaaaacttactgagaacaaatgcgcatgttccataaacggagagttttgttgtgtatatattttttcctattcagaaagattaattacgcatgttcaatttcaatttacgaacttcagatatggtacgcatgctcactgtccaccgaacgctccagctgacaatgcgcatgctctagtcctccaagcgcgacttcggctggtgttttgcgcatgtttctgccagcgcctggatcctgccgatagttctgcgcatgtccactgcccactgtttggcttcacggaaccctgtacgcatgctcctacgctgaactttaggagccagtctaaggcctaggcgcagacgcactgagcctaagcagccggtgatggcggcagcggctgtggtggctgcggcgggtccgggcccatgaggcgacgaaggaggcgggacggcttttacccagccccggacttccgagacagggaagctgaggacatggcaggagtgtttgacatagacctgg

SEQ ID NO: 18650 - DNA, 2300 bp, Homo sapien
caaaacaaaacaaaaaaaccagaaagaaagaaaagaaaagaaaagaaaagaaaaagcacacaactcaatacccactttctaaaccgtgtgattttgatttagtcttatttgattatgaaaagaacagtattggtcaggtatggtggtttatgcctataatcccagcattttgggaggccgaggctggtggatcatttgaggtcaggagtccgagaacagcctggccaatatggtgaaaccctgtctctactaaaaatacaaaaattagccagatgtggtggcgcatgcctgtaatcctagctacttgggaggctgagccatgacaatcgcttaaacccaggaggctgagattgcagtgagctgagatcgcaccattgcactccagtctgggtgatagagtgagacccaactcaaaacaaaacaaaagaaacaaacaagaagaacagtattattttaggccacttagtttcttaaagtgttcaaaattctttatatacatcatctcaatcttttgtcaacagtagggcaggtgccagaggagaaaaactgagggtgaggcaagggaaaggaagcccctgtgtaattagagcaaacatctgacgtcattaacccatgtattcaactagacattggaatttagatgctaaactaccaagaggttatcaactgatgatcatttggtccaggatcagtgatttagtatgacaacatttttgaacttcaggtgcaatttgtcattttttgataaatttatctagggaaaaaaaaagttattccataaagattaacaaaccactaagccagcagggtgaaaccaagctatgcattaggaaatacaattctaaatttagcaccctaaattacagcaaggaaagccctcataccaccattcacaagtctctgttcaggcaacttatttctggcaagctaaatcaaggctgtcaactggtttttggtttttttttccacctcaaaattacattaattattctgaaaaaaatacagacatcttcaacttggggaaaggttacaagtgccgtgtgtccttataaatgcttattttaaaaagtcacacggaagggggtaaaaaaaaaaaagcaaacaaacaaaccctggaagattggaagatgcagcagagcccccttgctcccgaaataaaactcctggtggctgtaacagcagcggcagtgctactcccgacagaagttttcagctgtcacttctaacagctgagcgcttcctaggagagaagcgacaggccgagaagagaggtggttgtgggaggtctgaagattcaatacttgaaattctagactcgaagggaaaccctccacacttcgcctgcacttacgggacacccagcaagagcagcccccgtctccccaacacacgctcacgccacccgctccccgccacactcaagtccaacagctcgaggaatcgaccacgcgcccgttctctttccctcttcagatcgctcggggctgcgctgacctggggctaagggtgcgacctgcacctgcgagccccgcagaggcctcacacctagggccatgaccgccccgcccgctcccctgtctcaggccgcgcgaccctcagctcctcaggagcccccctgggtctccacgctctaggacacaccgcgcttcctgagcccgcgccgccgccccggccctgtcacctcgggcccccggggaccccgggcctcaccccctcctccagctcatcctcagagcccgcgtcctctggctggtccaggtctatgtcaaacactcctgccatgtcctcagcttccctgtctcggaagtccggggctgggtaaaagccgtcccgcctccttcgtcgcctcatgggcccggacccgccgcagccaccacagccgctgccgccatcaccggctgcttaggctcagtgcgtctgcgcctaggccttagactggctcctaaagttcagcgtaggagcatgcgtacagggttccgtgaagccaaacagtgggcagtggacatgcgcagaactatcggcaggatccaggcgctggcagaaacatgcgcaaaacaccagccgaagtcgcgcttggaggactagagcatgcgcattgtcagctggagcgttcggtggacagtgagcatgcgtaccatatctgaagttcgtaaattgaaattgaacatgcgtaattaatctttctgaataggaaaaaatatatacacaacaaaactctccgtttatggaacatgcgcatttgttctcagtaagtttttcgttttgaaagtgagcatgcgcatggtgagtaggttggtccg

SEQ ID NO: 18651 - DNA, 2300 bp, Homo sapien
ttgcggttgatggccccgactgaagggctggaggcggtgtatgccgctgttcttgctgtcgctcccgacacctccgtccgcttctggtcatgagaggttaggcctgggggaagcgggcagaggaggaggcggcgaggggccgcggcgcagggggctctggggagaataggcactcgaggctcggacgtgggtggagaactctgccctcggagattccggaagagttgtgttgaattttcttcccttttttctcctctttcttgtctgtgcatgaaggaaagtgggagggttctatgttatttatagaaaagacactgaaagcctgctgtccaacgtcgctcttcagttttgacgaaataacacccgtggcgtcggggcctcggtgaaagcctttagtgaaaagcactgaaacccaaaccgccagacacggtgactgcaccactgttcagtcctgggagtgaaatagaatgacacagaacattccctgacgttaactctagcctcctcctagacaaacgggaaaagcacggcagtgtgggatagcctctgcgttttgtcagctgggattccgactctgttcttctgtttctaggaggtccacactggatcatttattagagagatctttctctgctagagtcctctttcctcacacccctccctccgtaatacacacaccaccgacggtggcattttattgggcggactgtgtaactgcttattcagactaaagagttacctagcaattacgtggtgactctccaaagtatctatgctttaaatgtatttaggtaacattcttttgcgcggggaggtaatattattggtggcaccattaattattggaaactttatgagctttgggaaagctgcttgagcagaaaatctaatttgtaggtcacctaagtgcagtgtttattattagttacctatgatgataataaggcattaagatttaatgttgttttttttcctaacatttccaaccattaaaaaatactggctcactcttccttatgaaacttctttgatgtagaatctacatcagagatgaaactgcaccatttgggaaaagtaaatgtaccagagtacccagtgaggactggtgctcattaacatctgctgggtacccatacttcatgactgttttgcggatgccttctgccattagagaactggaagcatttgcagctcaacttttttttttttggtgcaaatgttccctaaaagatcatttgtgtagggcagcagagccttggcattaagggagaagggaggagtccagtgataaataacctgaaaattcatctgttgtgattatttgctactcctttagtgaataaaggatacccagtgaggaatatactgctggtatttaactgcctgtttacttagaatatcttttatttgattttttaggagacagaggcctgaagcaaagacatctgggtcagagaaaaagtatttaagggccatgcaagccaatcgtagccaactgcacagtcctccaggaactggaagcagtgaggatgcctcaacccctcagtgtgtccacacaagattgacaggagagggttcttgccctcattctggagatgttcatatccagataaactccatacctaaagaatgtgcagaaaatgcaagctccagaaatataaggtcaggtgtccatagctgtgcccatggatgtgtacacagtcgcttacggggtcactcccacagtgaagcaaggctgactgatgatactgccgcagaatctggagatcatggtagtagctccttctcagaattccgctatctcttcaagtggctgcaaaaaagtcttccatatattttgattctgagcgtcaaacttgttatgcagcatataacaggtaggacataataaaacattgacttgttttcattcctaaattcagttaattttctttcattattggtaatctacttaatgcatccagttacttattttctgtgagcttttattattgtatatgtttatttttaatttgtgtcattgttagcttatataatcctctttgatttttttttctttcaattaactggaacttattttctaacaggaatttctcttggaattgggctgctaacaacttttatgtatgcaaacaaaagcattgtaaatcaggtttttctaagagtaagtataacaagcaactaaaaaattattaactgtttctctccatagattttagagaaataattttgagagaaataggaaataacttgaaagaaataggaagtaataggatatattgtaacatccacgttatgtt

SEQ ID NO: 18652 - DNA, 2300 bp, Homo sapien
taagcgactgtgtacacatccatgggcacagctatggacacctgaccttatatttctggagcttgcattttctgcacattctttaggtatggagtttatctggatatgaacatctccagaatgagggcaagaaccctctcctgtcaatcttgtgtggacacactgaggggttgaggcatcctcactgcttccagttcctggaggactgtgcagttggctacgattggcttgcatggcccttaaatactttttctctgacccagatgtctttgcttcaggcctctgtctcctaaaaaatcaaataaaagatattctaagtaaacaggcagttaaataccagcagtatattcctcactgggtatcctttattcactaaaggagtagcaaataatcacaacagatgaattttcaggttatttatcactggactcctcccttctcccttaatgccaaggctctgctgccctacacaaatgatcttttagggaacatttgcaccaaaaaaaaaaaagttgagctgcaaatgcttccagttctctaatggcagaaggcatccgcaaaacagtcatgaagtatgggtacccagcagatgttaatgagcaccagtcctcactgggtactctggtacatttacttttcccaaatggtgcagtttcatctctgatgtagattctacatcaaagaagtttcataaggaagagtgagccagtattttttaatggttggaaatgttaggaaaaaaaacaacattaaatcttaatgccttattatcatcataggtaactaataataaacactgcacttaggtgacctacaaattagattttctgctcaagcagctttcccaaagctcataaagtttccaataattaatggtgccaccaataatattacctccccgcgcaaaagaatgttacctaaatacatttaaagcatagatactttggagagtcaccacgtaattgctaggtaactctttagtctgaataagcagttacacagtccgcccaataaaatgccaccgtcggtggtgtgtgtattacggagggaggggtgtgaggaaagaggactctagcagagaaagatctctctaataaatgatccagtgtggacctcctagaaacagaagaacagagtcggaatcccagctgacaaaacgcagaggctatcccacactgccgtgcttttcccgtttgtctaggaggaggctagagttaacgtcagggaatgttctgtgtcattctatttcactcccaggactgaacagtggtgcagtcaccgtgtctggcggtttgggtttcagtgcttttcactaaaggctttcaccgaggccccgacgccacgggtgttatttcgtcaaaactgaagagcgacgttggacagcaggctttcagtgtcttttctataaataacatagaaccctcccactttccttcatgcacagacaagaaagaggagaaaaaagggaagaaaattcaacacaactcttccggaatctccgagggcagagttctccacccacgtccgagcctcgagtgcctattctccccagagccccctgcgccgcggcccctcgccgcctcctcctctgcccgcttcccccaggcctaacctctcatgaccagaagcggacggaggtgtcgggagcgacagcaagaacagcggcatacaccgcctccagcccttcagtcggggccatcaaccgcaaaccccgcaagctcttctctcagcccggcggcaacggcggcggcgcgcgcgctccccggacgttctcacgcgcgcgcgcgcgccctgccccggctccacctcctagccccgcccccgcaccgcgccgagtggagagctcacggctgccggggtgttttggcagcgagaacaagcgagctgcgcctgagaacggccttcaggcctggcgctaaataataagtcgttgttatgtgttatgtatttatgtggcatccaccacacgcctccgagatcctgggcgttttgaggttaaaaatgttcaggcttggagaacctacccctggaggagtgttagggtttccgggctcggatgtccgcgagcttgacgcctgacctagttgtgtctgtctgggcggtgacgtttggtctgagctgacctttcctcacaatcgtgaatttgggctgtgaggatcaggccttgtcagaacccgagatgagaggagagaggtgcggagagtctgcgtggggtggaagtagaagttagagttgaaaaacctgtcttgcgtggggtatagaggaccctactgccctcaaaataattatgttaatctaaa

SEQ ID NO: 18653 - DNA, 2300 bp, Homo sapien
agcctcctgagtagctgggactacaggcccttgccacagtgcccagctaattttaacatttttttctagagacagggtctctctatgttgtccagtctgctctcgatctcttgggctcaagcgaccttttcacctcagcctcccaaagtgctaggattataggaatgaaccgtagtatctggccaagatgagaatttaaacactacatttggtattctaaatttacaaatgtaccaaatgtactaaaattatcagtgtactaatacatattggtgctgcattgtggctgtggctgaattatgttatattctgttttttttcctgtttcctaaatgttcacacattttgaagtttaaaaatatccacgacatagttgaaatgttagaatacttacacatatctcctcggaaaattcactatagtctggagcctggctctcacccttactgaaccagaaatctgtcagaaagatttaaattagtaagcacagagagacttaagtatgccttctaccaccgccgaccacccctacccccacccccaacaaaaaaagaaagccaatgtgtttttttttgaggtgggggtctccttctgccgcccaggctggagtgcagtggcacgatttcagctcactgcaacctccgccacctgggttcaagggattctcctgcctcagcctcccgagtagctgggattacaggcgcccgccaccaagcccgggtgatttttgtatttttagtagagacagggtttcgccatgttggccaggctggtctcaaactcctgacctcaagtgatcctcccgcctcggccttccaaagcgctgggattacaggggtgagccaccacgccaggcctaaacctttttttttttagacggagtgtcgctctgttgccaggctggagtgcagtggctaatcccggctcactgcaacctccgcctcccgggttcaagcgattctcctgcctcagcttcccgagtagctgagattacaggcacgcaccaccacacccggctaatttttgtatttttagtagagacggggtttcaccatattggccaggatgtggccacgatctcttgaccttgtgatccacccgccttggcctcccaaagtgctgggattacaggtgtgagctaccactcccctcctcagcttcgttttcttaatgaccttttaattttagaacagttttagattaacagaatttattttatttatttattttttgagaccgagtctcactcactctgttgcccaggctggagtgcagtggcacgatcttggctcactacaaactccacctcccgggttcaagtgattctcgtatgcctcagcttcccgagtatctgtagcggggattacaagtgtgagccaacgcccccggctaatttttgtagttttaatagagacgggtttcaccatgttggccaggctggtctctacctcctgagctcaagtgacccgcccgcctcggcctcccaaaatactgggattacaggtgtgagccactgcgcccgacctaaacttcgttttcttaataaccttttaattttagaacagttttagattaacataattattttgagggcagtagggtcctctataccccacgcaagacaggtttttcaactctaacttctacttccaccccacgcagactctccgcacctctctcctctcatctcgggttctgacaaggcctgatcctcacagcccaaattcacgattgtgaggaaaggtcagctcagaccaaacgtcaccgcccagacagacacaactaggtcaggcgtcaagctcgcggacatccgagcccggaaaccctaacactcctccaggggtaggttctccaagcctgaacatttttaacctcaaaacgcccaggatctcggaggcgtgtggtggatgccacataaatacataacacataacaacgacttattatttagcgccaggcctgaaggccgttctcaggcgcagctcgcttgttctcgctgccaaaacaccccggcagccgtgagctctccactcggcgcggtgcgggggcggggctaggaggtggagccggggcagggcgcgcgcgcgcgcgtgagaacgtccggggagcgcgcgcgccgccgccgttgccgccgggctgagagaagagcttgcggggtttgcggttgatggccccgactgaagggctggaggcggtgtatgccgctgttcttgctgtcgctcccgacacctccgtccgcttctggtcatgagaggttaggcctgggggaagcgggcagaggaggaggcggcgaggggccg

SEQ ID NO: 18654 - DNA, 2300 bp, Homo sapien
ggagctgcaacatagactgagaccctcacatgtttggctctgtgtccccacccaaaactcatctgggattgtaatcctcctgtgtcaagggaggaatctggtgggaggagattggatttggggacagtttcccccgtgctgctccccggatagtgaggtagttctcaggagagctgatagtttcaaagtgtggcacttactggttctccactcactccctcctgccgtcttgtgaagaaggtgcctgcttccccttccccttctgccatgattgtaagtttccggaactgcaagtcaattaagcctgtttcctttataaattacccaatctcaggtatttctttacatcagtgtgaaaacaaatgaatacagtccccttccctgaggtgccttccccttaggcaaccagctgcccccatgctcctcttctgccccctggtatttcctttcccctcatgaggcccaagtgatccacatggccagccccagccccatcctactgcaggcctgtgtggctgctggagaggccaggctcctttccgcaccccgaggctgcccgatatgctttctggatcctgtagaaaactgacccactattctcataccggtgcaacttcttccaatacctcaaaactggacaacgtgaacttatcttgttgcttgtctcttcttgctagggctgtcattgggacagtccgagatgggggggtggggggagacaatggatgaatggatggatgaatggacagtagtccagggagatgtccctgtgtgtcctgaactgggcccttcctccaatgagaagccttcctgagtgagtttctacagtcatcccttggtatccatggattagttctagggtccccggggatgacaaaatccatggatcctcaagtctctgacataacatggcctagtatttacatatcagctatgcacatcctcctgtagacattagaccatctctagattattcaggatgtgtaatacaatgcagatgctacataaatggtcatgatactgtattctttagggaataatgacaagaacaaagtctgcacatgttcaatagaaatataaccatccaatttattttctgaatattttccatctgctgttgctgaatctacagatgcagagctcctggatatgagagccaagtgtgctttgagagtagggtgggtgaggttgctaatgagtacagggggacaggtgttgatcaggaggaccctgcactggggcatctggacgtcctgcctcaggacttgagactccagttggatggcacaggcagactcggcacaggcagactcagcccaggtcaaagccgtccccttgaagtttcattttatcccaagctctttctggaccctggaatttggcatcccctaggccctgcgtggaaggacagatgaatcaggttttagataacatgtctagaagagtgagcccctactgtgtgcccggcactttcctcacaggatcctctagctagaatatccaagggtcatggagagaaatacccagttaaaatatcagaaatgaaaaagcgataccattagagacactaaaaagaccattaggtaatagtattagcttttgtattctgagatccagcagcagcagcagtcacttccctccacccctatgtgtatcccaggaccaccctgggcagggagggctgaggttagggagcagccatggatgctctgatgctggccctgggcgctctgatgctggccctgggcctcgggggtgacagtgatgaggaactgggtgcacacatgagtggggcagccgggcctggccagagaagcaacacacatgtgcacagacatgtttagccacatacacgtgtgcacgcacgtgcacaaacacattgcaggcaggcatgttgacgcctcaggcagcggaggaccctgactctgggcgctgctgacccgggcaaggccccattgtgatgcgtgccatgacctcagaatgtcactggtgcttagcacctatccgctctctggcctgcctcagtgttctacggcagttacacacaggcagtggtatctgtgagcagctctgtggactcaaaggttttctccctgagaggcatgacccaggccagctgattcatcagagtcaggtgagcgtgacctgctctcttccctccaggcggacttggagacagtggctacggtgcgggcggtgttggcctctgtggggcagctaccgaggagggtcatccctgagcactcaccaggcgcccgttctacactgcccgtgtagacgattggctctttcgtctccat

SEQ ID NO: 18655 - DNA, 2300 bp, Homo sapien
ctaccctaaaagcctaccttgaattttatttcagtttagggttgttagcatagtaaatttaaactcatctgatgctcaaaataccaattaaagcatcttatacttcttagaggtgtagtcagtataacagctataaaaatgagcattcactttataccccaaaccaagcattctcatccccatgatgctcaagaccaggagtcaacaaacgttctctaaactttctctactaggctagtaaatacttcaggtctctgtcataactaccaactctattgtaacagtgcaaaagcagccatagacactatgtaaatgaatgggcatgactgtgtttcactaaaattttatttacagaagcaggctgtgtgctgggctggatttggcttttgggccataatttgccaaccccactctagactgttagaagcccacctaccagtcagcgcaccatctccacaccttacattcacctgatttcccagcctttccagaagctgccatctccctcgtgctttggttggagaacctggagcatacagatgtatggccaaggattcacttccagaaatgtcatacctgatcaaagtgcttcttattagaaattatttcactcattcactcactcagcatttacccaacatctgctgtgttccagacgctgtgctaagcactaagtatatagactctggctgcttttaggagtttgagggagaaggcaaagatggataaataaacaactacaatgcaatattattgtttctctcattagaatattcacagagtactctgggaacacattgaggacactcagtctaaatggagggggaagaggaggctttttaaaggtgtggtagctaaacagagatttcagagtgagtagcagtacagacaaggaggaatgagtgtttcaagcagataaaccaaaaggtgcatagacatagagaatgagagtatatattgcccatttgttaactagtaggactagagtttcagtgcggggagagaaagagtggagccgttgtgtagcagaggccgaatgataagattcttgtacaggaggctgagtagtttgggtttttatctcgtaggcaatagagattcattaaagaatcttatataggggaatgatgtgatcagatttgtgtcagaaaaatcactgtgatagcaaataaaagaatatggatctgggggccacaataagtagtccaagatagaagtaatgggaacttccttcctcaaggccacagactttgagaacgtggaggaagacacagattccagatatacttggatatcagaaagaaagtaacagggagaaagaaagaaactggcttctacttagtatctacttctacagagacccaaagccctgaaatgagcattgtatgtaatagactaccgtctcttctgtgcaggcatgtggagtggtactagctatgtatcttactcggagaactgataaaatagacactcaagtcattttctataggctttaatgctcttgagaaattccagttgagaaggctgaatactttcacaacacatgtgcaaggtaggaggtattagccgcatacttacagataagcaaggtcaagctcaagagaggctaaatgatttgccccaaggcacagaggtacaatttaaacccaggccacgtgtttaactgtgtctcatgtatttcattccttctttcttatagtagacagtaagcacttagcatcatgcctgatgtttagggtattaatgaagttacacttttttcttttctcttttcttctttctttaaactacatgttggggacatatttagtcactttaaaatgaagaagtaacgattcagtgaaaagccattctgaagtagttattatatatgtcttcatttgctcccacaatcagaataaaaagaaaaaatccaaagtaaaaccaaagaaaatccagcaaggagaggaggaggaaaaggaatccagtggtgaaatagaggcagccccagtcactggcacaggcagagtgaacctgcatgaagggaacacttggtgtccctcctccctgggtgtccagagtttgcctttagatggaagtggagctgcagaaaaagatggagtctcctcatccttcagttcttccagttggaaaagggtcagcagtagtgagtcagacttttctgatgctgaaggaggcatgcagagtaaaatgaggtagtagtattttgttacatttttataccttgtattctaagttgcatgtaagtttataacttaacctgaatgctgcatgtgatttaacttgaagagcctgatttc

SEQ ID NO: 18656 - DNA, 2300 bp, Homo sapien
taacacatttcaaatgttatatagctgagataaagttccttctagtctcctgctcggatatagccactgaagacaatttgtgctgtgtgccctcagatttttttttctatatgtaaatgagcataattacagctttaagtgggatcatatttaacatgctgttttgtaactttcttgttttgttaaaacttaatatctctgggacatctattcggttcctgttaatatacctcatagtttctaactgctatggctggaagaccttggacaagttagttaacttcttggagcctctgtgttcctccctgaaaagggactgatataaccacattgtggggttcttatgagaagtatatgaaataaagcattcaaagggcctactgttattgttgttgagttttacatttagcagagggttagcttcttttataatcattatcataatcatcaaaattgaagtttttaaaattttcccactatttcaaacaaggctacagttcacatcatcccaatgtcggaagtgtttcttaaggagagagttctagaaatgagattactgagtcaagaaatcaatcttggtcagaattgccctccagaaaccaagtttctataatttatcagcagttcccacatacatccccttgcttttaagagggctgggtttgccatattacagagctttcccaattctgatctgtgctatcttttttatcccttgtcacatttttcttgctaaacatcttctctcttttttcttgctcaccatttgtacatagtggtttataaacatgtacaataagaccacttcattattcttttcttctagaaaagaattcatggtagtttattaggtctccttagatcttcatttctgctttgtgtgtgtatatgtgtgtctataataaagttttttttcatcatctagagactgtctctcttccatcctaagtggtgctagtaagttgattcctggacaaccagattttattctgccttctaactgggtctcccttttccccctagttattgcaaaatgcattaaaaggtatacagtcacttctaaatggtgggagaatgaaactaacacagactgatgaacttggagcacttttagctgtgctaaaggtaaggcaagtcttcatatgatcattgtctttcctgtttcaacccatggtacaaggaccactttacatccttattctaaggctaactttgaggtattaaaagttcttacatatattttgagagagtagacaaaaatgttcatattcaaagacacttaatattaagaacagaaaataaatctccatttaataaatgcatcaaaattttaaaattatttatgaatcttaggaagggaatcggtaggggagtatgacctatagaatatttaattatagactatgttgtacttgtttgtacaagaagagccagtgcttctccttggctttctcctccaagtagtagacaggccaaccaagacgtgtgtcaatgggcagcttccgagcgtgccagtcagtcggaaagtcaggccagcatctctggggacccagcttcttcagccagcaaagtaagaagtaattctttccttgtggcattctcttgctcccacatcaaatagagagatagctataggtggagataggtaaataaaaatgataaatttgtttaaaaaattatagacagataaagtaattggataaattttataaataaataaggaaactaaaaccagacctgatttgatctgaccaaaccaaatccagctggaggccagataaacttcagctcttctttaagccctatgccttcaaggtatctattttctatctcatttatatttccttagtaggcttttgaacattatctatgagtgttgtgatccagacatggtaaatagttctattttatgattaatggtttatgattaatggtttttttggtttcgtgtgtgtgtgtgtgtccttattcatcattattagaaattcatgtttcacggactccctggactaaacatagagatgcccacggtgttatacccaactccgcttcctcagtatgatgggcgaacacctatcaaaccacagcaatcagaatccagtgcttctcgaccaactttggtacatttatgtttatttagatttaagttgtggcttatttttaatagattgttgtgtgtgttttctatgatttgcatcactactaccctaaaagcctaccttgaattttatttcagtttagggttgttagcatagtaaatttaaactcatctgatgctcaaaataccaattaaagcatct

SEQ ID NO: 18657 - DNA, 2300 bp, Homo sapien
gtccatttccttaaaggaaccacactgatccaaaacagtatattctaccagaactgaacagaccggcatcagtatactgtattttacaattcctgggccattccaccctgaataacacaatatgtaggtcatccatattgcaacttaaagtgaaccacaccaaacccagatcctttccagtctcttcgaacgtgcattgtggaaatgaccaggcctcacatccttctagcccaatgtgtaagacagctctttagtactacttcacatactcttggtcttacattcttactctagccattgctacagcaactagtttatcacaggcatctactagcttagcacaggtataactggtgagagccttgcctcagatatgcacctagtttcctcacttttgcctcagggcttctttgactatgcaacataggactcctccaggaaccaagcacagatgcatgctcaacacaggaacaccagtgaattaatgccttgtggtcaacttttgacaatagacttcaaaagctgacagataaatgcttttcctctctgttcctcagaagaagggttttgagagcttcacaaggcttctcagaaactcctgaggactgaacaatcagtcaccccttgcaatggccaactcaatagcacatattggtattaattctccttccttccctgttcatttctggataaatccctcacctatcaacctcatctgaggctctgctatcagggaacccagattaaaatatccaacgactaggtttcagctcctgatcttctctgaacaaatgcttgaatacatttctttacacgaatacacacacacacatgcacatatataacgcacatatgtacacagactaggaataagaaataatataccagcacaacggaatctaaatccaaacaaaaaaattaacatttctccccaagcccaaagtcttcagaaaactacctctgctaaagcatacccccaattttcactgctgaacagaaatgttttgttctcaggataaaacatacattcaggtgacttcaaggttttccctaagggccaagggtgaggatttgctttatatttgcataactcaaaggccctagagatggttttcccaatctgcccaactgtgaaagtcaagccttcacttcctggatgactgaaaagtgatcacagatttttaaatggccattttattctccagcttcttgacttcaaggtttcagaaaatcttggggtgtctcatttcaacccggtcactcttaggcagattatattttacatgattcagttaaactccaaaattactcttctagtggggcgaggtgcctcatgatccatgagaggattcacactgggaaaaagggagaaaaaggaaccaagagtacagccagctgtcacttaagtagggaaagctgccttatattccactgaccagattgcaatcacagagccacagccaactgcaaggaatgctagggaacgtagcctttattccgggtggttttgtgcctggggaaagattttagaagagtagaagggtgccttagaactagcggtttctgctactgccatccacagcataccctctccaactccagcccgaatctgaaactctagtacggaacagagtaccttcagccctgtccaggaacaaactctgggaggacaaactttctggaagcacaaattgagaactcacttttcagtcagggctcaagaaggagtggccggcgaaaaatctccaagccaatttctttctttttttttttttctgagacggagtctcgctctgtcgcccaggctggagtgcagtggcgcgatcttggctcattgcaagccctgcctcccgggttcacgccattctcctgcctcagcctcccgagtagctgggacaacaggcgcccgccaccactcccggctaattttttttttttttttttttttgtatttttagtagagacggggtttcaccgtgttagctaggatggtctcgatcttctgacctcgtgatccgcccgcctcggcctcccaaagtgctgggattacaggcgtcagccaccgagcccggcctccaagccaatttctgacaagcatctgcagggtaccggtcggaggagtcccgtagtcatggaaacccctctgagccccagtccggtctaaaaaaggtactttcggaactagagcgcgcggaacgggaggatgtcccggaagtatttccctgggatcaccccacccaccccccccgcccgtagaaaagatggctgctgtgcaagttgtcggttcgtggccttccgtg

SEQ ID NO: 18658 - DNA, 2300 bp, Homo sapien
gaagcctctagagtgagttgcttagctcaaagcagttattttgtgctaatgaaattgtgattacgggtgccacactagatgaagcagaattctgtgacctcaaaagctcatttatctgtacccagagatgagtccaaattattttctaagaatttggatgtagcctgacagtaatgtgtactagtatagaccactgtctttggagtttgactgtggttctgccatttaactattacttggggctagttaaactttctgtggcttaatcttctcaactgtaacgtggcaataataatgcctgtctgtattggaaaccacgtgaagtgtcttcctaattacaatggctctctgaatgctcctcatcatcccaaaacacacattattgaggataataaatgcccattattgagagctgaggatgaaagatcagtaagaccccatgctagccagcaagatacaggagagaaatgtaaaatgatcataataattaattacaatagagtctgacaagtcctatgacaaaataagtactaaagagaatgttactctcctaggggtggaagttgaggaaggttttggaggtgacatttaggctgggccttgttagataagaaggatttgcagaaaaggtcagttgtttgcccaaaggacttctaaccaatggcatttcaggaactgtgatacatgaagtagaacagagtgggtctctccctgtaacctcagagttaggaaccagaagtgaaacatcatgtactttagacttacaagtgaagtctaaagttgacttcactttagaaagtggcccagggggcctatcacaaggttgcaaacttgtctcactaccctcaactagcccaggtatcctccttatctcacattatataaggtatcttgtgggacacacgacacatggccaaaagttatacatgtctccctgcatccttgccattggagagggaagagggtatatttctccctacccctgacaacatccccactcccctgcaaaaaaaaaaacaacgggagtgtgtgtttaagaaaatcattcatctagattaggagtgctacaaggagggggaaatgaaacctcactccccagctggttggttactatggtcccgcccccactcccaccccagagctgcaggacgagagatatcctagaagagtttaatatgcataacttgagtttgggttctcagaaatgaagttggatgagatgaagcagagctttatctcaagaaaattacatagctcctataggcaaagaccatcacatctgcctaggtatccagcaacagaatcagaccaaggcagtgggagactgaggccacctctctaccaccagcaggtgataagggagcacccctgcctgttctgtactgcttttccctgccctcatttccagaggtgctaggcctggaagttgggggtggaggtgggcgggtgtggtgggtcgggggaagaagggaaagagcagactgcacccttgctacctggcacctagctcccagactgtaatttctctgggattctctcatgcctagcccacgcctggcccagagcagacattcaatacttatgttgaaaatgaatgagtgaatgaatatacataataaaagttaatactcatccctccaccctccccacgccagcccctttttctcagtcactcacagcttttttgatttaggagtctttttcattatttaactttttttttttttaattttgtagagacagggtcttgctcttgttacccaggctggtcttgaactcctgggctcaaatgatcctcctgccttggcctcccaaagtgctgggattacagatgtgagccactgcaactggcctggtgtaggagtcttatttttctgtcagaggagggcgttcccttggctcagagccttgcttaggtaatgtagaaggacccagggtacacagggtgggtggctattctccagaaatgtcagtttctgggcagggcttaggtgtctgcagtccctagtcccacccctggccttgcattccagctcagcgggtggaaggtataaatttcagctgctctcagccctgctgtgtttttccaaagccttccaacagcaacatgaagttggcagccttcctcctcctgtgatcctcatcatcttcagcctagaggtacaagagcttcaggctgcaggagaccggcttttgggtgagtccaggcagaaggtagccctgttcatttttccttgaatgagggggccagaaagtaggacatcagggaccagtgtgtgtggggaggagaggggaagaaa

SEQ ID NO: 18659 - DNA, 2300 bp, Homo sapien
agagtaagaggaaggaggctggggctgctgggctgggctctcccactcaggtggcctgggctggcagctttatgggccctgtaagtcgctgggacatgtcagcactcattccagctctaacgaccctaaatcaggccttgtcccctacaggtaagcagggccccaggtagtctaaatagtgacaggtgactggtttatggcaggccaggactggggtcagggctggagataaggctgagaatgttaagaccaggaacaggaagagagggccactcaccctgtgtaaccttgaagttagagatggcagatggagcaggaaccagtccaccaccccatcgccaatgtgcaggctctgtggtgcccataattaagatgcacccataagagagtgtatagctttacccctcccgcattcctcagaggggatgccctaccagggactcgttctcctcacccatctttatggtcccaaaatgcacccagggcccccctctctcctggggggcctgaatgcaatgaactttaaagtggatcattgatcaacagtcccttaaccccaccaaagtttcccaagcctctcccctgctcatcagggggctggccagaggtcacagggactccctgggggtggtttttattcccaggaacaggcttcctcagtcctgaaagggacatttttatagccctgtgaacacaaatgcactccccagaataggctctgggtgtggaatccctcctgtggctgtcatggtcgcaggctggtgattacattatacagtggtgttgacaatagagccctaagcctggcatggacaccccctcacctccctcctgcctctctgtaggatcaaagctgctctgtgaggctgtgtgatcctgggccaggagcggggagtcagcctcaaccctaagcaaggaggaagcatctttgcctgaatccttctgggggaggcaatcccccttcagaagtccctagcccaggttcgaaggtcggtagggactgagaggttggcagcggatggggagtggctaaaccagaaaaagggggcttcctgttgatggattgatggaggaggtccaggtccactgcctggttccccgtccctctcccgcaccccagcctgagcttcccaaactcccacagaagcccccaccccatgtgggacacagaggacctgcagtagcaggagggcacagctaagagaggagacaagaggcagcttgggggcatgggggggaccccatttccccaaatgttggagccgcccttaagggaacttcccctggactcctctggaggtcttgccagatgggagaaccaggggtccattcagaccccagtctcttctcttcccatctcatctctccacctggggggctcaaagaacctagctcctcccctttgaccccatcagcttctccctcaccgaatcctcttacaatccatttcttaattctgccccatcaaccctccctggtcatcacataaacaccagcaagggcagtagtttagggacagctttgctctgtattcgaagaaaggtctttggtctgcttagaaattaagtttggagcagcctgggaggaaatagaagagatgagacccagagaatcaatggccactgccaaagagagataggagagcctttctgcggccactgattcaacaaacggcatcacacgcccctcagcctctcatctcttcgaggccatctccacccccacccccacccccaccccaaggccattccaaggtcccattcaagaccactgcgcaggggtggcgccagaatgatcaaagtcatcatggggcactcatctttgtgtgggtcaagcactttgtggtgtcgtgtccctgttcccaaaccagggaccaggagtaggatgggggaggggcagggcgccgctgctgagtggagaggacgcggagtgggtgagggggccttgcgcacagggcaagaggtggccaggcagggcgggggaccggggagagcggaggatttcagatgagggacaggggaaggtggagaggggagggcaggccccgccagggggaggagccgcctcccgcgtccagctgtcggggctccctcccgtcgcggctccgctataaaacccaggccggcaggatcgctgcacccgcggcggcctcctcggtgcgcgacccccggctcagaggactctttgctgtcccgcaagatgcggatgctgctggcgctcctggccctctccgcggcgcggccatcggccagtgcaggtgagctcccgggctccggccccaggtgcccctcggcggtccc

SEQ ID NO: 18660 - DNA, 2300 bp, Homo sapien
agcgatttcaatttgtaaatggtcggtggataaaatcacagaaaattgtcaaatttcctcgggaaagttttgatccaagtgcttttttggtaccaagagacccggctctctgccagcataaaccactcacaccccagggggatgagctctctgagcccaggattctggcaagggaggtgaagaaagtggatgcgcagagttcggctggggaagaggacgtgctcctgagcaaaagcccatcctcactcagcgctaacatcatcagcagcccgaaaggtgaggcctgggggccttatgcaggtgctttcttgggactcctgtaggctacatatgtttctctgtcttctgttctggaacatcaggttggttgggtggaaagaacctatctggaatcagacctatctgtatttgagctatgtaagttttagcaagaggttcagcctccctgaatctattttctcatctgtaaaatggagataatgccaggtttacagagttgagagtgacacatggagagtaaagcacttcacacagtgcctgatatacggtaaacaggaatggtagctgctgtcttgtccccttatagcaaaagttctgaggttccccatctttcagggggtctagaggatcaaaactcttttttttttaatttattttattttttatttttttgagacagggtctcactctgtcacccaggctggagtgcagtggtgcaacacagatcacagctcactgcagcctctacctcctggggtcaatcaatcctcccacctcagcctcctgagtagctgggactacaggcatgcaccactgcacctggctaatttttgtattttttgtagagatggtgctttgccatatttcccaggctgggctcgaactcctgtgcccaagtgaacctcctgcttcagcctcttaaagtgctgggattacaggtgtgagccactgtgccttgcccaaaactattttcataaaaatactaagacaatatgtgccttttcacttttattctctcacaaatgtacaatggtgtgagagataacatgacatggaataatatcgtcactttgacagtgaagtctgtgctaatgtattgtactttttcattccttagttttaatttctaatacgggaaatattgatagataaaattcacataaaagttctaaaggttctcaataatttttaaaggtataaaaggggctatgggtaagaggctataaccaaaaagtttaaagccttacaggatttttgtgagacatagaggtaacaatggacagcaacaaattcccagtaccatgcctaacaataggaagtactcagtaaatggtggtcacattttttgtctaattttacaaaggagaggaatatgtatttggaaaactccttactctaatagttagatttttttcaactgaatctgacataaatcatctttctgctattttctgagtccctataatgtactttacattttgaggacattgttgcttatagggacttggcattgaagaagacaaaaatgtaacttactggctacataataggaactaaagagtagccagtcacgactgccctgtctttacctttgtgtgtacagttgtgaagctaacctcagaggtagcatttggggctggcttactttgtggcatttgaatttgtgaatcttttcttctgtcctgttcacaggttctccttcttcatcaagaaaaagtggaaccagctgtccctccagcaaaaacagcagccctaatagcagcccacggactttggggaggagcaaagggaggctccggctgccccagattggcagcaaaaataaactgtcaagtagtaaagagaacttggatgccagcaaagaaaatggggctgggcagatatgtgagctggctgacgccttgagtcgagggcatgtgctggggggcagccaaccagagttggtcactcctcaggaccatgaggtagctttggccaatggattcctttatgagcatgaagcatgtggcaatggctacagcaatggtcagcttggaaaccacagtgaagaagacagcactgatgaccaaagagaagatactcgtattaagcctatttataatctatatgcaatttcggtaagtggtttattatatggttttcagagagtggtctgtgttttgttcacttgtcttcatgtattcatcagcaagtatttttttcaggtcctgcttatttcctagcattgagcttagtgatagacaaagttaacacagaaatcttggcctgcccaggtgtggtgactcacacctgtaatcaat

SEQ ID NO: 18661 - DNA, 2300 bp, Homo sapien
tactgataaatagaaattattgtcagtacagtccacaaatatgttttttatcagccttctttcctgtcttcatctagcactgtagcctgtgttccacagaaaatatagtcaataaaaatcaacattctttactagcttactctaatttgtggttggccataaagtattcctggtagagataatagagataatatttaactggctatgagaaaggaaacactaccgtatatgatacacccctttttctactcattccaacaacgatgatgcagcacgtttccttttgaagcacatcagttttttccttgagtgaccagttcaaaagatgatgacagttaatatcttgttactacagaatttgtactcaaaaaagaagtctataacccaagtccaagccagatttccttttctaaaaaaagaattttcctctaagttcccctttttaaatgagctctttagcctggatagttatgcagtgctagaaccttaattgcacgatcaaatccagccttgctagtttatagcagcatttgagagcctcgtgactctcatatagggaagaagtctcacctgaaaacccattctaaactgaatgtcttgagctgtgccaatttgtattgcaacagcctaatgttcccatcatgagtttcaggaagggaaattcatggaggaagttcacctctggaagggaggagcaataaatagggtgggtgatggacatatgtgacgtttgccacagagaggcagtcagtgtgggccttgtggtctgggctctgctttgggacacaaatatatactgtgtgaagtctcatgatagcattcataaccctgatgcttcacccaccttcccatacattagagggacaaacagaaggatcccggctctatgattcttgattgtttgtcaggtagcagccaggcatggagaggaaaaaattgtttcttttctgttgcactctagatccttccttctctccgtcttcttcattctacaccacccccaacttacatccctgcaccccgcccattctttgctctctgtcctttcttatacttaattcctccttgctccacagcctaacatgctgattaacaggaccccaaaggtttgggtgagtattaggggccttctcagcaaaagcagcacactcttttgagcttgctcttccttttgttgccatctcagataaaaaggccccatgagggaggagacagataattatagacttggtattctgataactctgtgttacatggaatcagatgcaaatgagttgtaccctgtggggtttcatgctctgctgtgttgtcttctcatggtgagcttttctgtgcccttatttcatccagctctggtttctgtgtttcatgttatttctcctagcctctgtaaagtctgcagcatactaataatgctctggctttctgattaaaagtaaatggcttactatcagcacccctggcttgagggccagctcacatgtaatcccttataggattccaaagttgttaaataaatgcaattctttttgtttttgtcattttgaagcgttcaaaaatttttcaagaaaagctatggtcatataaatagaaattttatccagaatgttaccgatgtaacatttgtgaataaatatataggtgctgtatttgctcagactctagtttgggttgtgttttcttttcccttttttttgagacagggtctctctctgtcatccaggctggagcgcagtggtgtaatcacagttcactgcaacctctacctcccaggctcaagcaatcctcctgagtagctgggactacagacatgtaccacaatgcccagctaatttttagatttttcttttacagagacagggtctcactcttttgaccaggctggtttcgaactcctggactcaagcaattaccccacctcggcctcctaaagtgctgggattacaggcatgagccaccatacccagccagttgtattttctttttccttatatagagtaaaataagggtgagtgaccaagaggttgatgcatacctagatcaccactttaaatgccttcccacgcacccctttcctcctgttccctctacctgcaggttgtagatgagcatgagagtgtggagcagagtcggcgagcgcaagccgagcccatcaacctggacagctgtctccgtgctttcaccagtgaggaagagctaggggaaaatgagatgtactactgttccaagtgtaagacccactgcttagcaacaaagaagctggatctctggaggcttccacccatcctggtatgttacag

SEQ ID NO: 18662 - DNA, 2300 bp, Homo sapien
cttccagagtcatttcattttggaatgtcctgtaaacattcaaactgccagaatatgactgtaaaacagcgaagtgttctcttgcattaaattgaagatatctgtttaattttttaaaaaggaaaagaaaatgtaggaaaggtacttagagctgttactttctaagtatacaacaccctacaattcaaggcatcttaatctccatcaggatcaacaacaaagtcacttttgtcacgctgttaaatccatcataatggctgatgcagattggtcaaagggatccaacaaacactgatgtgcataatggcatattggcaactaatatgtaactcttggtcagtagagagtttaaaagaccttccctttcttcttgatctttgccaaggttcttgaagagttctgatgttctaaaatacgttgttgagcttcccagtttgcttactcatcctcaaactgacaacagtttttctcttaattctttttgctgtgcttccaaattgttttttatttgcattaagtgaacgtaatgttcatttatcatttgcatcatttcatgtttttcatttgcatcatttcatgtttttcatttgcatcatttcatggcaccgttggagctcaacttcagagtccctcaggttttgaactacttactcaccttcatctcaaatacctgctctgtcttgatctccatcttcttcatcttatctgcttgctcccttttttcttcttccatttgtgccagaggaagactcttagtaagctgccatttattttgttattgaaattgtgccctaaagagttaaagaaaccaatgactatattcttgggcttacaggatagaggctacgaaaaaaagcaacttagtaagaagctgaaactaaaactgttccccaaagagtaagaaactgataaccagcagaactccttgagtttgcagaatagcagattgaaggaaaaaaaaaacaccaaaaagctggcctgtgtggtggctctcacctgtgtaaccccagcaccttgggaggccaaggtaggaggattgcctaaggccaggagttcaagaccagcctgggcaacataactagaccttgtttttctgtgtttttctcttttttttaagccagttttggtaacctgtgcctgtagtcaggaggctgaggctggaggatcccttgaacctaggagtttgggactgcagtgagctgtgatcacaccactgcactccagcctgggtgatagagtgagaccctgtgtcttttttagaaaacaaaataaaataaataacaacttgctgaaatgctaaccctctctccactgtgagattttaaaaactggctgaattggctagaaccaatatggctaagtagagtttacgcagaatgagcttgctaattcccactgtgtgtttcatactgactccccccaattggcacatgtgatccacgaagtaacatgaagaaataactgtgcatgccgaaggactttccaatcctctccttctaccagtcatctgccaatcccagaatccaccctataaggcttttttaataaaattattgccttaaaacaagcacagggagacagacttgagctggactcccatctcctttttggttggcttatagtgaaaacctttgcttttctcaaaaacccaacatcagagtattggcttctgtctcatcaggcagcaagcctcctttgcttggtaacgttatcaactccattatgtcacagctgccggttttctgcttctgtagttcttcattattagtaacatctttcaagttctgcatgtgtgttcttatcaatatatttcttagaatgatgaaatcacgttgttggtcagtgttttttattctatgggaaggacctggatactctggagaatagaaatctgtgaggaataataagttgattaatgttgactggcccaatccagaattcacctataagtatgaattcaaaccctctcttcaccagttttttgtatacttgatttgggagattggcagatcttacatagcctttgaagttcttctgttgccgtggtgcaggcattgatgttcctttcctcacagcaacagataccacactacagtgggacaatttagacactcctgttaacctaacgtgtatgtctttgggatgtgggaggaaaccggagtacctggagaaaattcatgcagacatggaaagaatatgcaaactccacacagatagtggccccagctgggaatccattttttcccccattaacattataataaaatgatattgaatgaaacattattcaaggacctctg

SEQ ID NO: 18663 - DNA, 2300 bp, Homo sapien
ttgcaattgaactcttgagggtttttctccctcacagctgggccctttcataaaattcacttcccattaattacgataatctaactcggaactcgcactctgcaggctgaagatgactgaggtgttttgcctgatgtctctctataccgaactaatgacctggaaattaaaggctttgaaatgtattcccaaccccctgattcatggcctttcagtaatgcagctaatctgaggtcttaaaattaaccacctcacagtgaactggaaagggcagcgctgtgactaatgccacgctgctgatctggtttgccaggaaaggtgagtagaaaaacacgaaatattggtggggcgcggtggctcacgcctgtaatcccagcactctgggaggctgaggcgggcggatcatctgaggttgcgagttcgagaacagcctgaccaacatggagaaaccctgtctctactgaaaatacaaaattagccaggcatggtggcgcatgcctgtaatcccaactactcgggaggctgaggcaggagagtcgcttgaaccagagaggcagaggttgcggtgagtcgagatcgcgccattgcactccagcctgggcaacaggggtgaaactccgtctcaaaaaaaaaaaaaagaaaaacacagaatattaccttctttctctagcagggtatattagaatctgttggttttaggaactaataacctttccctggccctaaattacctaaccggcaccttgggtccaatctaatccaaatggttactttttcaatattgcttccttttccagaagctttattccgtgacttttaggttgaagacgcaaactaaataagagttgaaaatcaaggaactaaataataattccactgtacatatacaccccatttggtttctccatttatggtttcctataggttgtgttcaccttttggctctcgtgaataatgctgctataaacacgggggcacaaatacctgttcacatccctgcttttcattctttgggaaatggagaggtggagtgggagagtcagtcacatgctgccacaccatgaacctggaaggcacgatgccaagtgaaataagccagtcacaaaagagaaagtctgcagagttccactcagaggaaatacttaagagtagtgaaattgatagtaggacagcggttgccacggaccagtgggagggggattggggagttaccgtttaataggcacagagtttcccttttgcaagatgaaaaacggtgggaaatgggacgtggcaatggatgcaaaacaatatcaatgttcttaacgccactgaactcacttagaaattgtgaaaatggtacattttgttacgtatattttaccacagattaaaacgactccacgctaagccttgtagccctcatgtttctcggggagaaactctgggagagaggataagccttttgcacagcgctttccagagaatgtgtacaagaggcatggtcaggaggagaaggtgggccgggcaggcgagatgacccgaaaaggcagatccacttcgttaacaaggtccactttcctcagggatctcccgctaggtgtgagcattcttttgtcacaggaaagccttgagattctcctttcctttcacaacgccctcccagtcaaagacgtccctaaggttgggagctccctgcctacccactcctttctcttctgagccatatgccgcatccctcagaaccccattccctaagattctgcggtcttccatgttaggtcccggcaactgccacactaaccgtcagctgctcggaccccacccgccgaacgccagaacatgtgggcgcgggggcggggggggtcgtcctcaagcgccccggaagtcaccaccccccgtcgccagcggaggcgcccgggcggggcgcgcggctgcgattggcgggaagatgggacgatgcgttacgtgcggagatgcgtccccctccccggcgctcctgcgcgcggttagcttggggaggggcggagcgtgcggccctgggcggccgttaccgggaacagtgtctggcctcgggtcccgtgaccctcggcggagctggcgggagggggcggaagtggcaagagggcgtgaggagggaaggagagggaggagagagaggagagagaagggcggagtaggaggcaggggaagggggcggggcggaagagtcacgtgatccggcatggaggcggtggcggcgaccgggaggagccgccggggcagaagccgcacttgttagtgtggggggaggtgggggcgggggacgccgacaccgtcac

SEQ ID NO: 18664 - DNA, 2300 bp, Homo sapien
agcagctaaactgcaactctagtcctgtctttcaagtggggcaagtgccacaaagagatacattaatttgctcccaactccactgcaaatcaagtgggtagataaatacccaagcctatcccttgtatagcaaggccatctgtaggtactgacggtttaggacagtaataatagtagtatatgttgcaattgaactcttgagggtttttctccctcacagctgggccctttcataaaattcacttcccattaattacgataatctaactcggaactcgcactctgcaggctgaagatgactgaggtgttttgcctgatgtctctctataccgaactaatgacctggaaattaaaggctttgaaatgtattcccaaccccctgattcatggcctttcagtaatgcagctaatctgaggtcttaaaattaaccacctcacagtgaactggaaagggcagcgctgtgactaatgccacgctgctgatctggtttgccaggaaaggtgagtagaaaaacacgaaatattggtggggcgcggtggctcacgcctgtaatcccagcactctgggaggctgaggcgggcggatcatctgaggttgcgagttcgagaacagcctgaccaacatggagaaaccctgtctctactgaaaatacaaaattagccaggcatggtggcgcatgcctgtaatcccaactactcgggaggctgaggcaggagagtcgcttgaaccagagaggcagaggttgcggtgagtcgagatcgcgccattgcactccagcctgggcaacaggggtgaaactccgtctcaaaaaaaaaaaaaagaaaaacacagaatattaccttctttctctagcagggtatattagaatctgttggttttaggaactaataacctttccctggccctaaattacctaaccggcaccttgggtccaatctaatccaaatggttactttttcaatattgcttccttttccagaagctttattccgtgacttttaggttgaagacgcaaactaaataagagttgaaaatcaaggaactaaataataattccactgtacatatacaccccatttggtttctccatttatggtttcctataggttgtgttcaccttttggctctcgtgaataatgctgctataaacacgggggcacaaatacctgttcacatccctgcttttcattctttgggaaatggagaggtggagtgggagagtcagtcacatgctgccacaccatgaacctggaaggcacgatgccaagtgaaataagccagtcacaaaagagaaagtctgcagagttccactcagaggaaatacttaagagtagtgaaattgatagtaggacagcggttgccacggaccagtgggagggggattggggagttaccgtttaataggcacagagtttcccttttgcaagatgaaaaacggtgggaaatgggacgtggcaatggatgcaaaacaatatcaatgttcttaacgccactgaactcacttagaaattgtgaaaatggtacattttgttacgtatattttaccacagattaaaacgactccacgctaagccttgtagccctcatgtttctcggggagaaactctgggagagaggataagccttttgcacagcgctttccagagaatgtgtacaagaggcatggtcaggaggagaaggtgggccgggcaggcgagatgacccgaaaaggcagatccacttcgttaacaaggtccactttcctcagggatctcccgctaggtgtgagcattcttttgtcacaggaaagccttgagattctcctttcctttcacaacgccctcccagtcaaagacgtccctaaggttgggagctccctgcctacccactcctttctcttctgagccatatgccgcatccctcagaaccccattccctaagattctgcggtcttccatgttaggtcccggcaactgccacactaaccgtcagctgctcggaccccacccgccgaacgccagaacatgtgggcgcgggggcggggggggtcgtcctcaagcgccccggaagtcaccaccccccgtcgccagcggaggcgcccgggcggggcgcgcggctgcgattggcgggaagatgggacgatgcgttacgtgcggagatgcgtccccctccccggcgctcctgcgcgcggttagcttggggaggggcggagcgtgcggccctgggcggccgttaccgggaacagtgtctggcctcgggtcccgtgaccctcggcggagctggcgggagggggcggaagtggcaagagggcgtgaggagg

SEQ ID NO: 18665 - DNA, 2300 bp, Homo sapien
tgtaatcctagcactttgggaggctgaggcaagcagatcacctgaagtcgggagttagacaccagcgtgaccaacatggagaaaccccgtctttactaaaaatacaaaattagccagacgcggtggcacaagcctgtaatcccagctactcgggaggctgaggcaggagaatggcttgaacccgagaggcggaagttgcagtgagccgagatcacgccattgctccagcctgggcaataagagcaaaactccgtctcaaaaacaaacaacaaacaaacaaacaaaaaaacctctttcctgactgtaaaagtaaagcataattgttattgttaaaaatacagataatatgtgaagaaagtgaaaaattacctttgatattttgaagtgtatccttcaagacttttttctatgcatatataaatatatatgtacaaaaatggaatcataccttttagttcctgttttccatgtcaatagatatatagtgacatatttcatgtttttatgaatataccatgatttatgtattctattagtgacactgcaattgtttccaaattgtcactattgtaacagtcctcatcatcttctctccttaggactaattcctcctataagtagaattggtgagtcacagagcatgcacatttaaacactttaaaatacattgtttaccaatctcactgccagtaggaacgtatgtaaaggttcctttccccttgctcttgccaatataattatccttcttaatactcgcaaaataatctggaattaatgatcagaaaacagaccttccatcttggaggcggataagtggaaggtttattcctccccttacaacaacaacaacgacaacaataacaacaagacgtttgctgaacatgctggcatagaggacaagttaaaaagtttctggactcaaagggtgctcctccaaagctccgggcctccgggctacccctacttgaagccgctatgcccctctcctgtgcccgaggtggccgctgggtggcaggggaggcccgggccgacggcggtcccaccgcactgtcgcgaaggcaggcgaagaacagggccacactgagtggggacaactgggcccgggcccagaggacacgaaggaaggtccgggagaaggaattcctagtttcagggaagaaaaggtggctcgagtgaggaaactgcgggggcaacggtctctcgtcgccgggaccccgccgtgtgccgcccagggacgcgagggggcgctgctgccgcgccaggggcgagggtcccggggcctcctgagcacctcccggccctgcccggccaactcagactacacccggactctgcccaccgcgtttccgccctcggcctcgggtccctggagggctcgcgggtaggaagagtcggggtggcgggactttcgccgacacccggctccccgcctggtggctgcgcacacgaggccggcgacgggacttgcccgcgtctcagcgcctcctgtgtgaagcgggaccgctgcggtacctgccccagggaaggccgcggggagggttacagagcccgtaggcactggcggggatctttatacacccccaaaacacacacatcccacccagtacccagcacccagcacccagcacggagggcttattattaacaacttcctggaggccgcaggggcagtgctggctcactgtgtcccttctccctttcagctctccctagacctctgtcccaaatcagaaaagaattttacaaactgtgctttcctctcggggagcccccaccacggcgtaacccagcaggcaggaatggcacacgtgcaggaaaatgagttcaacagccttaccaggtggtgtcaggatcagcatctgacagtattcttgggagaaggggcgccagcctctcctggcctgctgtgcgctctgccaaagtcttcgctcgaccccgcacatcttgctccgttccctagtccagatcccagctggaggggccagctgcagccacccctaagaatgaggaaatgggagcggggtggggggctgggttctgtgttggcggttgccgtggctttgctccgagttctggagccaaaccgcccactccctgagacggctaggtcacagaagcagtgggtcagaagccagaggggacgtggggagtgccaccctggagcctaccggcacacctgctgagatggaggcctcagatgggcaagggggtgaaggggacaagccactagagcaggtgaagtggggtgtgagggagggagggaaggagggtcccggaggggctggttttggaaagtagag

SEQ ID NO: 18666 - DNA, 2300 bp, Homo sapien
catctgacaaagggctaatagccagaatctacaatgaactcaaacaaatttacaagaaaaaaacaaacaaccccatcaaaaagtaggcaaaggatatgaacggacacttctcaaaagaagacatttatgcagccaaaaaacacatgaaaaaatgctcatcatcactggccatcagagaaatgcaaatcaaaaccacaatgagataccatctcacaccagttagaatggcgatcattaaaaagtcaggaaacagctgggcacggtggctcaagcctgtaatcccagcactttgggaggccgaggcgggtggatcacgaggtcatgagattgagaccatcctggctaacacggtgaaaccccgtctctactaaaaatacaaaaattagccgggcaccattgggcgcctgtagtcccagctactctggaggctgaggcaggagaatggcgtgaacccgggaggcggagcttgcagtgagccaagattgcgccactgcactccagcctgggtgacagagactccgtctcaaaaaaaaaaaacaaaaaaaactgaaagtaaaactttagggaaagtaccctttattctctaaggaaaaggacccttctcgaaggctccgatagtgaggcactttctctaggatgagcctcacccctaaggcagcataggccaaggtatgatttggggatttccaccaaggctccccacttcccaatagcctctccaacaacctgtttctggtgttcccaagtccaccattatacttttgggtagagatacttttaaaaaataaaaattctagaagaagtaatacattttggttaggcgcagtggctaatgcctgtaatcccagcactttgggaggctgaggtgggcggatcacctgaggtcaagagttcgagaccagcctggacaacatggtgaaaccccatctctactaaaaatacaaaaattagctgggcgtggtggcgggcgcctgtaatcccagcaactctggagatagggcaggagaatcgcttgaacccgggaggcagaggttgtggtgagtggagattgcaccactacactccaacctgggtgacagagtgagactgtcttaaaaaaaaaaaagaagaagaagaaggagaagaagtaatacattttagtcttgagggttatttctatcttgtgagaaatgagtgtgtgggccaagagtaggtgaaacatatgtcgttggtatgtaggaagtgcgctggcctgggggacctcaggtctgagttgtcgttccagttctgccattgacttcctgcacaaccttggagaagtcgcctttcttcttgggcctctgttttcccctctgaacgaggaggtggttggtcagaattctctgttttgggttggttcattcattaaaagtttgctaagtacctattatatgttgaatactattgtaattgctttggatacagcaatgaacaggacagacaaaaatctctaaccctgtggaacttacattctaagggaagaagacagttaataaacaagaaatacaataattgaccgggtgtggtggctcacgcctgtaatctcagcactttggtaggcggaggccagcggagtttgagaccagcctggacaacatggtgaaaccccgtctctactgaaaatacaaaaaaattagccaggcttggtggcgcgctcctgtaagcccagctacctgggaggctgaggcaggagaatcgcttgaacccgggaggcggaggttgcagtgagccgagactgcgccattgcactccagcctgggcgacagagcgagattccgtctaaggaaaaaagaaagaaagaaagcttcaaaaccaagcctcacttgttgtccatttttgcctttatgcgtcccgattgttctcaaggttgataaacgaacccctggctcccttctctcatcttcatcttttgcacacgctggtttgcacatgttggttgaaagaacaaggctgtagtgtctcacaattcctctaggtggcagtgctgccttgactactggggatacttcgtgtttttggactgttcccaaaacagccacatttctgaaatctcttaggagtagaaaacattggaaagcccatagtcatcatggacaccctccagcccggcttcccttctctctgaaatcctccctgctttgacaaaactgtcagggtctagccaagccaggctggccccaggcctatgccttggccgtctcatcttgccacttccaggaggcgatgactctaaggaggaaagaaatggcgcttcctccccgcttcccccattcatgcttccc

SEQ ID NO: 18667 - DNA, 2300 bp, Homo sapien
gcttttatacctttgttccttctcagtctgagcattttcagaaagttgtattggcttgatacatgaacataatgttctagctagcatttaataaataaataaataaataaatatttgtccagtcctaacactatttgcctatcttgtacagtctatatagatacacagtctgttgctatctagaccagtctgatctaaagcattgtactatttttgcatatcattaaatagtcagcatagttgtacagttaatttgtttaaagaactctgtatttctactatagaggataaagattttaaaagaaatagttgacactactgctattttcggtaaatttatcttattggaaaaaatgaacattatgaagcatcatgaaataagtggtaactgatcaagtgttagactataccaaaaataagaaaagaagatattttatgtcaattttattttcttcattattttccaagtttcttatactgaagctatattacttgtggatttggaacaaaaagattaaatgtcatttttttagatgcagtacatgctgagtacataaaatatataaaatatttagagaaggaatcaacaattgatgagatgaattatgggacgctttcaggaaagagcatgtacttctttatgggcatgaggtcaactccaatttgggccacacacttattttcaatgctgccttgtaattgtatttaattaccttaagtcattcaggtgattggtaagaggtcatcaggtctaccaagctgaaaatatcaaaaatagagcaatgttattggtgttttataggttgcttcatgtgcgaaatggaaactgcaaatatcatttgggtgaagaaacatttaaattagctcagacatatatggataaactatcaaaacatggccagcaagcaaataaagctgcactctatggagaactgtgtgcactcctatttgcaaaaagtcactatgatgaggtaagtgttttaaggtacatttcactgtgaccaataagtacctataaaaacagagggtaaatcaaatagtcttctcttatttttcttacagatctcttttacatattaggtttatataaggcagtacacatttgtaatggaaaatttaaaatcagacaagccgagcactgtggctcatgcctgtaatcccagaactttaggaggccaaggtagaggatcacttgagcccaggagtttggggccagcatgggcaacaaagtgagagagaccctgcctctatagaaaattagccgcatgtgtagcacacgcctgtggtggtcacaactacatgggaggctgaggcaggaggatcccttgagcccagtaagttgagggtgtagtgagccatatttataccactgtactccagcctgagtgacagagtgagaccctgtctcaaaaaaataaaaaatcaggcaaaaggagtgtttgtgaggtgaatttgaaatatatacatgtgtaatttagagccctttcttttgttgtttttcttttaatttaaccaaatatttgcctaaattgtttggttgggcctcgtgttgtagtttttgagacaggatcttgctttgtcacccacgctggactcaaactcctgggctcaggtgatcctctaccttggcctcctgaagtgctgggattacaggcatgagccaccatgcccagcctgacagttattttccttctacatttggatttaggggtttatactgtgccttattcatgtctttgcagctctcagcacattcgtgaggaatgttgaagtcttggataattttgacagttcaatcttctagtgataaataagcttttcactgatatctacagaaaagtacacaaatcttacagacatggtttgatgaattagcatcatgtttttgtgttaggataggctaggttatgcagaggtaatatcaaccccagaatagcttggaacaataaaagtttctttctggctcataatatatccctgtcttcagatggctatggctgttcttaacattatacctacgctttgatcaagacacagcgtggttttgggtctatctggaacgtatctatctagaacattaccagcctgggcacaggggcagaaacttcatggagaagtactgccggctcttggacttttcttccagaagtggcacatttcacttctcatattttaattgtggaaagaaatcacatggccacacttgtctttgtttgtttgtttgtctgtttgtttgagacagcgtctcactccatcaccaaggtctggagtgcagtggcatgatcacggctcactgcagc

SEQ ID NO: 18668 - DNA, 2300 bp, Homo sapien
gcagtgtgtaaacggactaatacactcagcatctaaggtccataaagcaatcaatatgtgtgtctgacacacctttacctgtttacaggagcttaatacgggtcctgatttagccaaaatgtccaagaacatgtgcattcaatgttaggggattcatggatccctttaggtaggattgctggataaaatacaggtgtccagttaaatgtgagtttcagatgaacaacaaagttttttgttgttgttgttttctgagacagggtctcattctgccacccaggctggagtgcagtggcatgatcatggctcactcaacattctgggctcaagtaatcctcctgcctcagcctcctgagtagctaggactacaggtgcacaccaccacatgtggctattttttttttgtagagatggggtcttgctatgttgcccaggctggtcacaaataagtttttagtataaatatgtcccctgcaatatttgcagagataataattattcttttatgtggggcagggatcctgatcttcaaaagcgccagtgtctaagaagtgatgaaggatttgctgaatgaactgatacacttgagtggctccgaaggcatgagcaaaactattgcacagaacatacttacatttcaaaaccatttgttgtttatctgacattaagatgtgactgggcacttgtaattttttttttcttttttttgagacggagtctcgctctgttgcccaggctggagtgcagtggcgcgatcctggctcactgcaagctccgcctcccgggttcacgccattctcctgcctcagcctcccgagtagctgggactacaggcgcccgccaccacgggctaattttttgtatttttagtaaagacggggtttcaccgtgttagccaggatggtctcgatctcctgacctcgtgatccacccgcctcggcctcccaagtgctgagattacaggtgtgagccaccgcgcccagccttgtagttttttacttgctaaactggcaatctgatcttgaggccatccacagctttcctaggttcacagtatagagtaagaatttatatagactgaagaagattaagagtgtttattttttgtggaattatttaaccacttaacactgaagtaccaggtgaagggtaaattgaaataactctttccacttcttttagctctaaatatcaatcaggacattattattatggctgttttctggacttacatcgttatagagtgactatgagtttgatagtgtcaccaacaattatggccaataatttccatggtaaattcctagaacagaaagatgttgcatcaaattcttgaaatcgcagacttaggaaattaagttacataaacagcagatgttcaggctgaggaaggaaagaagctgaaacaagtactcccaattattcaacaatcccttgaagccgccactgtaactctgggaattgaaataccattaagtcctatcacggccaccacttagccttttttctcttactattatttgtaattccataatcaagctagttttcctacgaagttctggggcaggagttttcttttttcggaaatttcatttggataaagaaacatggtcaaaaagttacaacggtgcaaatggttatacaaagaaaaacaagtctctcttctatcgttacccctagttcctggaccgcgggttcttaacttgggttaggaactgcagtctaagggtttctagagtaatgtgaattttctcaatgcataattttcaatgtacagataattttgctcgtttgtggggagaggatccaaacttttacctgagcctcaaaagggtccgtgatgcagagaacctgctgaagtaaccgatggccccgagtgactcggaacagggggcgcagatatcctgtaataatttgtccccgtgtgaaaagtctacccctatccactccactccactccactccggggccgcttggaagggacgctctccgtgggaggcatccagctcttcctaagttttccgcctgccgcattcctcccctccggcgcgccggcgtgcgcttacgtcatgacgccgcacacgcagccccgcccctgcagagatcagcgctgggacggaacccgggttcctctcgaaccgggattgtgacgcttttggcctggctggccgctgttttctgtcccactttttactcgggcctgcgtccgctgccgccgtccctcagtttgcccccggaggaggcagggcggccgtgccttctgccgtgcgcccgcgtggctgccaccgcccctccgaatc

SEQ ID NO: 18669 - DNA, 2300 bp, Homo sapien
gtattagataaaaaaattaactcatagtgactaagctggttaattattgcccttaaatggatattaaaagcgaatttttctctttgataaagtaactagcaaatgattaaatgttgtgaaagtgtttcctggtgtatggattcactgaattcctttgacccacttaaacagaacatgtgacattcatgaaatagtaacttaatagctttaaaacagctgttctgtagctccaaattaatttagcttttctctctcaacatgtctactttatgagaaaaaagcgtgagaaatgagttgttcttttgctttcaggccctgtcctaccatgagctgaagaggcagcaacatacgtgtttggagtttagtagggactgagaagcggggaaaagaactgcctaaccaaaggtattgtttccacctgacttccaagatgtcagaaaattctccctagtagatactcttttatacatggacattagctattgttgttaaaatgaaaacaggttaaacctattacgttatcatcacctatcaataatttagactatcagcttatcagatttattagtcttgtagtgaaatcctgttgttaaacagcacagaaacaggagagaagaaagaattgtctaagtctgcactgtccaacagaaatataatatgagccatataagttgaaattttctagcaattagcaagtaaaaagaaacaggtgaatttttttctttttttcacttcctcctcttccaaggtgaaattatttttaataacatatttttgttaacccaatatatctaaaacattttcaaacataaatcaatataaaattattaaagagatattttgcattctttttctgtactgtctttgaaatccagtgtatgttttacacttacagcacatcttaatttgaactagacacatttgaagttcttaatagtcacatgtggctaccatattggacaagcaggtctaagtcagtggttcccaaaatgtggtccctggagcagcaggataagcatcaccctaaaacttgttagaaatacaaattctcaggctccaccccagacctactgaatcagaaactctgatagttgggctcagcaacctgtggtttaacaagcctttcaggtgattctgataacatgttaaatgtcacaatcagcagtctaaattatggggaactggtttttctttgctaagtacatttaacagggttcaaaattcaaaaagtacaaaaacatacacagtgaaaatcttcctttcctgccaggcacaaaccatctatctccctttcctagaggcaaccaaaattttatgttggtaggcagctgtcatgctggacccctattgacttcaacagcaatggcaccatgtttgagaggctgaagacgagatgcagagccagtgaatgagacacagggtttgtttaattaatttatttactttttgagacagggtctcgctctgtcacccaggctggaatacagtggtgtaatcatgactcactgcagtctcaaccacctggacacaagcaatcctcctgcctcagactcctgagtagctgggactacaggcattagttctggctaattaaaaaaaaaaaaattatagagatgggtcctcacaatgtttcccaggctgagacatagggtttattgaggagacttacatacagggcaatccagtggtggcaggctggacaggagaactgcatttgcttacaaaaaacatactggctgggcgcggtggctcacatctgtactcctagcactttgggaggccaaggcaggtggatcacttgaggtcaggagttcgaaaccagcttggccatcatggtgaaaccctgtctctattaaaaattcaaaaaattagctgggcacggtggtgcgtgcctgtaatcccagctacttgggaggctgaagcaggagaattgcttgaacctgggaggcggaggtttcagtgagctgagatcgtgccactgcactccagcctgggcaacagagcaagactccatctcaaaaaaaaaaaaaaaagtatactggttatatagtgttttcacttagcattctcaccctagcaacctccacctggcaaccttgatttaacccaaaacaaagggccttgatcccctgtatggcctgcattccatgggatgagatggggattcctatgttcctcataggtaaggaatgaatctcctgattggcaactcccaggttccttttttttttttttttttaagaaacatgtttattttcggtcaaccttatttccatgtggcttatgagcctgtaagacaa

SEQ ID NO: 18670 - DNA, 2300 bp, Homo sapien
aaaggagagattgatgaggcaggagcaaggaggataattgttggagcagtaaaactcttgaaaaggagacagtatggaagatatggatagtatcttgaaaaataaagtggatgagaagtgacacgaatagtggaagaaacaaagacggtgggctatgaaaaatgatggggagataccagggatcagtagctgacagcatctcagagtagcagcagtctgcataaattttaaaagcacttgagtttctgagggaggaaggaagagaagtggtttggaggtaatatgaggaataggccacagataagaatacctatgagaggaaaaataacctcctgtacttgaaaagttgcaagggaggtagttttgctaagtgataaaccgggtttcagttggaatgggaagttgatgggaacatttacagaagaggctaagaataaaggggaagtggttgatggcagatgttgaaatcaaaagtgtgaagtgaaatggttaggatatttggtgaagagtgggatatggaatcagagtaattgaagcagagagtagcatggagatactagagcaataaacggatgacgcagatcctactggttgtgattgaggtggaaaggattataaagcatgatggaattatcttttggtaatctcttgggtcaaacgtggtgaacggtaagatgaataatatagagctacacaaaccgttcttgtgatatggaggctgctccctaattacaatgctaatatttcatttaggatttttgtattcatcgttacaaaacagggtctgtaggtttccttttagtgttcataatgcttaggttttactaacagggttatgattacctctccaaacaagctgggattttttttttcaagcgtttccatgccctggaaccatctggtctagtgctttttggggtaatgaatatcttcaattgtatttatttttacttagttgatctattcagattttctacattttcttgagctgattttgcttatttatatttttattgatataaagattttttctatttttatttcttgtgccaactgtatgtacattccccccattcccgtttccatactgtttttaggccatttgaaaatctcaaaggttttacaggaaagtacagattgatgaagaaatggccaaaaacgggaaaagtgaactttaaagtgattcaactacaaaacgtatgctactgagcaaatactagtgtattcctcgctctgcggcttaactccatgaaaatccgtgcaaaggttttagcgttgggattgtgaccgactcggtgaagagaggggacgatcaccaaaccgttagagcactggggctcttggcagtgtttgtcagttattttcaagtgataacttgaagtgataccgcaggaataaaatgctgtatccagagctggtcggaacgagcactacctttaacaaaagctgaaaagatctgcctaggaattcgttagaatacagccctcttacgtctctgacatacctagttatgtgaaccgagactgtgcagctgacggtggaaatttcctaagtgctttttaaacaacagaactggactccctccctcctccattcccagtcgaatacgtcccacccagatccagctcaagggtgcagcacttgttccggccagctcacaatcgccctttggaagggaggtttcccgccatttcgcttaggaggagggtgaactcttctcccttcattctccactcgctgggggcccgagcccacaccaccttcctagcaaagcaagcagcgggacgccaaggccagcaggccgcattaagaacgctggactgagccaaaagcctacacagaccaagccgctcgggaaaggatcaacaactgccgacaacccggagggcgaaaacgcccgcggcgtaggggaagcaaactaggagatgcgcgggcccagcgccagcggcgggaggaggcagcgcggccgtcgcaggcgggagcgaaggcggggacggagggcgggctcgctccactcgactccggattggtcgagcttagagagccgagtgacgtcagcgggggagaacgcctgatttgtgtggtgggcgcgggcggtggggggaagcgcagtgcgcaggcgcaactgcctggctctgctcgctccggcgctccggcccagctctcgcggacaagtccagacatcgcgcgcccccccttctccgggtccgccccctcccccttctcggcgtcgtcgaagataaacaatagttggccggcgagcgcctagtgtgtctcccgccgccggattcggcgggctg

SEQ ID NO: 18671 - DNA, 2300 bp, Homo sapien
tttcggcctcccaaagtgctgggatgagaggtgtgagccatcacacccagcctgaagaaccatcttaagttagtacacatttcaggctctttttgtgttaagggcagggggaagaagagagggtttgaatcaaggggtgactgatgaccgtagacatctgggcgccagcaagggttcctcgaggcctgaagcctctctgttactggtcaggtcacaatactttctcaaactctcaacattgttacttgtgtgtacaccctccttttctccttgggggttagttttgggaagggactattatcatccttgctttaaagttaaactataaattcctcccttggttagcttagtctatgtgcagagataagcaaaagcagttaacttagatatcaccgatgggtgggagtggggagtttaggagcaaaatggagttagtcatgctaggcctccttttcaatgttacaattccacattatcaagttatttcaatcccacattatcaagttatttcaatatttccaaatatattcttcttcttcttcttcttctttttttttttttgagcgagagttttgctctgtcgcccagaggctggagtgcagttgcacgatctcggctcactgcaaccttcacatctcggattcaagcgattctcctgcctcagcctcctgagtagttgggattacaggcgtgcaccatcaaaacccgctgatttttgtatttttagtagagacagagtttcacaaagttggcaaggctggtcttgacctcctgacctcaagtgatctgcccctctcagcctcccaaagtgctgggattacaggtgtgagccaccgtgcccggccttttctttcatttctttttttaaaattttttaaaattttatgtatgtatgtatgtatgtatgtatgtatgtatgtatgtatgtatctatctatctatctatctatctatctatctatctatctatctgtcttgagagggactctctgtcacccaggctaaagtgctggagggcaatggcgtgatctataggctcactgcaatctccgcctcctgggttcaagcaattcttccgcctcagcctccccagtagctaggattacaggcattggccaccacacctggctatttttagtagagacggggtttcttcatgttgtccaggctgttctagaactcctggcctcaagcgatcttcccgcctaggcttcccaaaatgttgggattgcaggcgtgagccaccacgcccagcccaccacgcctgttaataagctataccctcacggacctgtcattggcattaaatttgataatacattagagtattgtatatgaagtatacgaaggcctgtgctgagtgttcaagaagtcagtcagtattattctacttatattaataaatgaactgatgaaatgacaatggcgagatctcgatcttcaacaataagggagatggaaactgaagcaagaagtggtctacaaacctagctcaaattgttgagattaccggccgtgccccttattcagatcaacccctcctcggctgatcgccggcgcgagccagcctaggctcccggaaggtaaacacatcgccaagggctgggcagaaggcgggtgtgggacgggtgagtggccagctaaaagtgattggcagctgccatgtccacgtgctccgagcttggaaccagctgtcgcgagaattcgatgtaaacagaccagtctccctgtcctccggctccaacctgaaacgctcacgtgagcgggacaggagtctggatcatgttgcttttcttttcaaagccacgaaggttctgtcttccaaaaaaaatgtacatgttcgtaattattccccagctgcctgcgtttgcaaccgaacctgacacctcggcttcacccgaacttacatgctgttgtgttttccctccagccccagcggattggacacattcagaaggcgggtccgcctctttcctacttgctggttggcgaagctgacctccaagggcggtgcccggccatagccggtttgcttctgggattggctagagggggtggttccgctgaggcgtggtaggaagtggctgccgtcaatcactcggggagactccaaacagtgagcctagagctggagactagcgttaaccggcggggcggccggtgagagggctggcagggctttggctttggggaggcttggggaggacgagggactggcggcgtgaggggactgggtcgggctggcaggaattcgacaggagagaggtgtcgatactggagggggaggggaacagtgcaag

SEQ ID NO: 18672 - DNA, 2300 bp, Homo sapien
gaaaaaaatgtatattctgttgatttggggtggagagttctgtagatgtctattaggtccgcttggtgcagagctgagttcaattcctgggtatccttgttgactttctgtctcgttgatctgtctaatgttgacagtggggtgttaaagtctcccattattaatgcgtgggagtctaagtctctttgtaggtcactcaggacttgctttatgaatctgggtgctcctgtattgggtgcatatatatttaggatagttagctcttcttgttgaattgatccctttaccattatgtaatggccttctttgtctcttttgatctttgttggtttaaagtctgttttatcagagactaggattgcaatccctgcctttttttgttttccatttgcttggtagatcttcctccatccttttattttgagcctatgtgtgtctctgcacgtgagatgggtttcctgaatacagcacactgatgggtcttgactctttatccaatttgccagtctgtgtcttttaattggagaatttagtccatttacatttaaagttaatattgttatgtgtgaatttgatcctgtcattatgacgttagctggtgattttgctcgttagttgatgcagtttcttcctagtctcgatggtctttacattttggcatgattttgcagcagctggtactggttgttcctttccatgtttagcgcttccttcaggagctcttttagggcaggcctggtggtgacaaaatctctcagcatttgcttgtctgtaaagtattttatttctccttcacttatgaagcttagtttggctggatatgaaattctgggttgaaaattcttttctttaagaatgttgaatattggccccctctctcttctggcttgtagggtttctgccgagagatctgctgttagtctgatgggcttccctttgagggtaacccgacctttctctctggctgcccttaacattttttccttcatttcaattttggtgaatctgacaattatgtgtcttggagttgctcttctcgaggagtatctttgtggcattctctgtatttcctgaatctgaacgttggcctgccttgctagattggggaagttctcctggataatatcctgcagagtgttttccaacttggttccattctccccatcactttcaggtacaccaatcagacgtagatttggtcttttcacatagtcccatatttcttggaggctttgctcatttctttttattcgtttttctctaaacttcccttctcgcttcatttcattcatttcatcttccattgctgataccctttcttccagttgatcgcatcagctcctgaggcttctgcattcttcacgtagttctcgagccttggttttcagctccatcagctcctttaagcacttctctgtattggttattctagttatacattcttctaaatttttttcaaagttttcaacttctttgcctttggtttgaatgtcctcccgtagctcagagtaattcgatcgtctgaagccttcttctctcagcttgtcaaagtcattctccatccacctttgttccgttgctggtgaggaactgcgttcctttggaggaggagagaccctctgcgttttagagtttccagtttttctgttctgttttttccccatctttgtggttttatctacttttggtctttgatgatggtgatgtacagatgggttttcggtgtggatgtcctttctgtttgttagttttccttctaacagacaggaccctcagctgcaggtctgttggaataacctgccgtgtgaggtgtcagtgtgctcctgctggggggtgcctcccagttaggctgctcgggggtcaggagtcagggacccacttgaggaggcagtctgccggttctcagatctccagctgcgtgctgggagaaccactgctctcttcaaagctgtcagacagggacatttaagtctgcagaggttactgctgtctttttgtttgtctgtgccctgcccccagaggtggagcctacagtggcaggcaggcctccttgagctgtggtgggctccacccagttggagcttcccggctgctttgtttacctaagcaagcctgggcaatggcgggcgcccctcccccagcctcgctgccgccttgcagtttgatctcagactgctgtgctggcaatcagcgagactccgtgggcgtaggaccctccgagccaggtgtgggatatagtctcgtggtgcgccgttttttaagccggtctgaaaagcgcaatattcgggtgggagtgaccc

SEQ ID NO: 18673 - DNA, 2300 bp, Homo sapien
atatgtatttccagcatcagttgaaatgattatatggtttttatccattattctcttgatagaacatgtcacattgatttgtgtatgttatactgtccttgcatacctgggataaattccacttggttgtgatttttttttttgatgtgttgttgaatttggtttactagtattttgttgaggatttttacatcaatgttcacctggaatattggcctctagtctagtctagtctagtcttgtctggtcttgtcttttcttttctttccttttcttttctttttcttttttttttttttttttttttatgtatgtgtttggttttggtttcagagtaataaaagcattgtggaatgaggttagaagtattccttcctcctctattcttctcaatagttggagtaggattggtattagttcttctttagatatttggtaaaacatctaaaattaagcagtgaagccattggtcctggatttttctttgctgggagacttattacatcttcagtcgcattacttgttactggtttattcaggttttggatattttcatgattcaatcttgttaggttgtacgtgtctgggaatttatccatttcttctagattttccaacatattggcatataattgctcatagtagcctctaatgatcctttgaatttctgtagtatcagtcataatgtctcctttttcatctctgattttatttgagtcttctctctttttttcttagttcagctaatgatttgtcaattttgtttatctttttaaaaaaccaacttttcattttgttaatcttttgtattcttcatttcagttttatttatttctgctttgatctttattatttatcttctactaattttgggattgggttcctcttgcttttctatttctttaagatgcattgttagattgtttatttgaagttttcctttttttttatttaggtgcttataactataaacttccctcttagtactgcttttactgtatccatatatatattttcatgttaagtttcattcacaaatatctttattctactgtgctttttctcttgtctggattttttaaaacactatttgacaattgttttaggtggtggaaaattaatttagtcagtgtagaaaacttaagtatctgtgagctgccttccttttagaggctatgcttaaaaatgcttataacagtatcaaattttccttagctttctttaatttttttctgaaataagtaagtggagatatttttgctcaagttgtcaccagttgactgatattgagataaaggtagtaaattcaatttgctaattcagaaatactggagattctttattcactgtatgataagtgtcatacaaattaactttccctggctcaggtctgtggctcaccacttgttttttgtaaataaagttgtttttttttttttttaacataactgcactcatttacatatgttctatgactgctttgacagtccaagagtagagctgagtaactgcaacagacagtggagcttttacatcctacaaggccatatggcctcttacagaaaaagcttgcagatacatgagccactgcagatacatgaattattgttgttatcagttatgtgtgtgtgttggggggcaaagggcattgagtgttttaagatcttctttctttgcatttcacctctcttcaggatcctgtatccctgactattgaagtaacattctacctaatggagttttgatcaacagtcattgtgaaatgcatctgtagagtaaatttttatttattacctgatcttaggtacatttggtaatgaggcaatcatttatattcatatttggtgatgtgtgatactcttagaaaaatccaagtagtttgagacatttttgtatcttttcttatctcatttctaggtacaggacatctgcttcagccatgactgtcgctgggttgtggtcagtactctccggggtacttcccacgttttccccatcaacccttatggtggccagccttgtgttcgtacacatatgtcaccacgagtagtgaatcgcatgagccgtttccagaaaagtgctggactggaagagattgaacaagaactgacgtctaagcaaggaggtcgctgtagccctgttccaggtctatcaagcagcccttctgggtcacccttgcatggtaattttctctgtctccactgttatcttgaatcttccttccctttgtccttatttttacagatctgggataaaactaaacttgttatagtctgttcatgtaaaaagaagatcttagg

SEQ ID NO: 18674 - DNA, 2300 bp, Homo sapien
catcaaagtattggtgctttattttttgtgatttattgttttatcaacagaagtgagcacttgtgttcagaaaaggataattcacacttaaatcttgtttttatttaatcaagcttaaataacaggttagagtggtagcaaaaaaaaaaaaaaaaagtctaatatttagtttgaatcttaaattggtcacccagagctgctctctctaggagcgaacctctctatttgtcaataaacaagagagagatacaggctcccagataacaggcatttggtaaactggcgacagtcatacaagcgagaatgttaaaatgacttcagctctttctagcttcattatgtcagcctggcagatcacatatggcattatggaaatcagcaaatgaaaaccatattgatcagcattgagaacaaatgtaaaaaaggtggtctcagggaggagcagagaagaagaatgctttcctgttcaacctgataggcccttgttaaggccttttaatcatttattaacataaccctccttcttccctctccactcagattacctcagccacagagcatcctgctccatttatcttttaatgcttcctttatttaatttatttttaagctctaagttatactcttatttcagaattgagttttacttttcatggtattgtttaaagtgacttaaatgacttttcccaacaagctcaccaggcattcaaaggaagaaaagcatttgctgagattcacctatcagcaaataatttactcggtatgcaccacaaacaaacgcagagagacagagaaagacagtcagccagacacattaaaaaaaaaaaaaagaaaagtaaaatctgagttgttactaagcctaattctctggttaaagtttgggtcaatgtattcattttggtcttcttttcagggattggaattgagcctggtaaaattccttaggtctaaaactggaatctcaggcaccttctctttccctcttcattttctgagttcgggagaaaggtggacttttgttttatcttgtttcttttgggggaaacttagagtaatatttggtctgccaaaatgagatagagaaatggaaatacgtgctttgtggaggatcctgttttccttgagtgtccttacctgaaatggtctctttggttttgtaggttcagactgaggttggaacgggcttgcttctctctctcaccttctccctacccaacccctgcctccccttttatttttatgtcgagtttcatcatttggtaagaaatttcagagggatttttaaatatgaaactgtgtctttttgtagttgatgagtaacctgtggatgtgaatccttggaatcctaattggcacataacaataattgtttctatcctgctataaaccataagtaactcctaaaaaaattcacatgcacacaaaaaatctgcagtgtggatataagttaatgccctgaagctggtacatacagaccacctcaacgatggactcctttatgaatgatttaggtaattgacacaatttaatatttgcaattatttttcctttgaaacaacacttaaaaaaaacaaattctacaacatttaaacagttgaggcatcactctcctataaatttagtattaaatttcaaaatacgtatttgttttaaaaagcaaatgtggttaatctcgaaatcattgaactttctctttgctctggactccttgtctgaggctgtttgggatggattaattttaacttttctttcctgtttctttgctttcccagtgcatctgggggaaataactctgattgatttggatatcaaaagatgtacaatgtgaagatctaatttatcaaaacagaattcaataattttattcattttggctctcccttgagactccaaagatatattcagtaatatatttgaaaaatccaggtataaaaatgtcttttatcttctcttcatcttgtatactccttgatttctaagtacttttcctcttagactcatattactatcccactttcctttctgggctctacatcaaacagtgtaggaattacagcaggagtgctatctgtggaagacttactccccttgtttgttgcagaagagcagaacattaaacagtgagtggactatgcagaaacgctctccctctccggctcttttctccctccctgcctctttttttttttcattcttgcctctccttctcttcctctgtttctctctttctctctctctctctcttcccccccacccgcccccattcccaatgggagtgttgtttatagagcattataatt

SEQ ID NO: 18675 - DNA, 2300 bp, Homo sapien
tggccaagatggcctccatctcctgacctcgtgatccgcccgccacggcctcccaaagtgctgggattacaggcatgagccactgcgccctactgctatacacatttaatgtctacactgtgatgagtatggagatacgtatatacctatccatcacctccaaaagttacctgctgctctggcagaatctctttcttatttaaagctgagtaatattccattgtgtctatatactatattttctttatccattcattcatggatggacatttagtttgcttctacatcttgactattgtgcataatgctacagtgaacgttccatacagtgaagtggagatacctcttcgagatccacatttcagttccttttgatatatacacccagcagtgggactgctgggtcatatggtggttttatttttaattttttgaggaatgtcataagtgtgtctcaagaaaatataaagacagtataagaagacttagaattgagtacagtttgattgaatcaagggtaatcaccattatcctgattttcaggactttcattcacttccttcatgtagcacagttccctgccagaaatatccatcatggacgaagtgactgctagagacttcagggaaaataataacttataactattttatgtagttgagggatgagtgttttggttctttcctaaagagttggaatctgctctgtcaaccaggctggagtgcgctggtatgaccataggtctctgcagcctcaaactcctaggctcaagcagccctcccacctgggcctcccaagtagctgggaatatcagtgtgcactaccacaacctgctaattttttaagttttttttttcaagagacagagtcttgctatgttgccccagctggtcctgaactcctggcctcaagtgattctccctgtctcagcctcccaaagggatgagttttaatatgctaattacttcaagttttaaaagaataatatgtcaaattaaagcatttttaaacctctttttttaactcaagtaatacatatttattatttaaaaagcttaagaaaaaacagaagaaaaaagaaaactaaaatcacttgtaatttccttacctacagttaacaactattaacattatggtatttattaagattcttctatgcatttgtatacacacatatatacgctattgtttgtaaaatgaaatcacactgagcttatttaccattaggtaatgagtcttacctgtccagtaatgaatgtgttttcctttgcttttttacttagcactatattgtgaatatcatgaacaaagacagtttggaaacagggtgactagaagtcaacaaaaatatgtgttacaaaagaataacaataggtaaaattcagagtattattttaatttactgttaaaattacccaaatctcacatactttattcagtctatatttttaaaaattggatatataggcccggcgcggtggctcatgcctgtaatcccagcactttgggaggccaaagcgggcggatcacgaggtcaggagatcgagaccatcctggctaacacggtgaaacttcatctctactaaaaatacaaaaaattagcagggcgtggtggtgggcacctgtagtcccagttacttgggagaatgaggcaggagaatggcatgaacccaggaggcagagcttgcagtgagccgagatcgcgccactgtaccccagcctgagcaacagagtgagactccgtctcaaaaaaaataaataaataaaaaaggatatatagggaaggagcaattttttaaagatttaactgcaattgcatagtattttgtgatttcattattcatctttctaaatgtggtgtaatagactataattttagtaagtgtatcagtccattctcacgctgctgtaaggacatagccgagactgggtaatttataaaggaaagaggtttaatggactcactgttctgcatggctggggaggcctcaggaaacttaaaatcgtggcggaaggggaagcaaacacgtccttcttcacgtggttgcagagagaagaatgagtgcccagtgaagggggaagccccttagaaaaccatcagatctcgtgagaaccaactcactaaaacaagaacaggatggggaaactgcccccatgattcaattatctccacctggtccctcccaggacacatggggattatgggaactacaagtcaagatgagatttgggtggagacacagccaaacgatatcagtaagtatttatttttatttattttttagagacagggtcttgtt

SEQ ID NO: 18676 - DNA, 2300 bp, Homo sapien
ctaatgaaatggactaatgtctaaaacgcacacatttagatgtacacatactcttacaaggacaaaagtatgtgtctacacacacacacacacacacacacacacacacgcgcgcgcgcgcgcgcgcgactttgcgaatgtattcacggattcctaggccggtacctgggttcccggctaaggaaagctgccctggttattatctggtcacctcaccggctgcgcaaacgtgtccacaacgggtccctccccgagaggccacatctcgcctaaggtggagccagcaggtatttgcctgtggaaaactgcagtggatcctgccccgtctgcgtagactgcgcagctcggagtcaaagattcgttctggccagagaggaggtactaagagaggtgcgacctagccaagaacgaggtcgtggagaaaaccctgtgggggcggcgctcacatatgcggtgatgaggagttgtgagggccctggggtcggccccgaaaagtagggataacggtcgcagaggccatactgcttccgccggtcccgaatccgcactgccaggagagatccggccttcaaacgctgctcccaacgttcaacaacgaagtgccctgcgaccggtgtgcgcagtgggcgggcgcctgcatgggtcaatgttggatgtacgcgcccaccacgcggttgtacgggtgggaatgtcacccgtggctagtgcatgctctgtcttttccttcagaaaacgaccttcaggaatcagcctgagtgttcgcgcccgagcccgattggaagcaggtgcgtggtcgcttcactctccccgtgcacaccttgagttatagctctcgctgcgcacagagggcaccacacggggcccgacacacacacacacacacacacacacacacacacacacacacacaccatcacttcatgggggggaaactgaggctgccggaagacagaaaacgaagactgatcacagaagagggggcttcaatcacaggtgctcgcagacaccccaactccctcacgcgttactcagcactccttaacttaggagacgtgcgcttccgagagatgagaagaaactaaaaaagtggttggcagggcgaagagaggaagccggtatttcggaagaaggagactttcgtctccggtaccggatagggcgaaaattcgttgggtcgcgggtggagaatccggggtccgcccgcgcggtgccgccctgtgctcagcgaaaggtgcgctcaccttcctggccccgaggatccgctcctcccggccgctggaaagctcagggcggggcccgggcctgcggagaactccaggttccttccgagtcttccggtgaaggcgggcgcgggtagggggtccccgcgtttccccagcgcaaggccgcgtcccgctcccgcccgcgccggccccagcagggctcggccatggctccactcaccagctcccgccacctgggatccgctcccggacctcggccgcccgagcctcccgactcgcccgcccaccggcctcgctttccagtgcctgctgtctctttccggggcgcagggacccccaggcggcgccacgacccggagctgggtcggaggccaggctggggctcgggccagagcggccgggcctctgggcgcgggagaaggagggcgccccctctccgctcggggtcgtgtcaatgctttgcacttggggccggcgtgcggctgcgggtccttccccaaggccccgggacccgggctcccctcgcctcaggccctttcggcgggtcaggtcggccctccgcgctctccagtccggcgcaggcagccgcaggcgcgggcgggcggtgggggccggggcaggaggaggggtctcggggcccggcggcccgtcattggttaatattttattctgttgacatgttttcttactgctgaggcttccgacaccttctcccaggccccccctcccggccggagcttggcctgagctgtcaaaaccccgcccccggagacccacaattggtccaaaaagcgtaaaatcagcaatcaaggggggcctggctcgttagcgcaggggatccgagctgggcaggacatgtgagatagtcacagttttccagagatcacgacaagatctaaccagtcgcgcgtggtccccggcgccggagcgggccagctcagcccggcccagcccggccccgcgcagagcccccgccgcccccgcgcacagagccgggtgccccttgcggtgcgccggacgggaagccccgaggagcagctgctgcgcccgccacccgggtcgtccgtccaccgcgcg

SEQ ID NO: 18677 - DNA, 2300 bp, Homo sapien
cgccggcgcgggacgcggggtgcgtcccaggccggggctggactccccctgccggccgctcccgcagctccgcgcaacgggcctgggcacccacccgggccgggaggagagcagccgagcggcctggactcctggcttctgactccctttccgggaaaccacactggaaacccatctcctttcaatgcttctgggtgggtgggctgggaggatgggtgttccttgtccaacctctcccttcggaggaggggtttggctgtgtcccacccccgtactccccgccaaatatcgctgagcctagaattctttcccctctctctgcctcctgaacctcaaagacaaacatttcctccgcgtcagggctgttggctagagtggcaaaatctggactaaaaggtcttactttaactcatctatctaaatccctcttgggagagtggagagtggggtcagtgggctatttccattcctgcctcagtttcccctgtataataatgggcttggctggggtctctccggggtccagctgtgtcagtctccattaggctggtccttccccgagacccactcctgcaaggacagctgcctcccaccccgcgccggtgagctccccctccttgcccagctagcaggtgtctccagcccccacttctagcagtgggagctgggcgggcactcctttagccctgggtctggtcggtcaccgagcacgccacctccttcccagttctctcctctttaagccttggggaccctgaacgccctgccccaacaggctgcccaccttgggcactgcacagggtggggcttggggagggtgctggcttccaaaacaccagggacgttgagatggaggaacggtgatggtgaaggtggaatggacagttgggcccccagactcccaggacgcctttgtgggccgatacatttgcaaggagcgagagagagagaaccaggcccgcctcttcaggatggtgctgcccccaggccacgccgaatgcggctggagcagggaggggactcagccagtgcacgagtgggaggttgcagtagaacgtatcccaaccccagagggtgggttctggcttccctgcctcagacctgcgggcaggtccgggaacccgacagggacagagaagcccgttttccagcctaaatagaagctcgtgggcagcgcgtttgctggaggtcgctttgggctgaaacgcctctcatactcctagaggagcggcgcgtttgcgtcccgcggcttctcactttcagcaggacattaggagggagacgagagtcggctgcgcgcccgcggcggcctacgtacagggctgcggacaccagggggcagcaccgacttagggtcgcgggaggggtgcgggtgcgggcatgggcgcgggggaggcgggtgcctgcgaaggccgggcggggcggcctagtcgcggccgtttttaggccgcgtcgttgctgcagcaacccgggtggggtggggtgggactccagggcctcgagatcccccacaccactttcgccgccacctcccgccgcacatgtcccctccgagtcgcccacccggcgctccgcggggccccagctggtagcctgagtgcgactgcgggaacccgcggccggcggctgggccttgtcccagacaaaggctaggccactcccatgtccaattaagccaccctcctccccggcctcccagccctcattgtccccggggtcgccaattagcctaggcgcccggcgtacccgccgctccggtgccgcaaggcctccttaacccttcagggcctggcccggggtccttggacggcagagccgccggcacacgcgtggcaggagggccagtgctgggacgatggcgatacctgctggcggcctagcctgtcgcctcgggctctcgcgtgtggggcgtgtgaggtctaagagggaattgtgcgtgtcggtgtggggtggcgcgtgcgattcccggaggaactcggagatggagggtgtgagtgcaggggctccgagagacccctagcggctaagccgcccggatcccaaggcccaggggacctcatttcctctcgggttaatcggaatcttccgagccctcaagcccttcctcctccactcccccgccgctgctgtggagaaccggagccaccggtatggcctggccctgccctcccgaaggccgcagctcccgggcccgcctccccagctgaccgcgaactcctgcgtggggtgctcctggggcgggaggggcgcgctcagcctcgctctccccgggactctcacgctcaagcgccccggcttga

SEQ ID NO: 18678 - DNA, 2300 bp, Homo sapien
aaagcaacagaccccatcgcaaaggcagcggaggttgcgggccgcacccgcggaggagtggatgtgaaggacgagagcggaccgctatgcggtgctgagtgcgggaccccgcggtgctggcggcggccgagcgcgcccaagctcgaggtccgagaggaccgcgaggacggccgccccgggccagccgggcgtggaaaaaaggaaattgctgggaagggggcaagctgtcccgaggtctggatgtggcttcgtggcggagagaaaaggaagaggcaaaccctgagcccgggagggagagcactgagcaggcctcgtccccagtccgagctgcgggaccggcgtcagtggacgcgggcggtgaaccagctcctcacagggcagggctgagcgcgtaggactgagagcgcagggcgcgagccgcagggctccgctgcacggctccgggtgtgacaagagcccagcagaggaccccatggccatgcgggccaagcgcgagacggcccctccttgcgaccccgcaggccgccacatctgggaccagcggatcgcttggtcgctggagccgatcccgccggggccctagatatagttggacccagcgcgctggccggagcgggcagctaccctactggcgcagcggccctgtgtggggactcctaggtttccgaggctcggcccgcgttcgcacgtggcccgaggcgggtgctggcgctggccatgtccagcgagtctcactccctgcaggctgtggccgaagactggtccgcctgtcaaccttatctttatgggtttttcccaacccagactggccccggcccctttttatctcctgggttgcacttggcttgtttactttgcgaggtcctgggagtcgaagtctaagcccgggatgaggaggcctctgaacaagatgggcgagaggcctgagcccggggatgctccgggagggcccggggagagcgggaagaaggtaggaagagaaaggcggggcattccgcctcaagaagggccgtcagacctacagaaagctccgctggagcgcccaggtccagcaggatggggaagagcagggaggtggaaaggggaagcggagcaagcggggcacacccttaagggatgcgggcaggctggcctctcaggctgtgctctcatcccgaggccccaggacctgcttcgggcagggagcaggcacctgagtaggcgagggaatcagccaagacagccgaagaaatgtagctgtgccaggcagggctaagcggttcctgtgaatgggcccagcctgctggcctggtccttcactgggaagggtgtgggtctttaggcccaaagcagagccctgtggcgctaaagtgtgcctgagtgagcctgtaggttcgaactcgagcaccaggtaggggaggcctgggctgagggcagagcctggatcagtcacccaggagagtgtggctgctcaggctggtgggatgctgtgtgaggggctgtgtttgggtgtgaggatgtctgtgccagaacgggaagaggatgtgtgtggacggggagtgtgttggagtgaaagcctttggttcaggaagtctctacctcagtgctgtctgaggggttgggtgagggcagatgggtgagctgggcctgaggtcctgaggccctctctgcacacaggtgtggagctgcaggagcctgggccctgccctccagcctggctctcctttcctgcatggccaggaggtgtcctggctgtcctgggcccacagagaggcctggaccccagttattggggaacagccgagaaggcccaggcctcaggctccaccggagctcagtaggagtgagggactcggggtgcagctgtggcaatgccgagagggcggtccctcccctagacctactcatcacagaaccccacacccaggggcaggcagacattgaactgccgcagaccctcccaggtccacagcctgaagggaggaggcgagggacctgccttccttgcgggttccctcctccagctcaggagggggcggggtccacgtgctccagggctgcctccgcgccccgcacgaagtcccggaatcggctggagagggccaggggtcctctggcgagtgtggacctgggcgagtgactcgttgtgtgctgtgcccgcaggagatgctgcaggataagggcctgtccgagagcgaggaggccttccgggccccgggcccagcgctcggagaggccagcgcagccaacgcccccgagcccgcgctggcagcgccgggcctcagcggagccgcgctaggcagccccccgggacccggggc

SEQ ID NO: 18679 - DNA, 2300 bp, Homo sapien
gtaatcatgatctgacttttatgataatcattctcactttttctttctctctttttttttttcgagacagagtcttgctctgtcgcccaggctggggtgcagtggcgtgatctcggctcacttcaacctctacctcccgggttcaagcaattatcctgccttagcctcttgagtagctgggattacaggcatgccaccacactcggctaatttttgtatttttttagtagaggtggggtttcaccacgttggtcaggctggtctcaaattcctgaccttgtgatcctcttgccttggcctcccaaagtgctgggattacaggcgtgagccaccacgcccggccaatattaagttttctaagatttattaatgtggttgtgtgcaacctagtttactaattttcacaatatgccacaatttatatcttctgttctttttaagtggtttgtttatatgtctctctttctcatttgatgaacagaaactgtgtcttacctatctttgcatgttcctcccatttaacctgctcaacccagcatatagcacagtatttgcctatctcagctaggacctcaatactgaattactaccctattgtgcttctttagtgatcattttcttccttctatgcagcacctattccaaatcttttccatcatacataaacctttaactctcttgccttcccctcactctcagcagacagctcctctagcctcttagaaaaaaaaaaaaataaatgttaccagatgggaactcctttgacatcgtgctaccaaacctaaaaatctgcttgcacccaaatccatatttttcttctttcctcctattacaatgaaaaggatgcctttcctgctattcaagattagtcgttctacttgtgccatggatttcattcctggctcctcagaaccttgactgatcaacttccctctttcatttgtatttaactactccttttagaatttaaacatgctcaggtctcttcttaggaagaatatgtgtttacctatccgccaactataattatgtcttcagctactgcactgtctcctcccgcacagttaaacttcttataagagtactctgatctaatccaatctttccatttcttcaattcctacttctcagcccactgcaatctaactgccttctgagtcatcccctgtaactaaagcaaaaactctcttaacgtatatttagccaacataatgcaaattgactgatactctctgttgccttcgtgaaacatattggtggaagccaacggcacactctatagctaacgtgctactgcctagtacatacgcggatttttgttttttggttttcttttctatggattttttgttttctctatacagttataggcttaccaagaatcagttgtgtttatttaacctatttatgctgggtattcttattactataattatgtaatttaactgattattacgtaaactcattatataactgttatatgaaatataaatagaaaaaataaaatagttgtttctgtgcaaattaaattgaatggtttggaaacatttacaattttccattcattgggggagcaagaaaagatcgagggaaaccatacatatctaggattctgcgttcagattgcttcatgagcacctttgagttcttggtctattttaaataaactaaaacagggaatgatagacaatacctttatagatatgatttatgtgagaaaaccgaggctgaattccaataaacagataatactcaaagaaaggtttacggctcctatcaaaagattggcaaataaaagtacagtgatatgttttcagttaaaacagcatgttaaataatgtaaattttaaaaaatgattccccaatttagtcattttttcaaggaactgaccattaaccaattcccaagtgccactcacaccgcaccactcagaccgcgtaacttacagtctctaaatccaatagatccttttccattccaacttgacctcatggcagtgtagcactgctgacaaatgtctttttaaatgctctctttttgcttcccgctgcaacaagcgtgggtcacgctctcgctcgcgctctttctgccgccatcttgcttccgcgttccctgcacaaaatgccgggcgaagccacagaaaccgtccctgctacagagcaggagttgccgcagtcccaggctgagacagggtctggaacagcatctgatagtggtgaatcagtaccagggattgaagaacaggattccacccagaccaccacacaaaaagcctggctggtggcagcagctgaaattg

SEQ ID NO: 18680 - DNA, 2300 bp, Homo sapien
ttctgggtgtatataagtacctagcagtggaattgcagaatcatatggtaatgctgcatttaactttttgaggactcaccatactgtttctcacagcaactgcattattttccattctcattatcaatgcacaagggttccaatttctacacatccttgccaacagtttatgtagcagcatatatcagaattgtttttgctgacactcgttattttattttttgtataatagccatcctaataggtatcaagtgatatcatctggtttttatttgtatttcctaatgactagagaagttgagaatcttttcatgtgcttattggccaattgtatgtctttttttggagaaatatctattgaagtcttttgcccacttttgaattattgggtttttttgttgttgttgttgagctgtagttatttagatattctggatgtcagtcctgtaagagatatatactttacaaatattttctctcattctgtgggttgttttttcatttattcatagtgtcctttgatgcagaaaaggtttttaatcttgttgaagtccaatttatctttctcttttcttgttgttgcctgtacttttagtgtcacatccagtaaatcatggccaaatctgatatgaagatttcccctatgttttcttttcctttttttttttttttttctgagacgggagtctcgctctgtcacccaggttggagtgcagtggcgcgatctcggctcactgcaagctcagcctcccgggttcatgccattctcctgcctcagcctcccgagtagctgggactacaggcgcccgccactaagcccggctaattttttgtattttctagtagagacggggtttcaccgtgttagccagaatggtctcgatctcctgacctcgtgatccgcccacctcggcctcccaaagtgctgggattacaggcgtgagccatcgcacccggtctcccctttgttttaagagttttacagtttttggctcccagtatttttataagattctctccacagttgttaagttcccaactttaattttgagatctaatctctctaggagtgaaatgaataaggaaatactatagcgaagacatggtagagaatatcacattttacttttttttttttttttgagatggagtcttgctccgtcacccaggctacagtgcagtggcgctatctcagctcactgcaacctccacctcccgggttcaagtgattctcctgcctcagcctcctgagtagctggggttacaggcgactgccaccacacctggctaatttttgtatttttagtagagacggggtttcaccatgttggccaggctggtctcgaactcctgacctcgtgatccacctgcctcggcctcccaaagtgctgggattacaggtgtgaaccaccgcgcctggccacattttattatttttaagcttaaccattttctagattcttattgaaagcagttatacactggatgggatcacagatatcatctggttcagcaccttcattaaaagtagatgaaggctgagactcaggtttcaaaggaatgtaagaattttataacttgttgctaatactttaaaaactttcagtaaaaattatccttctattttctcatttaataaaaaagtataacccaccttttagtctctttaaccataatactgttttctattttgtaactcatcatgtagtagagcatgcagagagctctggactgggagttaggaggcctggattttaattctgcttctgccatgacatatgtaatgtttgaaaatgaggttaggaagtagctgataaaagatagatggttagatgatttctaatattccctctgagaatcagttgattctatgattaatggctttattaatatcagaattactgaatttaattaatggtaaggagaatgttatttttgaatgggaaggtaccagctctttcaaatgagttttaatgtaatcagtttttatattgtatgtagctgggtcataggttttaaaagttttgccacttaattagcactttctttgcatctagatttgcagatgattataaaattgcgattcaacagacttactcctggacaaatcagattgatatttcagacaaaaatgggttgttggttctaccaaaaaataagaaacgttcacgacagaaaactgcagttcatgtgctaaacttttggtgcttaaatccagctgtggtaagctcatcatgtaaatggaaattttgtcttcttgctcagtaccagcattttaataaatgtggttgactctttta

SEQ ID NO: 18681 - DNA, 2300 bp, Homo sapien
aatattcatgtattttaagttaaggttataaaatttgtcacaatgtgtttttttattcaagtgaaaacagatgtgtgcagctattttgaatattggtttataaacattcatattctttatcaaacgaacctgtagtttttgtgtttcattccactagagttaacctgaagggaacggttcaagggactgtattcgaggtctgtatggctccagggcctacgtgtatccctttctgttatgccacatacattaaatggcaatgcaaggtgagagccagttgaaactcttagtaatttaggagaggaaaatgagagtagttatactagagcagttactcaaaagagttgattttttttttttttgagacggagtctcgctctgtctcccaggctggagtgcagtggcgccatctcggctcactgcaagctccgcctcctgggttcacgccattctcctgcctcagtctcccgagtagctgggactacaggcgcccgccaccacgcccggctaattttttgtatttttagtagagacggggtttcaccgtgttagccaggatggtcttggtctcctgacctggtgatccgcctgcctcggcctcccaaagtgctgggattacaggcgtgagccactgcgcccggccaagagttgatgttttaaaaattataaaagagaaatgacaatttgaaggtatttttaaggatttatttttaaacattatccttcctttcattgtcttaacagtaaattacttcatctttgctcattcatatgtattttcacattactgaatccctaacacccagtttggggtttgctttgccttttttcacttaaccttatatgggattttttcttgcaagtttaatttttataagtttattggcttcataatgtattgaattcatctgtcataaccacctccatattactagactgggaagttcataatttttttcagtattaccaatagatattattgtcaattgcggtatcacattttctttcgtttagattacgtctttaggataaatatctggagctcagattactaggtcaaagggtagagtttatttttatgactacaagttttgtcatttttggtaagatatatcacaattgacaatgaggcaaacaaatcaactagccccctcctgctctttcttcccagcaaactccttccccaaactagttacttgaatttgagaaacagtatgaggttttgccttttggagacattattatttgagccaagtttaggttatacagattttttaaaaaaataacatgatttggcaagatcatgatgaacctccttttctttgagtaaattaaagtactactggcaaataataaactggtcttaggagggatggaaggcggataagccttaatggaagtagaagtgatctgatactggagaccctgagagcttgtctctggcttattttagcatccgggaaagccttgaatattatgaaagatagattgtagcccgatgtcacagagccttcttacttaagtttggctcagcagtctggcaattcccgcctgagtcttcgctatcctggctactgcaaagctgggtaatttaaattgagtggcactgataaatgctcaaagaacttggcaaagcttaaagatacttcctttccgctggtctacggacgtgaagaatgagacttccagtttccaaggaatttgctgcatagactctatcgccggtttcaaaagtcaaactgagacgactttctactttaaacaaacactagggatttgctggagtggcgacaaccttccgccgcgtaccttgagcccttgtttttttttttttttttcggagacttccattggatgccgaagttctcgccccctcacctcgcaccgggactggttgattcctggccttggcgggtgattggtcgagctcgctgggctattgggcgctgggagtcgagggggcgggaggcgggaattcgtctcgggttgtgtggttgaggggtctggtgggtcgaggaaaggtaacggcggccccagtcctgcacacaaggccggggaagtagcagcacccccaggaagagggaggaggaagggctcgtgccctttcttctcttccagggctccgctttatttgctctcagaagtcggtttcctttccttttcttcagtgaatcggagctcagagcgttgcttcggtttccctccagacaggcaagtcggagggaagtccacggaaagggcttgagttcttctgcacagcctgcgggcccatgggtggtgactggatcaccagggtctcg

SEQ ID NO: 18682 - DNA, 2300 bp, Homo sapien
cagcactcattatgtgacactgcagccatctcattcagtgatttttctgtttctccatagatcaagatggagatactgaatctgcatgatgtttctccattagtgaacagaggatcataattagagttggaaaggatctttaaaatcacttagttcatacccacatcttcctctcattcgtccctcaaaccaatgtttgcactgccttcacacttttcctgtgaaatgaccatccatggagatgaaattgcttaccctctctcagtttccacaattgcaaaaggcgaatattacctacgtcacaagattgaatcagataatatatataaagcatttattacagtgcctagcaagtgttcaataaataaatcccaaatattagcttaaaaatgctaggacagtacagtgtgcaacccattaatagagtgtgaaatcagttttagtgtgcagtgaccagcagttttttaaagagaagtagaaacatgtagtgtgtgtgttattatacgaaatatttgtttccatgtaaatgtgggtttatatgttatatatttatatgtttatatagcatataaatttatacacttacacttatttttgtatgtggatatatacatatgttttttctgggtcacaatgtgaaatgtattattgtgggtcaggtggaaaaaattttcagaagcattgcaacacacaattcttttcttcctttgctgatctatgttgaaagtcatatatatatatatatttttgagatggagtctggctctgttgcccaggctggagtgcggtggcatgatctctgctcactgaaacatctgcctcctaggttcaagtgattttcctgtctcagcctccgaagtagctgggactacaggtgctccatcaccacgctggggtaattttttttttttttttttttttttgagacggagtttcgctcttattgcctaggctggagtgcaatggcacgatctcagctcaccacaacctccgcctcccaggttcaagcaatgctcccgcctcagcctcccaagtagctgagattacaggcgcacaccaccacgcctggctaatttttgcatttttagtagaggcggagtttcaccatgttggtcaggctggtctcgaactcctggcctcgtgatctgcctgcctcggcctcccaaagtgctaggattacaggcatgagccatcgtgctcggcctaatttttatattttttgtagagttggggtttagtcatgttgcgtcaggctggtctcgaactcctgacctcaggtgatccgcccgcctcggcttcccaaagcgctgggattacaggcatgagacaccacgcccggctctgactttatttttaaagaggttataaagtgctatatctttgtaaaatatttttatttccagctcctagcacaatatctggtaaatagaagttgccaaataaacgttgatcgaactaggaacaataaatagtatgaagacatatggactagcggttcttcatatatagactagtggttcttttctgagtgatcagacttcctttgagaagttgttgaaagttttggaccctcttcccagaagaagtgccgagcactcagttctgaacggattccagagaattcctgaatccccgtgcattgcctctctaaggttctatgggtcccccaagttaagaacctgaaaggaaggtgtttaacttctgacagcggaggtgtgaggtcaagagcggaagaaagtttggggttagatcacttttaaaattctcccacaaatcctgggattctagaattttggttctgggaaggcacaggcaaagatttaaagagtacagtttggtaccactagtgtcaaagaatagtgggaacgattttaacacacgttatgccatttgaatgccatggcaatcctgtgatgatgaaatttaagttctgaggggctcagtggcttgcttgtctaaaaggaaggagctggtaggctctggaaatcagagcctaccagaatcacatttctaaatttttggcgaacaagtagggcagggcaaataaagtggagaaaggggcggggccgcgcacgcgcacagttgcattggcgccgacgtctctgcctttcctctcgcagccacccttcctctcagaccagtacggtggccgacgggagtcagacgctggggatgaatgaaggtgctgggtgcaggttgaaaaagtctcccgcttttccgttcctacagtcccggttctgcctttgtgtggtgcccccatccttcccactttgtatcgacaacccggttggtcccggcgt

SEQ ID NO: 18683 - DNA, 2300 bp, Homo sapien
acgcctgtagtcccagctacttgggaggctgaggcaggagaatcccttgaacccaggaagcgaaggttgcagtgagccgagatcacaccactgcactccagcctggcaacagagcgagactcttgtctcaaaaataaccaaaaaacaaaaattagtggggtgtggtcgcacgcgcctgtagtcccagctactcaggaggctgaggcgggagaatagcttgaacccaggaggtggaaattgccatgagccgagaccataccattgcactctagcctgggtgatagagttagactccgtgtcaaaaaaataataagtaatagccagctgggcgcggtggctcacgcctgtaatcccagcactttgggaggccgaggcgggcggatcacaaggtcaggagatcgagaccatcctggctaacacagtgaaaccccatctctactaaaaatacaaaacattagctgggcgtagtggcgggcgcctgtagtcccagctactcgggaggctgaggcaggagaatggcgtgaaatcaggaggcggaacttgcagtgagctgagatcgcaccactgcactccagcctgagtgacagagtgagactccgtctcaaaagaaaaaaaagtaatagccactgttgctcagccaaagagtgcttatgttgcatatttggctagtgaaggacatgtatgcagaaaacatgtaacaatgttgtttggactgagaagtgtggtgttttggtcagtcttcaacttatagtatagaacagggattgcttactgcagcccatggaccaaatctggctatttccatttgaagtattggctctttaaaaaaagtttgctgggtcaagcagggtggctcacgcctgtaatcctagcactttgtgaggccaaggcgggcggatcacgaggtcaggagttctagaccagcctggccaagatagtgaaaccccatctctactaaaaatacaaaaattagccgggtgtggtggcgggcgcctgtaatcccagctactcgggaagctgaggcaggagaatcacttgaacccaggaggcggaggttgcagtgagcagagatcatgccactgcactctagcctaggcgacagagcaagactccgtctcaaaaaaaaaaataaaaagtttactgggccaggcgcagtggctcatgtctgtaatctcaacactttgggatgctgagacaggatcacctgaggtcgggagttgagaccagcctggccaacatggtgaaaccccctctctgctaaaaatacaaaaattagctagacgtggtggtgtgtgcctgtaatctcagctgctcggaaggctgaggcaggagaatcacttgagcccgggaggcagaggttgcagtgagccgagattgtgccactgcactccagcctgggcgacagagtgagactccatcaaaaaaacaaaaaatccctggcgtagagcagtattgctgatgaattgaggtgttttatagacaaatttttttaaaaatttatatattataatgtgaaatagaaaagcaaactcagatgccaaacctatgattttatgaatattctcgcttaggacttacgtaaaggttttgtgaagcactaaaattaaggagatctgtttttcacaaatttgagctctcttaaaatgtcgggatggcacggtggctcacacctgtaatccagcactttgaggggacgaggcaggcagatcacgaggtcaggagctcgagaccatcctggctaacgcggtgaaaccccgtctctactaaaaatacaaaaaattagctgggtgtgttggcacacacctgtagttgtagctattcatgaggctgaggcaggagaatcacttaaacccgtgaaggtggaggttgcagtgagccgagatcgcaccactgcactccatccagcctgggtgacagagtgagactccatctcaaaaaaacaacaacagcaaaatcatataaattttagaaatatttatgacactctctttattcacacaatagggctcgtcggaaaaaaagttctgctagaaaatttggtctacagaaactttgggagtggtgcttaggacttgtacaaatgagttcattgccatggagagttgtaattggtcgtctaggaaggattggtcatggagaattgaaaggtaaaattgtgcttttattagtatttatatttccgttttatgtaaattcacacacagttctgaccacgtctaggtatatatgttgaataaaatgcaaaggttatcaaataaggaaccacatatgtctaggccacaaatggcttaattcaaatt

SEQ ID NO: 18684 - DNA, 2300 bp, Homo sapien
caattgagccagcaggttctcaatgatttttaaaattacattaataattaacattaagtaagcactgtggcaagcactgtatctacattgtttcattcaccagtcattttagaagaaaagtacttttattacccccattttacaataaccgagagaaagcaaaattaatttgatctaaggtcaaatatgatctaagactaactagtgaggggcagaactttttctccaggctttgggcttcagatctgggctcttcaccaccacagatgaacaagtggataaatgaggacttcttttcattccgtggctgaagaagtgacatggaagagtctaccattcattttacagatacaattatgtatctgtaatacataatacataattatgtatctgtaatacataaaattacagtaagtcctaactcactgatgtttctaacttctgaatcatctttttcttcttctttctttcttgcaatcctaaaaccgtcagagaaactgttttgaactcatattgaagtgtaacccatccaagcactgggtgttttatgggaaagagaataaaccttttgtttggttcttacttcttaccacccattcatttgtaactatacaaatatcaagcacctactgtgtgctaggaacctttttttaggcactagagagacagaagtaaacaacaaaaaaatagtgagacctttacatacactagttctcctgctcgtcacaataactatatgaggtaatgatgacaacaataatagttaactcttaacagtgcttatctgtgcggggcactgggctacctgcttaatttgtattaactcattacaataagcttgtggggtaagggatatgttttccccattttacagatgagtaaagacacagagcaggaagtgatttgctcaagcttggaacccaggcagtgtggctctaattcccagtctattaactacagggcaatattttgtttcttaaatttatatcttcatatcacaacttttaggttgaggagtcttatccccatccagatcatctgactcccaaatccagaggtttgcacctgcaccccagcggcctcgcgaaataaatgagaatgtcttggaatttttgccaatactttctcttccaaagaactcaaactgatttccacgtaattctcactgatttgtgaaatgaaccttcctggactgtaaatttccccgcaaagagagggccagggccccgggtcgttttatactggccggggcacccagcagatggcgctatgttagtggccaccagctggctgccccgtcccccgagctcaccgcctccgccgaaagcttcccggccctccctcgctcacttctctctccccctcccaaccgagcccgggcccacgtgacctcaaggcggccaatgggtgagcagagagggcgagctggtccctgtggccgccattaaagcgaagggaaaacccgtgaattcggattaaagggggaaaaacaccgcccgctgggcccacaaaatgggggagactacggcgtccagccggtgaggccacaggagggcaaactttaggccggcttggcccaggaacgacacgaagacagagccagagaatggtctgagcccgcagacgccgccaccacctccgccgctgaggagactctgggcttaaggacatcgccgctgccgcgccgggggcctgggcttctctcccggttctcgcccttcccgctcctgtgcgggcgcctctccgcccgggagaaccgtcctgggcttgggctctgccgtctcggacttgattttgattatttattgtgtaatttattatttttcttgtggtaggggcacacatcccctccgtcccccagagagggacgagcgtctgcgggatccgcagtccggcccgccaggcgagcgcggcgcggccctcccgcctccggccctcggccccgggcggctgggtgccggccgggcggcgggggctgctcgcggcggcggcggcggcggcggcggcgggggggtgggtggggagggcgggcgcccggcggcctcctcttccaccgcccccccaaccactaccccccccccggccctccccggtgtctgtgtttctctctctggtcggaggcggcggtaatggcggatggtgggttgtggcgccggcggcggctgctgtgagggacgatgagtgcctccttcgtgccgaacggggccagcctggaagattgtcactgtaacctcttctgcctggtgagtgccggggccggcgggcgccgagggaggggggccgcgaggtgcgcccttggg

SEQ ID NO: 18685 - DNA, 2300 bp, Homo sapien
gctcaaaaaaaaaaagagaattcagggcagggaaggtgggaagccctgggggaaggggcggctgggaggaggcctcagccccaggggagctgcaacatagactgagaccctcacatgtttggctctgtgtccccacccaaaactcatctgggattgtaatcctcctgtgtcaagggaggaatctggtgggaggggattggatttggggacagtttcccccgtgctgctccccggatagtgaggtagttctcaggagagctgatagtttcaaagtgtggcacttactggttctccactcactccctcctgccgtcttgtgaagaaggtgcctgcttccccttccccttctgccatgattgtaagtttccagaactgcaagtcaattaagcctgtttcctttataaattacccaatctcaggtatttctttacatcagtgtgaaaacaaatgaatacagtccccttccctgaggtgccttccccttaggcaaccagctgcccccatgctcctcttctgccccctggtatttcctttcccctcatgaggcccaagtgatccacatggccagcaccagccccatcctactgcaggcctgtgtggctgctggagaggccaggctcctttccgcaccccgaggctgcccgatatgctttctggatcctgtagaaaactgacccactattctcataccggtgcaacttcttctaatacctcaaaaatggacaatgtgaacttatcttgtttcttgtctcttcttgctagggctgtcattgggacagtccgagatgggggagtggggggagacaatggatgaatggatggatgaatggacagtagtccagggagatgtccctgtgtgtcctgaactgggcccttcctccaatgagaagccttcctgagtgagtttctacagtcatcccttggtatccatggattagttctagggtccccggggatgccaaaatccatggatcctcaagtctctgacataacatggcctagtatttacatatcagctatgcacatcctcctgtagacattagaccatctctagattattcaggatgtgtaatacaatgcagatgctacataaatggtcgtgatactgtattctttagggaataatgacaagagcaattcaatagaaacataaccgtccaatttattttctgaatattttccatctgctgttgctgaatccacagatgcagagctcctggatatgagagccaagtgtgctttgagagtagggtgggtgaggttgctaatgagtacaggggagcaggtgttgatcaggaggaccctgcactggggcatctggacgtactgcctcaggacttgagactccagttggatggcacaggcagactcggcacaggcagactcagcccaggtcaaagccgtccccttgaagtttcattttatcccaagctctttctggaccctggaatttggcatcccctaggccctgcgtggaaggacagatgaaccaggttttagataacatgtctagaagagtgagcccctactgtgtgcccggcactttcctcacaagatcctctagctagaatatccaagggtcatggagagaaatacccagttaaaatatcagaaatgaaaaagcgataccattagagacactaaaaagaccattaggtaatagtattagcttttgtattctgagatccagcagcagcagtcacttccctccacccctatgtgtatcccaggaccaccctgggcagggagggctgaggttagggagcagccatggatgctctgatgctggccctgggcctcgggggtgacagtgatgaggaactgggtgcacacatgagtggggcagccgggcctggccagagaagcaacacacacgtgcacagatgtgtttacccacatacacatgtgcacgcacatgcacaaacacattgcaggcaggcatgttgacgcctcaggcagcggaggaccctgactctgggcactgctgacccgggcaaggccccattgtgatgcgtgccatgacctcagaatgtcactggtgcttagcacctatccgctctctggcctgcctcagtgttctacagcagttacacacaggcagtggtatctgtgagcagctctgtggactcaaaggttttctccctgagaggcatgacccaggccagctgattcatcagaatcaggtgagcgtgacctgctctcttccctccaggcggacctggggacagtggccacggtgcgggcggtgttggcctctgtggggcagctactgaggagggtcatccctgagcactcaccag

SEQ ID NO: 18686 - DNA, 2300 bp, Homo sapien
cttgggaggcggaggcaggaagatcacttgaagccaggactatgagtccagcctgggaaattcagcgaggccccctctctataaaaaattttaaaattaatcagttgtagtggcacttgcctactgtagtcctagctactcgggaggctgagtggaaggatcacttgagcccaggaattggaggctgcattgagccatcactgcaccaccgcacttcagcctcagctaacaaagaaagaacttgtctcttttttaaaaaaaatgaaatgggcatggacacagggaggggaacatcacacaccagggcctgttggggggtaggggggtggggggctaggggagagatagcattaggagaaatacctcatgtagattacaggttgatgggtgcagcaaacccgcatggcacgtgtatacctatataacaaacctgcacgttctgcacatgtgtcccagaacttaaagtataacaaaaaaaaaaatgtggtgggttgggggcagaattaggttgatgatctattagttatctttcagctttaaaattccaggactaacttctgtggctgaaagaacattatcaataaagtaaaaagacaacccacagaatagggaaaaatatctgtgaattatgtaattgataaggatctagttcccaaaatatataaagaatgctgtaacacaacaataaggctgggcatggtagctcacgcctgtaatcccagcactttgggaggccaaggagattgctgggggccaggatttcgagaccagtctgggcaacatagtgaaacctcatctctaccaaaaatacaaaaaagtagctgggcatggtggcctgcaccttgtagtcctggctactggggaggctgaggtggaagactcacttgagcctgggaggtcgagactgtagtgaaccatgatcctgctactgcactcaaccctgggcaacatagtgagacctcaccaaaaaaaaaaaaaaaaaaatctaagtaagtagcctttaatatagtaggctcttagtaaataattgttgaattaatttataaattaagccttccctttctttccttgtgtgttcctgtccagaatgggaggcagtgtaccaagcttaaaaagattaggttaaagtcaaattatgctcataatgaacaaatccccctgagcaggaataggaaacctctagaactgctgcaagtgaaacctgaagcacttttaggggcccaactatataactagctaagccttgggtgccagagatatctgtacttagccatgatagactaaagacactcctaactcctgcgctagagtatttataatgccatgagacatgtcagatcatgaataccttggtttctgcttaaaacaatcttttctgtaattgttcttttgaaagcacttttcccaataatactaaagacagcctatgagagtttttttgcctctctttctaggcttaaacaattaatgaaatgattcttaatcaccattcagtgaaggcagctgagtaaaatgttttaattgaacaactttcaactgactgatgaagactttctctttttttctgagacaaaagtctcgctctgtcgcccaggctagagtgcaggggcgtgatctcagttcactgcaacctctgcctcccaagttcaagcaattctcctgcctcagcctcctgagtagctgggattacaggtgtgcaccaccacaccaagctaatttttgtatttttaatagagatgagggtttcatcatttggccaggctggtttcaaactcctgacctcaggtgatctgcccgcctcggccccccaaagtgctgggatcacaggcatgagccaccacacccagcctgatgaagacattaacatgaaaatatattaatatagaacttgaaacaaaaattctcccccttccctgaaattccaacagtgtcaaaatgttcagattttataaatcataccctcatatacaccaagggtgctgaatgaaccacactgaaaacacacttgctgtaaggttggaaggagctcctgggtcattctctccctaggcttgagcctgagcagtgaatgaggtcacagttgtgtgatggaacaaaccctttattggattcctgatctgattgaagcccagaagtggtaggtagcacggcttaaaagtaggtaaatatcgtgattttgtaggattctatgctaagtcctttttaaaaaatctattatctatgagaattgaaggtatttttttaaagaaatgattattttgaggtatggggatgatttcacagcacctttcaaatgcctg

SEQ ID NO: 18687 - DNA, 2300 bp, Homo sapien
tcactcctgtaatcccagcactttgggaggccgaggtgggtggatcatgaggtcaggagatcgagaccatcctggctaacacggtgaaaccctgtctctactaaaaacacaaaaaattagccgggcatggtggcgggcgcctgtagtcccagctactcgggaggctgaggcaggagaatggcgtgaacccgtgaaatagggagcttgcagtgagccgagatcacgccactacactccagcctggtagacagtgcgagactccgtctcaaaaataaataaataaaaataaaaaataaagttaagtttaggatactttagcacatttcacagaaaaaaggccaaagctgtttgacatttaaaatgtctccactggaactaatatagtaaattagagtgaagacaatgagctgtctgcaagaaaatatgcagtgggactgttgattgggaacactaacagcttttagtgaggggagaataaaagcccatagatgagaaaacaagatgccagaaataaatgtaaatcaaccaccatatctgcaaacagctggccttgagaaaagataaaaattccttgtacttgtttctgggtatggagcttgtgttcaaaatgtttccgaagaccacaagaatggcaaaagcatattgtcttcaaatgaagtacaacttatttactattttttttattaacttgtgtatttttcttcctgattagagaggcttagagcttgttcccatttctttggaggaaaaagtatagaatcattcattgctccccgtagttttacctacagaaagaatttacaatggaataaacaattactggctgggcgcggtggctcacgcctgtaatcccaacactttgggagaccgaggcgggcagatcatttgaggtcaggagtttgggaccagcccaggcaacatggtgaaaccccatctctactaaaaatacaaaaattagctgagtgtggtagcgcgcacctgtaatcccggctactcaggaggctgaggcaggagaaccacctgagcccagaacatggaggttataacgagctgagatccggctactgcactctagcctgggaaacagagcaagactccgtctcaaaaaaaaaaaaaagtactaattacccatgtgctatgtctagcactgcactaaccctttccttttttaaaaaaattcatctttccctttattctgacattatgacattaaataaagtccaagaggtattgggctggtccttgtttggtctctgccctttccttcttttccaagtggtattcatcatgcttctcttggaagtcttctcaaataaccttatgtctataacatactttcttctagattcttttgagagtctatttgtgttagatctagaaatagaaatgtaaggctgaaatgtattactatgacaaactgtttgtatgtgtgtattacaatcttaattgtgctaataaggataattataataaatatgcatgattcaaaaaggttagatggttataatttaaaaaaaaattgtccttggatattccatttgatttgctaagcctcgtgttctctaatttcatatctccatctccccctaccccaaccaaaatatatatacacactgtgtatacatatacacccacactattaagagctgaatatagaagctggaaattgccctgtttcttcccgctgcttgctaccttcttcagttctggacatcggctccgcagtggaactaggtagcctcaactcttataatgattcaagatttttcctgttttataacttgagggaagctggggaacctgttaagaggatcccagcattgaactgggtctcaagtggaatgtctcccactttctgcctaacctgcacgtccatcagcacctcatcaatgagaaacgactcctccggggagaatttccccctgcctggtcccctctcctagagagcccttcgccaaccctgggacagccccaaacgacagctcccgagcgccacccggaccagactccagtgccgccctgtcccgccaccctttttcccgcccagactccgcgtcttctgaaagagggcgtggtccgcaggaagttctcacgttacggaaagtaaagtgtttccggctccggtgtcatggccggctcctaccctgaaggtgcacctgcagtcctcgccgataagaggcagcagttcggaagccggttcctgagagatccggcgcgcgtcttccaccacaatgcctggtaatcactctgccccttcgcccggcctgtcgctgaccctctgtcccgccgcctcggagcac

SEQ ID NO: 18688 - DNA, 2300 bp, Homo sapien
aaaaaaaaaaagagtctgtcacaattatgtacaatgctgttagggcagattaggaattggtagtgccatgcttttagaattattattcagttaaagaccaaatgaatattgaagcctacctttacttcagtttttgataacaaagtaaattttctacatctacagaaatagattttcctgaagaattctatggtttgtgtaatattttctagttgggagttgttttaaatcgtgtgctttgttgtttgttttgagacagggtctcagtcactcaggctggagtgcggtggtacaatcaaactcactgtggccttgatctcctgggctcaagtgattctcccacctcctgtgtaactgggactatgggcacatgccaccacacttggctaatttttttttttttttttttttttgcgacggagtctagctctgtcgcccaggctggagtgcagtggcgtgatcttggctcactgcaacctccgcctcccaggttcaagcgattctcctgcctcagcctccagagtagctgggattacaggcgggtgccactgcacccagctaatttttttgtatttttagtagagacggggtttcactgtgttggccaggctggttttgaactcctgacctcaggtaatcctcccacctcgacctcccaaagtgctaggattacaggcatgcacccggcatttttttattttttgtagagatgaagtctcactatgttgcctagctggtctcaaactcctgggctcaagtgatcctcctgcctcagcctcccagggtgctgggattctaggcgtgagccaccgtgcctagcagatcgtgcttttggtttgtttgtttgtttgtttttgtttttgtttttgagacggagtctccctctgtcgcccaggctggagtgcagtggtgccatctcagcttactgaaagctccgcctcccgggttcacgccattctcctgcctcagcctcccgagtagctgggactacaggcacctgccaccacgcccggctaattttttgtatttttagtggagacggggtttcaccatgttagccaggatggtctccatctcctgactcatgatccgcctgcctcggcctcccaaagtgctgggattacaggcgtgaaccaccgcgtgcttatttaaagtatgtgctgtctctctccttacgaatgtttttttttccctgttggtcactcattttcatgatcgttttccaattcttagatctgacttcatgcatgagaagtacagaaagtacacaagaataaagaataaaagtaggggagtcaggaatgttctattttaaaagcaactattagattcctcactgtctcccttcaattattcctgatctttactctttgagtcctccctgaaataacatgctattagattgatgcaaaagtaattgtcgtttttgccgttactttttttttttttttcttttttttagatggagtttcactcttgttgcccaggctggagtgcaatggtgcaatctcggctcactgcaacctctgcctcctgggttcaagcgattctcctgcctcagcctcccgagtagctgggattataggcatgtgccaccacacccagctaattttgtatttttagtagagatggggtttctccatgttggtcaggctggcctcgaactcctgatcttaggtgatcctcccgccttggcctcccaaagtgctgggattacaggcatgagtctccacatccttgccattactttcaatagcaaaaaccgcaattactttttcaccaatctatataatgattagaaatatatcccctactctggagggtgaggcaagtgatcctatcgcgtgaacccaagagtttgaggccagcctgggcaacatggggagattttgcctcaagaaaaaaaagaaaaaagaaatatatccctctttgtgaagtagcaacagttacatttaaaatttaaaacaagataatcttttctttaggctatgttaatattttctaacttacctgtgtcttccatctgtctgcagacaaattcagaatatgatccttctcggtgttttgcctttgttcacgacctgtgtgatgaagagaagagttacccagtgcccaagggcagtcttgatattatcattctcatatttgttctttcagcaattgttccagacaagtaagtttgggtcccttggctggtagtgtcacaaaaaggaagctttggtgagggacctttttttttaaaataggttcttgctctgtcagcccaggctggagtgcagtggcacgatcatggctcactg

SEQ ID NO: 18689 - DNA, 2300 bp, Homo sapien
ccccaaaaaggcatccgtaagagcatgatttcctagacttcagctggtttatttcatcttcccaaatattgatatccgagtagaccattattgaatctttttacattatgtatatttttgaccaggcgcagtggctcacacctgtaatcccagcactttggaggccaaagcaggcatatcacctgagcccagaccagcttggccaacatagtgaaaccccatctctactacagaaaaaaaaaaaatacaaaaatcagctgggggggggtggtgcttgcctgtagtcccagctactgaggaggctgaggcaggagaatcgcttgaacccaggaggcggaggttgcagtgagattgtgccactgcactccagcctgagtgacagacagagtgagactctatctcaaaaaacaaaaaaattttttaaaaatttatatttttacttaaatgtgtttatttgtttttattattattttttgagatggagtctttctctgtcacccaggctggagtgcagtagcacgatctcagctcactgcaacctccgcctcccagttcaagtgattctcctgcctcggcctcctgggtagctgggactacaggtgcgtgccaccacgcctggctaattttttgtatttttagtagagacggggtttcaccatgttggccaggatggtctcaatctcttgatctcgtgatctgcccacctcagcctcccaaagtgctgggattacaagcgtgagccactgtgcccggccttaaatttatttttaagggatttttttaaaatcactgctataaaagtaaaacaagtactggttgccatgaattgaaagtatttgtgggccatgtgcagtggctaacccctgtaatcctaacactttggggggccaaggtgtgaggatcacttgaacccaggatggcttaaaccctttgaggagtttgaggcaagcctgggcaacatagtgaggccccatctctatttaagaataaataaataaaaataaaaatgtattttaaagataaatacaatgaaaacaaaacaatatcttaagttccagctggatgcctttggggccaaagacttggagcactaggtctggaaacaggagtgaacgcatcagtcacacctttcctggagctgtcaaatttggacggggagattccaacaataaacccataaatcctctaacacgtgggcatgtgccaggaagaaccaagcaagctagggaaaatagagaggtggcagggatcagggaaaaggcacactctgaggttgggagtggggacaaggaaggcctcctggagaaggtcacgtctctcatggaacatcttctctgtgggagaaacagccagtgcaaaggcctgaggctcatggtggattctccacccacccagtgtggggaacgctgcatcatcaatcttaagcttggtaccattgctcactctcgtaatgaatgtatctgcctcaagcacattttttttttttcagacagagtctcgctctgtcacccaggctggagtgcagtggtgcaatctcggctcactgcagcctcaacctcctgggttcaagcaattctcgtgcctcagcctccctagtagctgggattacaggcatgcgctaccacacttggctaatttttttgtattttttgtagagacagggtttggccatgctggccatgctggtctcaaacccctggcctcaagtgatcctcctgccttggcctcccaaagtgcttggattacaggcctgagccaccacacccagccctagcacactttaatgagtactacccaagtgcattaggtactgagaaatgagtgagaatgattgccggcttccaatcaaccctcgtgtgcagggtctgggttcttctcagttcatttaggaactgttaaagctgtgaggtcagccccgctcacaagggtctggattatacagcaagattattttgcttttctttatttttccccaccccactaatcgtgctcctaaagcaagattattgatctgtaatctgaaacgtaactgacaagctgaggggatctccccaggaagggaagctacttgagaaactgaatttagatcagaagttgattgttcagaatacagctgagcccagagattgcatggcaccaagagaggtttctgtcaagccgtcccgttccgagatgccccatcgcaccaacgaagcaactgctgagcaggttggcactaacacgagctggcgtttgtccagaccttaagactctttaaatagcttttcatatatttaatcctcacattgcctatgtgaata

SEQ ID NO: 18690 - DNA, 2300 bp, Homo sapien
agccgggcctggtagcgcgtgcctgtaatcccggctactcaggaggctgaggcagggagaactgcttgaacccgggtggcagaggttgcagtgagccaagatcgcaccactgcactccagcctgggcgacagagcgagactctgtctcaaaaaaaaaaaattttttttaaaaagacagtgtcatttgatggagttgctttcttgatcgttggctgcaattaaagacctagcctcactgtcttttgtgttgccttggaccggctcttaggttctaccgccctaacaggcagtggaggctggcctcgagtggtagtcctccatcttgccctcttttcctaccctctacccccaacccgcgagctgctctcctgtcttcttccaacactgttctctttgggaatatgcatgtccaacttcccaagcagtctgggatctggagtaagatgactcttggtttaatgaagtttttccacagtgcttgcatgtgccccaagggtttggaaggttggagaactaacaaaaagcaaagagccatcctgtgtcgtttcggcaggtctgtgttctgttaaaatatggaagaattaagagaagaacgaagaaataagggcagaaactccactggggagtacttgtctaaccctgaaaaagttcaaggctgttgttcaaggtctgaatttttcccttgagatttgcttgtagtccttaaagtcatcttcagacatctgatcaaggcagcatccgcggaaaattataaggtgggtggctgcactggagcctgtcctggctcaggggcgccggtgaagagtgatttttttcccttggccttgggggatcagagggggtgccctctgctatgcaggaagccctccttgcccgctagatagttctcattcctcaggagatactctgtgaggggccggcgtgttttctccatcttggcacttaccctcagaccctcctaagtacccgggagggccgtgtttttcatcggaggttgaaatggaacctccccctgggtgcccggggagagtaccttgggggcagcgcccctccttccggagggcagcatccccgcgggggcgggggctcggctttgatcccagggcaccttttgtccctggagacgctctgccagccaggtacgtggagggagtgcagcccgccctcccgggcgacgcgcggggctggggcgggccggcggctccggggagtggcggccgggagcccgcgaacgcgggtgggcgccgtcgcctcactaaccgggcgcctccgggaagtccgggcggggtccgccgctcacacataggattagcgtcctctaaactccatccctgggaaaagccgccgcacttctcacccaaactcgcggagccgaggggctgggcaggggttgggcgggcgcgggggccggcgaggcggatccgggaacgggtggacccgggcggccaagccccttcagcgccggcccaaccgccccggcccgggccagtccagcggggcgggggccggcgacacaaaggcggcggcgggtcctccgggcctccggcctcgggcagtcgcagggcgccccgggccgccggacctcccctcgcgttgcggcccgtcagccggcgccgcccgtcgcccgccctcagccgtccggcgaggcgcggcttcctccgccggcgcggggtcccctggttaacccctgcccggcagcgcggccgctgattggagaaggcggggcgccggggcagcggggacccccccccaccttcctcgtcccctccccctgctcccccactgtcggcgcttcccccacccccccaggaccccccccgcctcccagccgtgcaaatctcgcgaggaaacacgcggtttcactagtgtgtttacaccgatcactactaatccggaccgaaccgatccggattaaggggccggaggcgggtcctgggcaccagcggttccgacccccccgccctccgcgccgcacccgagtggcccccagccgagcgggcccccacctcctggcccggcctgggccctcctgcgcctcccttggcctttgtccggcgccaggaggccggtcccgcgccccccgcggccgcccgggcccgggcccgcgtcgggcgcctggctctgtacgcgagcccggggatctgcggccttcgtgccccccctcccccgcccgccctctcgtggagcccggcgccggcggcggctgcccgggcggggggttgcggcgctcaggagaggccccggctccgccccgggcctgcccagggggagagcggagcggtccgcagccgggtcgggtc

SEQ ID NO: 18691 - DNA, 2300 bp, Homo sapien
atcaatgagctatttatatgtgtatttttacagaaagctttaatttggaaacatctaacacccttagtttgctggaagacaacttagagtcagaaataagcatatttaaacccatataccatatatcaagaaatctgtaaagggcctttggatccctcttctatgggatctggcaacacagagccattcctacaactcccaaaagcagatctctatccagcacagacagacccgggtaggctgatgatcaataaccaatggaggggtgtatttgctgcataggaataaatggtaaccttagatagtctatgattcccctttgtcttctctatttctctgttggtatctgattgtttgtattatattcagaacttgcattatgggtaattaaagtcctttggaatgtgctttaagtttttgaggcttttctttacccttctagtgtattggagcagaaatgcttatactgcagcatggtgttaaggaaagtgcgcacactgttttttgtttacggtattccacggaagttaagtgctcacactttgaacttcctaactgcctacttcctcagtttacttttgcattttacttatcattgggccatatatatatatatgtgtgtgtgtgtgtgtgtgtgtgtgtgtgtgtgtcttttttatttttattttttttttgagctggagtctcactctgtcacccaggctggagtgcagtggtacgatctcgactcactgcatcctctgcctcccaggttcaagcgattctcctgcctcagcctcccaagtagctgggactacaggcacgcaccaccacacctggctaattttttatatttttagtagagacgaggtttcaccatattggccaggctggtcttgaactcctgacctcatgatctgcctgtcttggcctcccaaagtgacaggattacaggcatgagccactgcacccggccctatgtgagctttaatttagaaatatctcactacatcactttctaacaccctcagtttgctggaagaaaacttagaatcagatataagcatatttaaaccaatataccatatatctagaaatctgtagaagtgtcttttaatcatttgattcttttttttattttttattttttgagacagagtcttgatgtgtcgcccaggctggagtgcggtggcatgatctcggctcactgcaacctccacctcctgggttaaagcagttctcctgcctcagcctcctgagtagctgggattataggcacccgcccccacgcccagattatttttttttgtatgtttagtagagacagggtttcaccatgttggccaggctggtcttgaactcctgacctcatgatccacccacctcagcctcccaaagtgctgggattacaggtgtgagccactgcacccagtctaatcatttgattcttattggctcttattataaatatagttcagacagtcatttgtatagaaacacattgtagggccgggcgcggtggctcacacctgtaatcccagcactttgggaggccgaggtggggggatcatgaggtcaggagatcgaaaccatcctggctaacctggtgaaaacaccgtctgtactaaaaaaaaaatacaaaaaattacccgggagtggtggcgggtgcctgtagtcccagctactcgggaggctgagtcaggagaacggcgtgaacctgggaggcagagcttgcagtgagacgagatcgtgccactacactccagcctaagtgacagagcaagactccatctcaaaaaaaaaaaaaaaaaaaaaaaaaaaaaaaaaaaaaaatagaaacacattgtaaaaggagaggattgtaaaagcaatcaaatgataactgaaggaaatcttcagttatacaaatgcttgtatcctagtgcattataatacttgaggttcataatgatgacccttaattagtaaggaaagattggatttgctgcatcctagagtagagaacatatttagttatttggaattatatagacttggtgctcccccccaagacccccaccgcaagacggagtcttgctctgtcacccaggctagagtgcagtggtgtgatctcagctcatcgcaacctccacctcccgggctcaagcaattctcatgccccagcctcctgagtagctgggattacaggcgcccaccaccacgcctggctaattttttttgttttgtattgtttttttttttttttagtagagatgagatttcaccatgttggccaggctggtcttcaacttctgatcttagctgatccacctgcctcagcc

SEQ ID NO: 18692 - DNA, 2300 bp, Homo sapien
gaatctcccagatgtttccccgctttctgccccaaagtcaagatcaaaagcagttggcagctgcagacatcagcagaagtcagtggaacacagtgtggaaccatgtcgcgctggaggaggaagtctcgcgctggaggaggaagtctcacccttgacagagactagaactgggccttagaagcttgaaccaacctctgtccctgcgagagcagcacacttttgtgctcctcagcccttgcgtcttctttgcctggaatatggcaaaacgtttattttcccccactaaatgaggctcctctagggctgcaactgtgtttgcccatctctctttctctagcagctagcacagggctagcagtcggtgcttgttgagccggtgggtgaagagacgagagcacacctcctgtgtgcccggcatggcgggacctggtgccggcaagtggtgggctctctggcctcatgctctgcgctggtgatgtcaaggggtgggcttctgtcctgccactgatagtaggagggaaggccagcaggaaacgccgaaacctactcaagctgctggagaagggggaatccagccctgtttcaggggaaggagtatcctgtgttctgagagcgagagagcagcttagccggcaaatccttaaatccttcagagattacaggattgtgcaagagggaaggccaagagggggacctctgaggcagctccagcatggcctgttgtgtgcagaggactgagatcccagaacatgccacaccaagaagacatgtcccaaggggcagtggagccacagccaccagaagggacctggccctgtcggacctgctgaagctagccgtggagtgcaggggctttgttggtctggctgctaaccaaagggtggctaatgggaccctttccaggggcctctaggggatttcagtgggggcttgcttcgaggctctattaccactggactgtttaccaagagcctcagcctgacagagatgggaagagacgagtgagcatttctgacccaacacccccactgcagagttggggaaacatttacccaagataggaggaataaaaaggaaaaaaattgaatttatttccaaaaaacataccaaggtggacaagataggaaacaatacaatttatattacagttttattattatttaaaaattttatattaacaaaatgagatgggatctgcctatgttgcccaggctggtcttcaactcctgggctcaatctcctcggcctccgaaagtgtgattacaggcgtgagccaccgcacccggcccatattacagtttcatagtgtttttgattactcgtggtaggagaaatgtgtcttctttgcacttggggtctcaacgtctcagtcctgccctatgccccgagaccccaagaggctttcccaaggtcaggcagggaatccgcagagaggcagggctggactccagcatcctgactccccagttcgtgctctgtgctgcagagacctgttgcgtaacactgagtaactgtggattgtctaaccttttatgaaatttccagctggtcttttgctaccggccagcagtccagttggtgggagtgatgatgccggtcttctgagacgtccagtggacagattttccccaggtttctggatgcagccccaacaagcaaaagtgctacactcctgcaccgggaacactgacacaggggtcacgaaaatgctaaaacaagacgtgcaagaattgttgcgctccgcacacgtaacaagggctctgcctccccctcccccaatcttcgccctggtggccaggccctgggctccgccccttccccaccagaccgggggaggggtcctcctcggcatggaggtaggggatgctaggctgctggagacgcccgcagaaagaggcgggatggcggggcggatgctggcggcccgggtctggccacctgggtcagctgcacgcccccgccccgggctggccggacctcgtagcccaggtcccaccacgccgtgaagtttgcggaaagttttgcagttgcttccccgcccgcgccagcgggggagttgtgacgcagcgtctggggatcctggccgggacagaagagagggaaggcgaggcggggagagactgggaaacagagcagcaagagaaagggcgcacgctggggtcctcctggacccggcgtgtcctcctctccgccacccctttctctccctcccgacgctctagccccagacccgcgcctcctccccttcccctcccacgctgcccacttcccttcccctctacccctcgaaccctcctccc

SEQ ID NO: 18693 - DNA, 2300 bp, Homo sapien
gggaaggaacctgcagcagctccatcctcctcctgctcagctgctgctggaagacctcacactgcctgccacccagatccaagcctcctcagggtgtggtcaatgcagtgccaacgggaaggggaccctctgaggctattcatccctggacacagccccagggagggccaggcacagagaccaggaggaggagggacactccaggcgtccttgtcctccctgaccgggcctctcaccaggcacttccagccccctctatgaaaagctccagggggaaaggccgagtcagcactctggccacaactctctcccagggcctggctttaaagtgtgctctggagctctgggaatggccatcctccccaccccttcccaccgcctgcctcctgaggccctgcgcagaggagcagaggaaggcaggagtgcgaggaggtaggggaactgcctgtgaggccgccctgcagtgggttagggggttacccggcctggtttgtgtctgtcccacattcaatgccaggtgggcccagaattgccccgggggtctccggttggtgtgaatgtgggtcaccgtggcccccacctttcccatctggcagatatgtgtcttgtgcctacgtcacgccaggccaacccagcaagcacgggccaggctggaggccccagactctccagggggctgtctggtccttgcacaaaactgcagacactgcacggactgtccccatcccccaattaaacagccagcaggaccaagctgggccgggcgattcccccggtcactccagacacccccacccccactcccccaggaagtggatctttcctttcaactcttagattcttggcgagggatctgtctgtccccacacttcactgttacccctgaataaggagcaggaagagaatggcacagttttggggttttctgatttttgttttgtttcctgttcgttgggttttaaaatctttagcagctcttttgccgctcaaggtctgtcccctctggagggccactagtgtgcccagagctgcccacgctacgcaacatcacagcacggcggcgcccagcctgttgctgcgtcccagtggcaggagcctcctcacagggctgccgagctcacgcggggcggatgccgcgcgccacaagcctccttgaagactaagtgtggaaaagaaaatatcaacgcccacgagatgcagggggcggggggaaggtgggggaaacgaaccctcgcggatagttggaaagccgtcctaacgcatcagtcctggggcagagcgaggagactgggcccgggaactcccggacagagagccctggctccccgggcgcgccctgcaggtcccctgccgaggacgggccggcgccgggtggtccgggagcgcggtgcgcgggggtcctcaagagcccacccgcttcctcctaggctgctggagtcccccgggctcccctcccccgccgcccgccacatctggttccactcaggtcctcccccacctctaggcgcgctcctcctcccctctcctcccccgctttcagaaaagcggagacgagttttaaaaacccagtcacacacacacgcacacacgcttctggagaaaagaggggggaaaaggagggaaaagtcgagagcggcccgcgcctcggcgctccccccgcccgggccctgaagttggccaagttggcagcgccttacccgggagggcggcgtccccaggggcgccgggacggccgaggtgcaggcacccgaggagcaggacgcagcgcagcaggtgacgaggccagggcgcgggggccggccggccgggccccatccccgagcgcggcgctcagtggacgcggggaccgagggcgcacaggcgcaacgcgctgtggcagccccgaggctgggctgtgatgaccgcccgcaaggggctcgcgtcctcctccgggtcgggacgaagtgatgcctcccggggaggaggagggaggaggcagcccgggcggagggagggcggagggaggagcgcagaaccggggaggagggttcgaggggtagaggggaagggaagtgggcagcgtgggaggggaaggggaggaggcgcgggtctggggctagagcgtcgggagggagagaaaggggtggcggagaggaggacacgccgggtccaggaggaccccagcgtgcgccctttctcttgctgctctgtttcccagtctctccccgcctcgccttccctctcttctgtcccggccaggatccccagacgctgcgtcacaactcccccgctggcgcgggcggggaagcaactgcaaaact

SEQ ID NO: 18694 - DNA, 2300 bp, Homo sapien
aagaagagctgggtccaggcccagggggcctgccaggagctgggggcccagctgctgagcctggccagctacgaggaggagcactttgtggccaacatgctcaacaagatcttcgggtactgagccgggctgaggcgtgttaggagggcacccgcacacgtgtaggagcaggcatggccgacagacccttggttttgttgggcgagcagggggatggcagaatgtgggtgaccccagggaggcctgcatctgctgctggtgccaggaccatcttgtcctcactcaagtagccatggtgccctggcatcttgggagaacaggctggtgtgatccatgcactcataggagactgtgttttgctcaccatcatccccccagcaatgctccaacagacccacaaacttacatatgtaccccccaccccattgcaaaatctcccacatgctggtcctggcaagtgtttcccctcaccttacaccatcctacaatgacccacactcctcaatccacagtttttcctgagagataggaggagaaaggccgcagctatgaggatttgcccatgggcctccctctgagacaccacctctgtcctgggctctgagcattagcacgtggaatcccctagcactgggaaaatcgagatggatctgggcttcctgatagcttaattgaagggatctctcctctcagcaaacattgaaattacattatttgtctcataattacaatagctcatggtcatcacttctcaccacgtaccaggcactgtgctaaacatatagtcctcactcaagcctcccgacaaccctatggagcagacgttaacccctgacccttgtgggttgatagagaggttatttgcccaagttcatgggtgaacggatacttgaatccaggtttatttaactccagagccgtagatccctgccacctcctcatctgaacttcctaaactccgtaaagtaaaagcctgcagaatcttgctggacagggcacccccacccaaaaggaacccaaacaaaggggaggggccactgccccttgagtggatggcttggtccagctctccccagctctgtcttgtggggagaactttaccgaagtgacctcaacgctgtatcgatgggtcaatgtgaagcccagatggagaggccccaggccctgggggctgccccggtcacagctgcaagggacagggggcacgtttgggttcctgcccctctcacttcccatctcttccgtccccactcctgggttgtgctgaagtgaatcagaacccgagatccacgagcagcactggttctggatcggcctgaaccgtcgggatcccagagggggtcagagttggcgctggagcgacggcgtaggggtgagggggcctggggtacttgggactgcgaggccgggagcttggtgggcggggcctgtttggggcggggcctggaggtgggcgggttttcttgagggccgggcccccagtcggagccggcttcaggaaagcaggtccgagaggggtcacccggcccccggtgagaattcgcagctcaggccaggcctcttgttcacctgttccgggcatgggggcggcctgcaccttgcgcctcacgttcctcttccctccacccgcctcctccagttctcttaccacaatttcgaccggagccggcacgacgacgacgacatccgaggctgtgcggtgctggacctggcctccctgcagtgggtggccatgcagtgcgacacacagctggactggatctgcaagatccccagaggttggccggagtggcgctgggggacgcgggatggagcgaagggtggcggggccaggaattccagggagggtctcctttcctcacaacgtctttgtccttgttcccctaggtacggacgtgcgggagcccgacgacagccctcaaggtgagcaccccccagcccatcccgctacccatcgcgtgggagagggcgtcaactctggggtaagtcccgagaggcctgaatgaaatggaggggatgaggagttccggtcgagagaagggggacggggttggctcggacggaggcagccacagccctgtttgcttccgtgtgggaggcgaggcaagcctggggcctggggcctggcacggtgcctgcctgggtccggtgtgcctgcaggctcgcctgctgccgcctggctctgccccggccctgccgcgcccgcctccggggcctggcgtgcagcctctgcctggccgccgctcccacgcccgcgctgctcctgcaggccgacgggaatggctgcgcttccaggaggc

SEQ ID NO: 18695 - DNA, 2300 bp, Homo sapien
acccctgacccttgtgggttgatagagaggttatttgcccaagttcatgggtgaacggatacttgaatccaggtttatttaactccagagccgtagatccctgccacctcctcatctgaacttcctaaactccgtaaagtaaaagcctgcagaatcttgctggacagggcacccccacccaaaaggaacccaaacaaaggggaggggccactgccccttgagtggatggcttggtccagctctccccagctctgtcttgtggggagaactttaccgaagtgacctcaacgctgtatcgatgggtcaatgtgaagcccagatggagaggccccaggccctgggggctgccccggtcacagctgcaagggacagggggcacgtttgggttcctgcccctctcacttcccatctcttccgtccccactcctgggttgtgctgaagtgaatcagaacccgagatccacgagcagcactggttctggatcggcctgaaccgtcgggatcccagagggggtcagagttggcgctggagcgacggcgtaggggtgagggggcctggggtacttgggactgcgaggccgggagcttggtgggcggggcctgtttggggcggggcctggaggtgggcgggttttcttgagggccgggcccccagtcggagccggcttcaggaaagcaggtccgagaggggtcacccggcccccggtgagaattcgcagctcaggccaggcctcttgttcacctgttccgggcatgggggcggcctgcaccttgcgcctcacgttcctcttccctccacccgcctcctccagttctcttaccacaatttcgaccggagccggcacgacgacgacgacatccgaggctgtgcggtgctggacctggcctccctgcagtgggtggccatgcagtgcgacacacagctggactggatctgcaagatccccagaggttggccggagtggcgctgggggacgcgggatggagcgaagggtggcggggccaggaattccagggagggtctcctttcctcacaacgtctttgtccttgttcccctaggtacggacgtgcgggagcccgacgacagccctcaaggtgagcaccccccagcccatcccgctacccatcgcgtgggagagggcgtcaactctggggtaagtcccgagaggcctgaatgaaatggaggggatgaggagttccggtcgagagaagggggacggggttggctcggacggaggcagccacagccctgtttgcttccgtgtgggaggcgaggcaagcctggggcctggggcctggcacggtgcctgcctgggtccggtgtgcctgcaggctcgcctgctgccgcctggctctgccccggccctgccgcgcccgcctccggggcctggcgtgcagcctctgcctggccgccgctcccacgcccgcgctgctcctgcaggccgacgggaatggctgcgcttccaggaggccgagtacaagttctttgagcaccactccacgtgggcgcaggcgcagcgcatctgcacgtggttccaggccgagctgacctcggtgcacagccaggcggagctagacttcctgagccacaacttgcagaaggtgggcattggattgagcagggggctgcaggctgggggagggcaggcccgggatgagggcagggggctgcctacccacacctgcccgcctggcttctccagttctcccgggcccaggagcagcactggtggatcggcctgcacacctctgagagcgatgggcgcttcaggtaggaacccaggcaggcagcagatgtggaagggggctggctgtccacacacggagcacagaggcagacttgcatttgaatccagccctgccccttccttgctggctgtgtggccttgagcaagatacttaacctttctgggccttggttttctcatctgaaaatgggaatatgaggcctgcctggtaagatttttgtgaagattagaaataacatatgcgaagtgcttacgcagcatccagcacattagttactaaataatggcagctcctgttacgtctggtgtcattcatcatgactaaggccctctcggggaagtgggcagaacatatgatgatccgggggcctctttgtatttggtgcctacttaccatgtactggggggcttgaggcaggaaggaccaggagcacctgggactcagaatttgagcttgtctttttgcccttgggcttcctgccctggagtcctcaggcttcttttctggagcagcaagtgtccagggacagctggggccttatctagaggca

SEQ ID NO: 18696 - DNA, 2300 bp, Homo sapien
ggagcgcggggccgcagcaaccaggccgggctccccgtcgcgccccttccggagcgggaggccctcgccgaggcggaggctgggacgcgcggggcgggcggcggcggggagccgcggggccgaggcgcagggcgttttccccggaggtgcggcgtgcgcccgcgacacaaaggtcttttaaagacctcgcagcgcccttcccggctgcggaggctggaggcccgggggggcgaggccggggtcgggggtggccgcgcgagggggcgctgggatcggccagaccccgcggttgcgcccgggctggggctcccgggctccttttgtggaaaagagcggaaagcagggccctctccgggtctctgaaaatggtcagttcggcttcgcagggctgcgtgcccggaataataaattggcttctctagggtcgtaatctgggccccaccccgagcagctttgagctggttcgcgccttccaggcaggactactgggagttctcaaaagcacccccgcagtcggctgtgtcaggatcacctgggtccggtgtgaacacgattccagggccccaccccatcgcctgaagcggaatctctgggcggggcccaggaaaccgagtttttggtgagttcccgggtgattctgatggcaaagcccatgtgggagccactgttctaagggcttttggacaggcagttgtgaaattttcccccagaagaatctctggggacccagttgtcacacaccgctggattcactgcggtgttgattctgcctcctgatgaagttcttcccgagtctgacttcgagcccgcctgctttattaagcacgtttttctccagtcgtttttttttttttttaatggaaaaaggaacagggagaaggcttttctcgaacctgtttgcagagagccgtcttgcccgctttgagggccctttcttgggagacctgtttgctttgttcaacctctgaattcagcagaccccaaatccaccaaggccactagcttgtgagtgaatgtggtcccttcaggtaagggccagacagcccctgccagggcttggggagggttttcctagaggaatcctggcagtaaaaaaaccaacccccaaactctccaagtgctggacgctggagaatcccagcaaggaaaaggaacaaatcttatctcatgccggaagataacctcttccctttgttggcgcctttccttgcgttcaggatgaattaaaattcttatctgctctgcatccagtgaacttggcctcgccttcctgattgtttgctgcggctgactttcccaagctttgcggggttatttttgcctctgggtggtggtcattccttccttccatggcatttggttccacacagtcacagaaaaagagtaatttagcaaacaccctcaaaatggcaggactggcccccaaaacctactttcattttcctctgttctgggttgtgggtaatttcttgacaactacaagaaagaagacaatgagaaatgaattgttttttccaatacgattgtgaacagatgtataacctcctagtcgcagcaacgttctaggaatcccttacaccactttaaaggggcaggaaaatgggcagaggtgctgagggctgggtgagtgctaagcattggcagggctcagcctcatcctgacgagagctgcagccataacctgggtcacctttgctgtctcgggcttctaaatttggcagcgagaacagactcgcttcctttgagcaattgatctgaatagcagaatcccattctgatggtccgaatcacatttacaggctgtgggggtgaaggccgtgctaattggccacttgcctcaccactggctttgaaacaatcgcttgtattctctgcgcggcaggaagcagcagacccatcaaggccctgggctcactctttgttctgactttatggcattttatgccacaataagaaacactgtgtactccgtgggagcccattgtgccaggctgcaaggatgtgggctccggtgcagagggcctggtgctcttccccaggaagaagaggggctttgtgacaggctgggggacaaaacaaggggtgctggacactgttactgaggcaactgcctggccagtgtggaggcagctttagtccctgggaccgtttctgtgcccaaggagagggagggcaggggaaggatggaatttcatctagagtagcaggtcctggttgcctggtaaattatgcatcaggactgggctagccactgcctccgttttctctgggctcctgagataacctccacctgcctctag

SEQ ID NO: 18697 - DNA, 2300 bp, Homo sapien
aaaaagagtgaaactctgtctcaaaaaaaaaaaaaaagtcatcagccaaagcctgcactgccaactcctctggatcccttttctattttattgatttatgtatttatgtatttatttatttttaagacagagtctcactctgttgcccaggctggagtgcagtggtactatctgggctcactgcaacctctgcctcctgggttcaagcgattctcctgcctcagtctcccaaatagctgggattacaggtacacaccacagcacccggctaatttttgtatttttagtagagatggggtttcaccatgttgtctaggctggtcttgaactcctgaccttaagtgatctgcccacctcggcctttcaaagtgctgggattacaggcgtgagccacagcccccagcccccttttctattttaaaaaattttcaggagaattcagttgcttacgtagaagcatttgttcccaaaatgggggtcggcccagtctggagtggcctcgccaccagctccagcgctgtagttccacagccagatgctcaaagcatccttgaattgctgctgcatctctaactggggtttataaaacccaggaggggcctgagaggagagcttaactgatttctagaagagctgatgagtcaagattcatactgcgttgctgagtgtcccatgcagttaacaataaaagaagctgcccgagtgttaggacattagagactcacactggtgtccccctgtgaggagccccaattaaagtgagccagaattgacttggcccttggtggtgcccgatgctctgaggatttgcatttcaccagcccgagctgttatcaacacagaccttccagggcccgtggagtcccgtccactctacagggtgaaccgctttagaaatggaatgataaaaagagcagcatctcatcagatcccacacaatagcagagaggagaacaaagcggggggaggccgatgtcaggagggaataaaggtaagtggcatcagagaagtactgtcagtttccttctcacatcaagagggtaaaagaccctcaacagcacacacacaccacgatgaattcaatggattctcattttcacaaggaaatcggaaggccagccagtttcttaagggctaacacagggtggtggttaagaacacaaaccctagtatcgagcaggcgtgggttcaaatgttcattccatcacttactggaaataggatcttgggctagttatgtgactgccctaagccttggtactctcaagttataatgtcgtatgattgtgttacctatttcacagggttgtgaggcttaagttgtgtgtgtgtgtgtgtgtgtgtgtgtgtgtgtgtgtgtgacagagagagacagagagagacagttagcatgcttctggccagttcagtgattctgtgtaggaattcatagtagggattctagggcagccagaagttacagaattgacctggggctagtgacaaagagaagataacgatttcatgagcgatttataatttttattttcactaaatagtaaacatgaccaaaatccccagtgttccccgggcgccagctcctatagccttcctcctgatctgccaagacatgttatacttctcttaagttcttgtaaagctgcgtgggaggcagggtgtcataaatgtacattgaatgaacgtggatgagaaagggctggtggtttttgtagaagtcattcccagagtggtggttttccctttcagtacgtatggaacaaaagccagtatttagtgtgaggtttgcgcatcatcagtcctgactggctggggctgggccagtcttccgggagcttctgcagaaagaatctgtatcctcagggtccccccatttccctaggaccacaggggtacaaaggagaatacggggcagtaaaatgaagcctgctgggctctgctcctcttgtacctccagccattttgaccgtgtctgttttcttctctaggtcttgtctgttgcatttaaagggcaattttgcacttggtgctagaggcctttcatccatgggcccttttactggaacgataaatgtgtcttttctcaatgcagatcaagtagttcaacaagaaggcctgatgtgtaacactaagctgaagaggccaaatcaagagagaagaaacttggtcccatcgtcacagccaatgactgagaacgcccctgatagagccaaaaaaggagacccgagtgctccttcccagagtgagctgcatccagccctgtcccaggccttccaaggaaaaaatagtcctcaagtattgag

SEQ ID NO: 18698 - DNA, 2300 bp, Homo sapien
gcactctgtattctcttctatcgctcacctttgaactgcttcttaatttaaaacccactcatggttatgcacacttctgttttaagtctttctggtgataatgtcttgtgccaaatctgtgctttagaaatcaacataagaagccatattaagtagggagagagaaaggaggagggagttggaggcaggtggagaaggaaggagggggtcctgccttgctgaaagcaagagcgagtaattcttcttggcctcaaaattctacatatctgtgaaattttaatgggggaatattctaagaactttgtgacatacacgttcttctctagtgtaattttccagtgaattccaaccaagttttcctgactgaggggaacagaatctgattgcagaatgtttttcagtgctctaaaagtcatgcatacgtaccatccctctgttttatgaccacatttgtcaaaagaactgatttgaaggagcctgttcttaataacaatcaaagtcttattggtttcttactatgttctcataagagaaagacatcactaaagttaatatgctgttaagcaataaaggaaatgtaaacaatctaacctcctccttagacggaaggttgctttgaaataaaatctaaatggctattgttaataccggacaatcaggctcgaaaattactccctttccacaattaggtgattggagaaggatttcaggagaccttattcaaccttttccccaattgattaatttgtaatgtcagacattataggatttgtttaaatcttagctctaaaaaaaactttgcattttaaagtcttagcttataaacatgtcttgagtataagcaacaaagtttacgatttgggcccaatttaagaatactgtgactgcagagaaaaagggggaattggttgggaaaggtaaggagatctttcaactcttccagccaatttggcttaagagttgggggcggggtggagggtggggaacagacttgtgtttggcggtgactcttcattttactgtgaaactaggagagataggtggtcacatttcgaccatcaagcccagaagagaggagaaactcaacgtgtaattgggaaactctgggggaggaaacgtcacaggtttgacaagcaattcagtgccatcattaataacaatatccagccagagaaacataacgagaccccttctttacaaataatttaaaacattagccagacatggtgttggcctgtggtcccagctaccaccgggaggctgaggcgggaggatcgcttgagcctgggaggtcgaggctgcagtgagccctgactgcaccgctgcactccaacctgggagacagagcgagactccttctcaaaaataaacaaaatcaatatcgaccatttcgcattcagaagcccagtgggccatggtctgtgtataccttttctgaccagtggcgtctgcaggaaagaatgtgggtgccagtgagcaaaggttcacggtctcccccaaacctgtccctctgagacagaaaaatgctggggctggggtcagccgaggggaggggacggccaggccaccggatgtcaggcccggtttccctccagaatcttgtaagtcgaaagggaaggttgtcccccatcctgggagaactggagcggagcggcgggggcgagggggccgttacctgtgggtctgcccttcctcccctgccggggctacaggggtcgaggggctgggcgggcgggccggtccagggcgcaggagccgcccattaattgcgcggggacggccctgagctcctcttcctcctcctctttttgcttcttcactccctacacctgcccctcttcctcctccttccccgaggctgctttccgcggcgccggccggccttgcctggggcggaggcggtgggggcggctaccgggcgtcctccggtttccctagcaaccgcgcctccccgcccccgcgcgaccaggtgcagccgccgagagcacggggcggggcggggcggggctgtggccccggggtcccaagccagtcgtgggcgcccgccggttgccgtgggaacgaggcgggctgcagtcggggagtcagagccacgctggtgggcagagaagagatgcccaaggaggaggcggttggctttgtctgggtgcccaagcccagacccagatatccaggcctctgctcccttccctgaaagggtgctgtgcttcataaaaaatgagattagaaaacgagagaggaaaatatttttaatggaatcagggaatgtgaaaagcggtacatgcgaagaggaaaagata

SEQ ID NO: 18699 - DNA, 2300 bp, Homo sapien
ggaccagagcattccagatgtcctctgcagaggtcgaactccaggactgcagtatcttttcctcttcgcatgtaccgcttttcacattccctgattccattaaaaatattttcctctctcgttttctaatctcattttttatgaagcacagcaccctttcagggaagggagcagaggcctggatatctgggtctgggcttgggcacccagacaaagccaaccgcctcctccttgggcatctcttctctgcccaccagcgtggctctgactccccgactgcagcccgcctcgttcccacggcaaccggcgggcgcccacgactggcttgggaccccggggccacagccccgccccgccccgccccgtgctctcggcggctgcacctggtcgcgcgggggcggggaggcgcggttgctagggaaaccggaggacgcccggtagccgcccccaccgcctccgccccaggcaaggccggccggcgccgcggaaagcagcctcggggaaggaggaggaagaggggcaggtgtagggagtgaagaagcaaaaagaggaggaggaagaggagctcagggccgtccccgcgcaattaatgggcggctcctgcgccctggaccggcccgcccgcccagcccctcgacccctgtagccccggcaggggaggaagggcagacccacaggtaacggccccctcgcccccgccgctccgctccagttctcccaggatgggggacaaccttccctttcgacttacaagattctggagggaaaccgggcctgacatccggtggcctggccgtcccctcccctcggctgaccccagccccagcatttttctgtctcagagggacaggtttgggggagaccgtgaacctttgctcactggcacccacattctttcctgcagacgccactggtcagaaaaggtatacacagaccatggcccactgggcttctgaatgcgaaatggtcgatattgattttgtttatttttgagaaggagtctcgctctgtctcccaggttggagtgcagcggtgcagtcagggctcactgcagcctcgacctcccaggctcaagcgatcctcccgcctcagcctcccggtggtagctgggaccacaggccaacaccatgtctggctaatgttttaaattatttgtaaagaaggggtctcgttatgtttctctggctggatattgttattaatgatggcactgaattgcttgtcaaacctgtgacgtttcctcccccagagtttcccaattacacgttgagtttctcctctcttctgggcttgatggtcgaaatgtgaccacctatctctcctagtttcacagtaaaatgaagagtcaccgccaaacacaagtctgttccccaccctccaccccgcccccaactcttaagccaaattggctggaagagttgaaagatctccttacctttcccaaccaattccccctttttctctgcagtcacagtattcttaaattgggcccaaatcgtaaactttgttgcttatactcaagacatgtttataagctaagactttaaaatgcaaagttttttttagagctaagatttaaacaaatcctataatgtctgacattacaaattaatcaattggggaaaaggttgaataaggtctcctgaaatccttctccaatcacctaattgtggaaagggagtaattttcgagcctgattgtccggtattaacaatagccatttagattttatttcaaagcaaccttccgtctaaggaggaggttagattgtttacatttcctttattgcttaacagcatattaactttagtgatgtctttctcttatgagaacatagtaagaaaccaataagactttgattgttattaagaacaggctccttcaaatcagttcttttgacaaatgtggtcataaaacagagggatggtacgtatgcatgacttttagagcactgaaaaacattctgcaatcagattctgttcccctcagtcaggaaaacttggttggaattcactggaaaattacactagagaagaacgtgtatgtcacaaagttcttagaatattcccccattaaaatttcacagatatgtagaattttgaggccaagaagaattactcgctcttgctttcagcaaggcaggaccccctccttccttctccacctgcctccaactccctcctcctttctctctccctacttaatatggcttcttatgttgatttctaaagcacagatttggcacaagacattatcaccagaaagacttaaaacagaagtgtgcataaccatgagtgggt

SEQ ID NO: 18700 - DNA, 2300 bp, Homo sapien
cgcccaggctggagtgcaacctccgcctcctgggttcaagcaattctcctgcctcagcttcctgagtagctgggtttacaggtggctgccagcacacctggctaatttttgtatttctagttgagatggggtttcaccatgttggccaggctggtctcaaaactcctgacctcaggtgatccccctgcctcggcctcccaaagtgctgggattacaagcgtgagccaccatgcctggcccaaagcatatccttttgaaaggcaaaaaccatgaggcaagttcttaggttacatccttatcagttaatacttcaattatcagttaatgctttactaaggaatacttgataatcagctgagaacaagaacagaatatggactgggctactagagatgaaaagatcctagggtctgctggaggaccagcgaagttcagatgggaaagtgcccagtggaaagacttcagctaagtacatttgtctagactctgcccagctcatgatatgtctttgaagctggtgtgaaggcaaggaaaaatgttcagtgtgtaacacatagtcccatctggctgaagtatgagtgaagaagtgatgaaggggaaaaaccaagaaaggaaactgtgggggagggcacagggaaagtcatagtgacgagtttggacttcattccacaggcggtgaggaacctttcagggctttttaagcagggggccagcaacattagatgtaggctgcttataggatgggggaaatggtgaagatagggtgtggaggacaggcgcccagggtgtgaccaggaggccctcagaataatccatggagcccaaaactaggtcatggagcccaaaactagagtgataagaatagaaagaagaatgtgacgctgccaaggacttggcaccaactgaatggggggaaggggaggtgttgagaagacggtcaaaccacagacacctagggattccgggcactgatgaaagttccaagaatttctattcttcctttaccttactctccactcaatcaaaaataccctaacttgacatcagttgacaagttgagagcctaaatatgcaaagtaaataggggagtcatctttgcccatgagaaccacagacagacatcaacccggcaaagccgggcaaggtggctcatgcctgtaatcccagcactttcggaggcccaggcgggcggatcacttgaggtcaggagttcgagaccagcctggccaacatggagaaaccccgtctctacttaaaaaaaaaaaaaaaatacaaaaactagccgggtgtggtggcgcatgcctgtaatcccagctactcggacggctgaagcatgaaaatcgcttgagccccggaggcagaggttgcagtgagccaagatcgtgccactgcactgtccagcctgagctacagagcaagactctgtctaaaaaaaaaaaaaagaaagaaagaaaaaaaagaaaagaaaagaaaagaaaaagaaagaaatcaacctggcacagagaaggtgagggtagtagcggttctggtgccctggctccaaagctgtagggcctggtctaggcctctaagcacctctctccttggaaagggggtgaagacgactgattacgaagaggcctgggctctaatgtcggttctgccactgactgggtgcctggcttcatcgcttatttcttctttttcgtgttggaccagagcattccagatgtcctctgcagaggtcgaactccaggactgcagtatcttttcctcttcgcatgtaccgcttttcacattccctgattccattaaaaatattttcctctctcgttttctaatctcattttttatgaagcacagcaccctttcagggaagggagcagaggcctggatatctgggtctgggcttgggcacccagacaaagccaaccgcctcctccttgggcatctcttctctgcccaccagcgtggctctgactccccgactgcagcccgcctcgttcccacggcaaccggcgggcgcccacgactggcttgggaccccggggccacagccccgccccgccccgccccgtgctctcggcggctgcacctggtcgcgcgggggcggggaggcgcggttgctagggaaaccggaggacgcccggtagccgcccccaccgcctccgccccaggcaaggccggccggcgccgcggaaagcagcctcggggaaggaggaggaagaggggcaggtgtagggagtgaagaagcaaaaagaggaggaggaagaggagctcagggccgtccccgcgcaattaatgggcggctcctgcgccct

SEQ ID NO: 18701 - DNA, 2300 bp, Homo sapien
gagagcttgcatgtttgttttttccatgtcacaagtgatattactgtgtgcctagttaggaataattgctctgtaagggaaaaaagattttaaggttaaaaaaaaaaaaatcattgctctggtagaccagcatcatattataaaaatagagattttaaaaaattgaaactctcctcttctctggagagataacatatagtagaagagaaatttggatacgtttgagagcttactgtgttgttaagaaaaattagattctaatattattgatatgattgaaaagatttacttggttggagggtaatgagaatgtcacttgtttttggttgagtcaaatttatcttttgtaacctggttatagtatttaaattaaaatcaaaacctagattcaacagagatgattaaacacaagggactgcatctaggaatcatcttaggatgagtcgaagagccttaatattctcatagctagttatcaacacattctccagttattaaattttagcagaaagagtatgaatagagactctatttgtaaagaagttgaaaggcttcttttaaatttaacatttaaagatgttaaatttatcattagtgcgtcttcaagtaattttgctgctgatcacttaataattttaaaaacgataaaatgttggccgggtgtagtggctcacacctgtaatcccagcactttgggaggctgaggtgggaagtacacattcaggagttcaagaccagcttggccaagacagtgaaaccccgtctctactaaaactataaaaattagccaggcgtgatatttggcggctgtaatcccagctactcggaaggctgaggcaggagaatcacttgaacctgggcagcagaggttgcagtgagttgagattgtgccattgcactccagcctgaacgacacagtgaaactccatctcaaaaaaaaaaaaaaggataaaatgtttttagtgtttgaaaaaatatacttttattcactattgtagtaatttatttgtgtagaaagagttgaagaaaagtgaattgtcattaaattaggtaaatcagaatatattaccaccaacctttttagtaattattcattccttcacatcaaaacttaaaaagtaaatagcttcaagtgtaagaatcattcaggatacaaagtgatctcaggctgtaatgctgttacagagaagttatttaggtttgtattaaactaatattaattctgttttattagacaaacttttagaataaggcatttttctctgcattcatgtattgtctctggacagctgcctatgtatcgaaaagacacttccttgcattaagaactttatttcttcccagctgtagagattttttttttcccttccatctaaagaaaattattggctgggtccagtggctcatgcctgtaatcccagcactttgggaggttgaggcgggtggatcacctgaggtcaggagttcgagaccaccctggccaacatggtgaaaccccatctctactaaaaatacaaaactagccaggtgtgatggcgcatgcctataatcccagctatttgggaggctgaggcaggagaatcgcttgaacctgggaggtggaggttacagtgagccaagattgtgccattgcactccagcctgggcaacaagaatgaaactctgtctcaaaaaaaaaaaaaaaaaaaaagaaagaaagaaagaaaattattaacaaggcaaagttccaggtcttccaaaaagttttattgattgcaaggaaaacttgcaatagcagggagaacttgtgcttaataaaaaatttctctattctattaatgaatggcagtgatagggtacttgtcactggaaattttgtaggcagaaaaactggcaacagtctctgttaatgttaagttcatcaagtttcacattaatttgtagaccccaaagtccttatccgagaaagcaaaaacaaatagagcctaatagatgtaaaagctatgcatgtagttttttttttcatcaaagcatttattttatcttaaaatatactttaacagctgatcaggttatcttacttattcatgattccaatttttcagacctcagcaatcacccagcggataagtccttgttccactctgactagcagcactgcctctccaccagccagtagcccctgctctacactcccacccatcagtacaaatgcaactgccaaggactgcagctatggggctgttactagtccaacctctacccttgaaagcagagatagtggcatcattggtgagttggtttttatattgataattttg

SEQ ID NO: 18702 - DNA, 2300 bp, Homo sapien
acaggtagtgttgagtgctatgaagaaaaacaaaatagggtggagggataactggatagtagttgttttagataggatatataggaaaggcctctcgtttaaaagtgatgagatctgatctgtcttttttaaagatttctgtcaactggccgtctacataataaaatgtaagggataaagagttgaagcagaagtataggtgaaaggtaatggtggcttagactagagtgataatgatggggaccatgtgaaatggtcatatttcgttggactgtattttgaaggagagtaaaaggacttgatgatgggctgaatgtgggtgtcagcaagagagaagactcaagaatgaatcctgggtatgttgtgagcaaatgggtgaatgatgatttgaggacaatagaaagatcacagatatcttctagaatttggtggtagagtcagtggtaatgccatttattgacatggggtgagttttgtggcgggggacaaaattaagtactgatttggtcacattgtctatgaaatatccaaatgtaaatgttgagtagacagatataagatgggactcaggggagatgactaagctagaaacataaagttaggcatgagccacatatagataatatttagcaccatgggactaaagaatctattgatgggagtgagaatggctagagaagaggaaagaacagagcccagagccctgggtgagctgggaaataaaaaaaagagccagcaaaaaagggaaggttaaaagtggccagtgtgctaagagagaaaagaggggaacgttctctgggagcaagctgcagaaagtgactccaaaaaaagtgcattgaggtgagatgcgttgtgtcaaatattgccgagaggttgaggaagatgagaactggaactttattatcggatttggcaaagtgaaagttactgatgcccttgacaagaaccatttcagtgaggtggtgagggtgcagcctgattggaacaaatggaggagagaatgggaaggaaagaattatagatagcgaatacagaaaacttttgtgaaaaatgggaacagagatacagggtagtagctggaaggaagaatatggagtttatgtatgtgtgacccagctgagaagaaacagatgcaggagagggaatgggtactcacaggagcaaagtccgtgggtaggtaagaaaggatggaatccagtgcataggagtagccacaaagccatatcaccttcccccagtagaatttccaacagattctattggaatctgttaccaaggtgccaagcttcctactgttagaagtgtacctttcggctaaggtatctccagaaggcccgcatttaaatgtagtcattttatacatctgtgttgtgtgggaaatttttttttaaatagtcattttattaggagagttagaaagccaactttttctaagccagtctttgaatctttgtacatttctcttactgacttgtacttggcattatgccctggtttacactgagaaaaattacagcaaaagagttatacagtgctccgttttctatttatttcaggagtgttgtttagaatgacgatcatgaaatcactccaaaagcactctttacaaagacccatttaaaaatatatcttaagtctcaatgttaggagaagttgtgtcccttctatgcaactaatttgttttactttttggatactaatacttgatcatgtttccctgtttggccacttcgaagttcagaatacatttgtgaacctcatagtttatcacaagagttaggggaaactgaaggtctttctgtctctttctctctctccatctttttaggaaattaccaagctgctgcctttccataggatttttttggatcgactagaagagaatgaagccatagaccaggacctgcaggcttacatcctgcaccggatacacagcagctcagagatccagaataacatttcacttaatggcaaaatggacaatactacatttggcaaactcagttctcatctcaagaccctcagtcaagggtcctatctatatctgaaacttacatttgacctcatagagaaaggctatctagtgttaaagagctctagctacaaagtagttcctgtttcgctctcagaggtttatttactccagtgcaatatgaagttcccaacccagtcttcctttgaccgggtgatgcctctcctgaatgtggcagtggcctctctccacccactgactgatgagcatatcttccaggccatcaatgctgggagcattgaaggcacactagaatgggaggattttc

SEQ ID NO: 18703 - DNA, 2300 bp, Homo sapien
ttccttaatcaaaaatgtttaataaagtaaattttacgttgtttatatgcacttgtatgtatgtattttgcgtatatatagaaaatgtgttaaataataaacactaatgtgttaataggagtcacctcttaggattgagatgggaggtttatttttaataccatattattttatttgatttttataacaaatttgtattatttttataatttcaaaaactgaaatgtagaagtcttttttccttctgttttttggtggttgttgttttttggtttttttgagacaaagcctcacggtgttgcccaggctggagtgcagtagcacgatcactgctcaccacagcctcaaactcccgggctcaagcgatcctcccacctcagcctcccaagtagctgggaccacaggcatgcaccagcatgcctggctaatattttaatttttttgtaaagatgtagtctccctacatttccctggtctcaagctcctgggcccaagcaatcctcccaccaccacctcccaaagtgctgggattacagacatgtaccactgcacctggctgaaaataaaatttttaataggaaagttcaatgatttaatttttggttgcatcagaatatccccacagggagaaaaaaaaaggtgcctgtgtcggaaaagcctttaaaacgttcgtgtatctagccttcccacagcattattcacctttcagcctttcctctagtgtgagaattccctctacaggaagttttttcctaacccactttagagaccctgaactctctatgggaagaccttgaccaccatgactagaggtcttgttagatgaatttataactcataagttactgacacattcctcctttgtagatgccccttccctagtatgccgcataaacacaccttcctgattttgggtatatgtaggtattctaggcaagaacattctatatttcagggacaaagaaagcagaagtagcttaagtttttaaaagaagtacctccctatatctcttattacaacccaaatttcattgttaatatcttcctgccctcaggatttccttctttaactgatttgatccagatattgacagaagagtaagatgattgtcagagagtgtctaacaatcaggagatctgaagaacaaattattctaacttccttctggggaagcccatgtgaaaaggacaaatattagtacatgtcgtgggacctgtgccagtgatactaggagaaaatttgttgcggatggaaatcaagcctgtattgctgtttttttcctgaggataagcatatgtaatcattttgggatatattagttaaggtgaagaacactagctgctattgacaaacctgcaaaatctcaatgacttaacaaagatttatttctccttacatcacagtacagtgcagatgtctgggcaggctccttccgtgtagtagttctaaaatcaccttgggcctcagaattctccattggatcttctacatctggcctgtaatcaaaaggaacaatagaaagtgtagagaaatatgcaggaagttttggagccaagcctggacatgacatattatttatgccctaattttattcaccagaattcagtcacatggcctacctaactgtaaaggagcctgggaaatagagtttttccaaatgttcaggaagaaaatgaaatggaaatccgtgatcacattgcattatttctgccacagtgtgtaatttagtaacttgaatttaagagatttattgaagaaggctaataaaaaagatatggaaaaataaattatatccagatagaaaagagaggtgttgagtagacgtgttgctaagggctgcagagatggagactgtttcagttagcttgttcctgcaggactggtctttgtccccccacctaggctttgcttggcatgaacattgttagggtgagactccgctctcattcattagtaccaaaaacaaagaggccactaattcaccactgatgctacttttttttgctgggctactaatttaattgtctgtatttcttattcagggtttgagtaaaaaagttggtgtatcatcctccatcctccaaggtctctggatctcttatagcacagaaggtctttccatggcactggcgtctttacgaaatctctacactccaaatataaaggtaaatttataaagaaattataaatatgataaggaattaactatgaaaaaataaaactagaaggacattaagtagctatttagttgatctttgacttgtctttcttattagccttttattgataatttaatata

SEQ ID NO: 18704 - DNA, 2300 bp, Homo sapien
ggcatgagagaacttggcgacgatgggagagaaggtgacttgggacgagctgggtttgaagcgtctgtgggatgtccaggtagagatgagtagtgaaccgtcagaaatggggcttgaatttggggtggcggggacagaactgatacccgtgtaggtgacagataaggacagaggcaggagttccaaaaataggatttattgttggctggggcttctggaatcccgtattcccgtccaccctgggaatgtggattggagctatgtttctgggagatgatttgatggaatgtgtcagaagtctaaaacagaacctagcccttgtttcaggattccctgcagagaagtttgcagatgaccacatcctgttgtttatttggtggaaaactgaaatcgaaagctagctaaatgctgaacaatgggaactagttggctaaaaaatggccgtgcaatgcaagagtgtgaggttacgaaaatgatgatgtgggcgcgtatccattgacacaaacatccatgtgtgctacgccctcagttaaaaagcaggttagaaaatggaataaatgatcctgcttctataaaaggatgcatatgtgttttaggaagaaggtgtgtgaggatatagatcaaattctgatggcctgtcattttaccttttttgctgatccatattctactgcagtgcgtgtggattattagcacacacacacacccttttttttttaattaaaaaaaattttttttgagacagagtctcattctgtcacccaggctggaatgcagtggtgcgatcttggcccactgcaaactctgcctcctgagctcaagggattctagtgcctcagcctcccaagtagctgggattacaggtgtgagccaccatgcccggctaatttttatatttttagtagagatagggtttcaccatgttgtggctggtcttgaactcctggcctcaggtgatccactcgccttggcctccccaggtgctgggattataggtgtgagccatcgcacccggcccacacacacaccccccctttaatggtggagttgccaacagttgtccgatgtggcagagagaactggggagcagagaaggagcccatcactgggagggactgaaaaccagctcctgggcactgcagggcagagcgtgtgccgggtgtgaagggggtcagtgcccctgtgctggccactgtccccctagttctgatacagttgctgccaggagaggctggaccgtggcaaggggccagtggggaaccggggcgggatggggggcagcagcagtgctctggggtctgcttgtggtggccatggtggtggcagttgcagtggcaactgtgggccatggcagcacttttccgtggcgcacaggccgctgccgggtgaggggagagccccgcttgttctcctcctgccgcctctcctcccatccccagctgctgggtgctctccggccggcatgaagctgtgcaggcactgggcactcccttgggctcttagcggggccttctcattgctgcttcgctaggaaccacccgctctcctttcctcctggagggccacgtggggccgagcacctgggacagccgtgctgagctctacccggccccttcgcaggcctcgtttctgggggccttcagttttggaaacctccctgagggcccctctagagtgcgggtccgccccgcccctggtgtggaggggaagtgccctgtccctgtgtgctgacaggtccctgtgtgcagcatggtcggggcacttctactctgcaggcgcggccgggcggggagcggggtggggggcgggcgggggcgtggggggagcggggctggctctcctgggtgtggggtggggaggcctcctcatcgccagcatggagttaaaaaccaggatgggggagggagacttcccatttctcccgagatgtacttcatgacgcgtctggagaaaaggtgtgaccagccccttccttcccgtcaaggagcgcgcttgcctgtgtaactcacctgtaaagcccacccagggaaggccagggcctcatgaaacagaaaacaaagccgggcactgggcccttgagctcactagaatttggggtatctttccttgcaccctcaccgcatatggaactcctggcgtcgtgtcccaggtcacgcctgtccccgtggggaggctgggcccctccccccagccactcccgagacttgagacctctgcctcaggacgatgggtgggaaggggcttgcgggtaggagagcgagcgctgcttccagcgggagcctcgggggagggtggcgggg

SEQ ID NO: 18705 - DNA, 2300 bp, Homo sapien
cccgaggctgtgcaccatgtgcagtgtctggtccccaataatgagattagtcttggttgccttttaataaaacgcagtgggcaccgggagggagagcgatgcttggctcagtgaagatctgcgggtcatgctgtccctaatgcgctgattgcattaagtggattctggctgcaggtagggtgagtgggtggggacgagggtgactctcacagctctaagatccagaaactgccagagatctgtcaccctcatcctgagctgtcacagaggaaggcaagtgactgtgtgaggggctacgtgagctccctctggttgcaaggttctggtctgcagggcagtggagcccttgggggtggggagtggcagcttccaggccttgaagctgctgcccacagttctgctctgagaacacagagggcccaagaacagccggtgtcccagggctgcccagtgaggagggaagagcgagagagtattcttgctgtcaagactgggaaatgagggccacgattcaaagccttgcttcctagggagaaatctcacccaatgtccaggtttgcaaatgcagcagacacatttgtgggtgggtcagattctgtccagagataccagaatgtctatccctgtacacccccacctctggcatgggacagcccttccctgcacacaaatgggttatcaattatgtccaatgaatggcctcacgagagtcctgttgcggaagggatcttccgcttatctcctgtaaagcacagagccacgctcagaacctacggactgtggtcgcctgcaggccagccatgggctttcctttcatccttacacttagattttgaagcctcgcctttgaatcagaagcaggctgctgtcattccagaggccgctgttcatctctggcttcctcccagatgcccaggtgccccgggtgcctgggctgcctaggccagggcacccgccttaggagcaaatggaaatgcatcttcctcggcttgtttgccctcctgtaaccccttccctcttgccttcggtcagggcctgctgtcttgcacgcaccagtgcttagtgccatggtggaaccgaggcggggaggacgcaggaggactggcacaggagggggggcaccgcccgggagcttcccctgcgtcaaagcagcttcctcagtgagctccaacacagacccttgctggcctcagtctctggaaagactgacagcaccaccctagttcctgggccttggaaaggccaaagccacgagcaggcagccactgttcggcaggagagctagagatgctattgcccacagacatcaaagcaggggtgccgtcttccgtgtgcatgctgggacgggtcttggaggcccagattagctcctggcttgaacttgtaccacccttacctgaaaattgggtctgtaccaaagctcatctgcacgcccctttagggcagggaccaggccccctctgtgtggccctagcacctggccaagtgcaggtggctgcgggttgagttgagctgctatttgctgatgggaatttgggggcctgtcgcttgtcctctttgagcctccatttcctggcctgtcaaattggggcaatgctcctgttatccacacagtgtcatttaagggtgacattagagatggcatgaagtgcccagcacagagcaggtgctcacaggctgttgggtccccaccctactgacacaccaagcacacgtctgccctgccatggtggggagcaaacaatgttatggttccgactccccgggaggccaggccgggcatttcactgtaggatgttgaagccgcaggcagtcgtcgctgcgagaagagagcctggctctgatgtccactgtcttccagggagcctggtgggaaggaaggagtgggcagcggcccctcgctctgcgggcctctcctgccctttgtactccacgaggtgtgaggaagttgccgggtcacccagcagagggagaggtgatgtcccctctgttcttcctaatttgtagctaatcagattctgcctgcagccaggctctctggggatgaatctaataaaggaggcggcgacctggagaggaggacagacaacaagtgaccaggggggacagcacttctttcagtacattttcctgttagactcggggtattagagacccaaagatacccaaggaggagtgagagcgtccctgccttcgaggagcagacagggcaccgcgagggtaaggaggctccgggagagcctggggacagagtgatctgcgcaccgcggtgcctgaggagtggaggcaggggtgtgggc

SEQ ID NO: 18706 - DNA, 2300 bp, Homo sapien
tggaactcatcttgtgccactcaagaaagggcaggaggggtcctctcctttcccacctttcccaagctgaaggactgcacacttctcaggcttccaaggcaggagcttcggcagcaggaacagggttgcaaggtagttagtctgggtgtctgtcgtcctgggttgggacatctgggagctggggcaaggcctctgggccctagtgccagagagcagtttggtggcgttgcctgttctttaaaatgggttaggtgtagccatgagcccccccatgcagcgggtgtgcaggcctctccctcagtcagaacaccctcacccacccctccccacttgaagcaggcccttgagaacactgctggcagggaggcggctgctcttcctcctaagggaaaagcctgcagccccgtgctgctgggccgtggggtgagggggaagccaaagggcccctatcacccctcagcaggagtctctcctggctttggaaggggctgaaggcccggggctctcacgagggaactcagccctgctcagccggtcaggactcctcctccacgtctaaatccacagaccaaacaaaggacatggctcagttccaccttcaatccacagggattctgcctgttagcacgctaaggaaactgtttcttactttaaattatccattaatttcctccaactgaaagatactctacaaattttctgttgttggagggtttaagcttggtccctctgagggggtgggccctgctgtgtcggccccttgtgtctgctcgtggaaggtgtgccatgtgccaccgtgtgccatatgcagctgacacgcctgtgcgtctcgcctggcgctggagactgctctctgtgtactaagcgagtactggatccccagggcctatcttgcccactgcctgtggcaatacacaggcaatacacaaagcgcattcaagtaagcaggtctccctgccccccggcctcccagaacctcggtgcctggagggcaggtgggggagggcgttcctgaatggaggccggtttccctctgcggggaggaaaccccatttccctcctacccctaggcgcttgctacatctggcccggcatcagacaggaaagaaccctttcttcccagcttgtaggaagtctgagctgggccccttatctacccacagcacttcctggaccgggggcctggaccgggctccgaaggggctggctcccggtcttggtcttggcctcggcgccctcgtttctctgcgctttgggcaggggaagctgcggacggcaagctctcggctttcgtgagagcctggtggaatcggtgttccccgaaggctactctgcgggggcgggggctagtccgggccttcccggcagtatcgtctcccccgtgggggctggggaggtgcccccagggctcccggagcggcggcgtggccaaggcccgaaccgggtctgacatctagtggcctcctgggcccgggcagggcgagggcggggcagggaagaaggtggagggcagaatgggaggcgtggagcgagaaaatcaggaagcgcgggaccaagccggggaagggcggcgggtctcgcccctggcacccgctctcctcggggcccgtcccatcccccaggcctggccgaccccaggtccttccgtgcgcagtcggggctcgcaaggacgaatcccgcggccctcgaggcaggcccgggggagctcccggccctccacccccgcaggccgcagatcccacgcacccccgatcatgggggccccggagggaggtcgcgaggccgggctcacggtggccgcggttcgcccacgtgcgggcccggagctggcagggcccggtcccgagcgtggccgcaaccgcggggacctggcacgtgcggggcagccccgggggccgcgtacgccacttccggtcccggagacaccgcccagcccgccgcccggttgccatggcgacgccgtcgcgccacggcccgcagaaccggccaagcgacccgggcgcggcgcggggaggctgaagggacgctcgggtaggcaaggtaggaggccgggctgggggtgggagcggagcgcgcaggggtgcggggcgggggcggcccaggtgagccctgactgcgcagggagggacagcgcggggctcccgagtagcagccggcctcgcacctgccccttgcggccgcgcactggactgcggcgccgacccgcaccctgggcccgagggctgcagggctcgcccgccctctcggagccgagcctctcccggtccaggcggcccctgccctggcctgcccgggtgccg

SEQ ID NO: 18707 - DNA, 2300 bp, Homo sapien
ggagtagctgggattacaggcatgtgccaccccgcccggctaattttgtatttttagtagagatggggtttctccacgttggtcaggctggtctctagctcccgatctcaggtgatccgcccgcctcggcctcccaaagtgctgggattacaggcgttagcacaactcaggaggccctggaactcatcttgtgccactcaagaaagggcaggaggggtcctctcctttcccacctttcccaagctgaaggactgcacacttctcaggcttccaaggcaggagcttcggcagcaggaacagggttgcaaggtagttagtctgggtgtctgtcgtcctgggttgggacatctgggagctggggcaaggcctctgggccctagtgccagagagcagtttggtggcgttgcctgttctttaaaatgggttaggtgtagccatgagcccccccatgcagcgggtgtgcaggcctctccctcagtcagaacaccctcacccacccctccccacttgaagcaggcccttgagaacactgctggcagggaggcggctgctcttcctcctaagggaaaagcctgcagccccgtgctgctgggccgtggggtgagggggaagccaaagggcccctatcacccctcagcaggagtctctcctggctttggaaggggctgaaggcccggggctctcacgagggaactcagccctgctcagccggtcaggactcctcctccacgtctaaatccacagaccaaacaaaggacatggctcagttccaccttcaatccacagggattctgcctgttagcacgctaaggaaactgtttcttactttaaattatccattaatttcctccaactgaaagatactctacaaattttctgttgttggagggtttaagcttggtccctctgagggggtgggccctgctgtgtcggccccttgtgtctgctcgtggaaggtgtgccatgtgccaccgtgtgccatatgcagctgacacgcctgtgcgtctcgcctggcgctggagactgctctctgtgtactaagcgagtactggatccccagggcctatcttgcccactgcctgtggcaatacacaggcaatacacaaagcgcattcaagtaagcaggtctccctgccccccggcctcccagaacctcggtgcctggagggcaggtgggggagggcgttcctgaatggaggccggtttccctctgcggggaggaaaccccatttccctcctacccctaggcgcttgctacatctggcccggcatcagacaggaaagaaccctttcttcccagcttgtaggaagtctgagctgggccccttatctacccacagcacttcctggaccgggggcctggaccgggctccgaaggggctggctcccggtcttggtcttggcctcggcgccctcgtttctctgcgctttgggcaggggaagctgcggacggcaagctctcggctttcgtgagagcctggtggaatcggtgttccccgaaggctactctgcgggggcgggggctagtccgggccttcccggcagtatcgtctcccccgtgggggctggggaggtgcccccagggctcccggagcggcggcgtggccaaggcccgaaccgggtctgacatctagtggcctcctgggcccgggcagggcgagggcggggcagggaagaaggtggagggcagaatgggaggcgtggagcgagaaaatcaggaagcgcgggaccaagccggggaagggcggcgggtctcgcccctggcacccgctctcctcggggcccgtcccatcccccaggcctggccgaccccaggtccttccgtgcgcagtcggggctcgcaaggacgaatcccgcggccctcgaggcaggcccgggggagctcccggccctccacccccgcaggccgcagatcccacgcacccccgatcatgggggccccggagggaggtcgcgaggccgggctcacggtggccgcggttcgcccacgtgcgggcccggagctggcagggcccggtcccgagcgtggccgcaaccgcggggacctggcacgtgcggggcagccccgggggccgcgtacgccacttccggtcccggagacaccgcccagcccgccgcccggttgccatggcgacgccgtcgcgccacggcccgcagaaccggccaagcgacccgggcgcggcgcggggaggctgaagggacgctcgggtaggcaaggtaggaggccgggctgggggtgggagcggagcgcgcaggggtgcggggcgggggcggcccaggtgagccctgactgcgcaggg

SEQ ID NO: 18708 - DNA, 2300 bp, Homo sapien
aggggaagacttccattatcttccaaccctgtcggaagtggaggcggaggctgtttattgctgacacagtccctaacccagggtctatagacattgtggaaatgccttggagtcagacgggagaatgaaccagcagaagcaatgcccgccctccaccctcctgaagagggttctcaggaactctttggaggcgaggccagcctctggctgagggcctctggatacaggttaggcctcaggctcttctcctctctactcatctctcctcccttggcccctccttcagaggctgacagagccccactctcatctcttccccacccaagcctctttccacagaaagactgcttcctcccaggagacagcagctcatttgcacacagacacccacagccctcaaagcctggaaggccaagctgttaggacccctgagagcagggtggctcctgggaggagagcccaggccaccaccttgccctccctggcccctggccttcgatggggctgctctgatcacaaacgtccaccaacgtagccggcccagaagtgcacccatgtcctctggtatccactggctctccaagccaaactgggcagggaggagttgtgagggaaaactgcaggtcaggagggaggctggcaaagcgggccagggccaggcctgaccccagctctcctctcccggccccactgccggccagtgtttaacaaggccctgccttctccctctagtgctagggacagccaccttcttcctctccccaccgccccctctcccctgcaacacgtcatctgacaagtcagtgcgatctcactggaggtgcatctcacaggaacgcggggtcacagcctcctgcacacactccatgctgcacagcaaggtgcacgtgtccctcagagccccagacaccatcccccactcacccagaagcccaagtgattcccaacagcccccagcagcctaatgggttggggtcttgggagcagctgtccctggctccttccctgatcccaccgcccagcctcaccccacggttcctccattgccccacctcccactgcgccgccgggcctctgccagggtcaaggggcttcccccctctggcagcagacgccatggtgccgaggtggcctccacaaccgccctgtgcgccaataggacaagactgtcctccctcccccacacttgtcactttgagggacacgtggatgagacaggaaaacacaggggagtgtggagacctgaggtgacttggagcaagcctctcaacctgagcggcaatttcttcatctgtaaaatgagggggttgttctcatctctgaggctttgtgtcgctctcaaagcctgctagcctcgggttctaggactctgttgggatcgtgtgtgatgttttctgctgagcgactggcagcctgtgtcctcggggggaaagagggcaggcgctccaaagctcctgcgctctgtggctccccctccctcgcagccccaagccccaggtgtgccggccgccctgagcccctccagcacctcccggaggcgcctgcaagacacctaaggtccccgcctccctcctctcccccccgccacacccctacccccggcaggcgacgtccccgcccctcgaccatggcctggtgaagaagccggccaggcccgatcagccccatccccgccgcacgagcggcgcctgcggacagctcctggggccccggccttgtcactccggaggcgggaggctccggggggtcgggctgggaagatcgagccggaggccgctaggctcccaggccccggccgaggctgcgcggccgcacggtgggcaggctcgggtgttccggcaaactgccgggtccccatcttctaaagagaggaggccctttctccagcttcctctgcgggagcccgacccagccccatcccgccacccccgggctgcacctcggcccctccccggcccgcgcccctgcccggggcgggccaggaacctcggcccgcgccgctggggactctggagcggaggaggaagcgcggcggggcgggggcgggggtgtgtcgggttttataacccgcagggcggccgcggcgcaggagaaggggcagagccgagcaccgcgcaccgcgtcatgggggccgcctcgggccgccgggggccggggctgctgctgccgctgccgctgctgttgctgctgccgccgcagcccgccctggcgttggaccccgggctgcagcccggcaacttttctgctgacgaggccggggcgcagctcttcgcgcagagctacaactccagcgccgaaca

SEQ ID NO: 18709 - DNA, 2300 bp, Homo sapien
ccagcctcacctaaaccccgctccaccccacagcaggacctcacttgccccactcagctctgcccttctttctgcctcccggccccaggtcaggcagggttcgggatcctcctagagcctcacggtgcacactgcgcccagctcagcacacctgggggtcctcttccaagcagggcccagggtctcgagggccagccataccttctctgcatctccctggcctcactttctgctgccccgccagcccacactcttaggggaccctcttctccctctgacctcttccctctcctttcatctcatctcccaacagaaagtgacatcaattacttgctaaaaatggcactggaaaaaattgccttcctgccctttggctacttggtggaccagtggcgctggggggtctttagtgggcgtacccccccttcccgctacaacttcgactggtggtatcttcggtgagaggagggatagaaaagccttcgccccagctagccctccccagcctcctggacagccaggcgcctcctgccccagccagttctagcctctcctctctaatgatgtcccccgctgtgacccaccgccttctcctttcctgcctgaaactccctcttccaggaagtcttccccagttcctcaggatggggaagggttgccgggtggaaatgccttttctacaaaagttaaatccatctgtttgcaacctctaggccctaagacaatttaaccatccttttccagaaccaagtatcaggggatctgtcctcctgttacccgaaacgaaacccactttgatgctggagctaagtttcatgttccaaatgtgacaccatacatcaggtattagcgcccccaccccacccacccccagtactgtcacaccctcaatccacttctcctcctgtgatcctagctgcctcatccccagggcttgtccccatgctcctccagacctcaaaggcctggagttagagtggcccactctcctgagcctgtcttgggtctcccttctcccccaagatagcttctggtccagcctctgccctgcaggaagctggatggtgcctgggtaaggaacccctgttcctggccccccatgatcttccctgactcccaccctgtgcctgcaggtactttgtgagttttgtcctgcagttccagttccatgaagccctgtgcaaggaggcaggctatgagggcccactgcaccagtgtgacatctaccggtccaccaaggcaggggccaagctccggtgtgtggtgggaagccgggggaagtgggaggcagagaggagcggctggcaaagggtgtggcaggaggtgtctggctgctctgatggggtggggggcaccaaccacagagctggactgatgtggatgcctgtctcctcgctatgtcatcaaatatttattgagtgggccttctggctggcatggggcgacacaaatgccccctgccaccatcagagagatcccaggccccagggtcttattgccacagtttctgcagtccattggggggcggaagtggccaggggcatgtgggccggggtccaggagcagactccagcctgagtcccctgtgcccatggtacccactctgcccaccaggaaggtgctgcaggctggctcctccaggccctggcaggaggtgctgaaggacatggtcggcttagatgccctggatgcccagccgctgctcaagtacttccagccagtcacccagtggctgcaggagcagaaccagcagaacggcgaggtcctgggctggcccgagtaccagtggcacccgccgttgcctgacaactacccggagggcataggtaaagccctgagtgaggatggtgtggggctaaggtgggtcctcaactctgggcttggcccaggccccaggttcctggtcagctcctaccagctgagccctggtaccctgtcctggagggccaggcagccccccaagctcatcagcagggcctgcgagtggggacaggcatgtctttcccccagcatcctagagagggtgtgctcagacctgagggcccctccccttccagaggaagccagacacaaggctctgtgaggtcacactgcgggctccgctcttattggccaggggacggtagctgcaggactctgctctcctgcggccatgggccagggttgggctactgcaggacttcccagcctcctcttcctgctgctctgctacgggcaccctctgctggtccccagccaggaggcatcccaacaggtgacagtcacccatgggacaagcagccaggcaacaaccagcagcc

SEQ ID NO: 18710 - DNA, 2300 bp, Homo sapien
gcccaagcacttgctccagccccaggctccacagcacccttgtttgatgactctgtccctgctcttacttttctgtgccataatgtccttatttgtccctattactagctatcagctctataagagctggatgcacatcaggagtgtgcccctctgtaacaactctagtcagcacaggccatggtgcacaaaagggacttggaaaatgatggaatgagtaagtgaatgaatgaatgaatgaatgtcccactgcccaagtccctcctcagagctcagcaccccatgtactgagctcatgagaaatagccccttcttttcctccacagccagcctgtccaacagaggggcagccaggacatctctgccctcttctcatcccccagccacagtggccaaagaggcccccactaggcactgtggctctgcatgacaaacacacatccagcccaggactctaagcctctcacctggactccagtaaaaaccttgctgagcctccttgtctatccttcctcccccacccaccattgtaaagtttatgtcaccagaatatttctttcatgtctaattgcttaagaacttggttgttcatcaattaaatctagatgttcaaaatggcatctgagggtctttattaattacctccttcctccaaactcacctctcccacacccccttgttccccccaccccagcccctctgcactgacatcacctttggcctttgcctaaggtgcatgccccatttgaatgcttgccctccaagatcaggctcaaaattgctcaccaaaccctctgcagcactacaagcccacccagatgctcagtgaacagtagtccccttctccccttcctctccaggaagcctctttcaataaacctattcccacccccatttgctttttctagtgtgttcattttcagtcagtactcagtactcagacacttttatcagtggtcacttgctaataggtggttttaaatctgttctccttccaagatgtacctgtatgctaagagctctcaggcctctgaagaaggcatcttattgcatacttctttctttctttctttttattttcagatggagtctcgcgtctcgctctgtctaccaggctggagtacagtggcgcaatctcggctcactgcaacctccgcctcccgggtacaagcgattctcccacttcagcctcccaagtagctgggattataggtttgcgccaccactcagctaatttttgttttttcagtagagacagggcttcgccatgttggccaggctggtctcaaactcctgacctcaggtaatctgcccacctctgcctcccaaagtgctgggattacaggcgtgagccaccgcgcctggcccttattgcatatttcttgcacgtcttcatgtgtactcctaccccctcctctcaggaccaggccctggctggacttggcggcaggagctctgcatgggacctaggtctcagctgagctggagatcacttgctataagagcaggccagaggcctaatggtatcattgccagggtcgggcccagtggtcagacccggaagaaagctttcagccaaagaccacctgaggcccctaacaaccccatctgtagcccccctcctgcctgggaaactccctgcactgggaggggagactgccctttggtactgggagggaatcggagaggtgctgaggccattggcccttaggacaggaacagaagcagctcctcagagaacacctgccctattccagggccaggaccccagccccgccccgccccgccccgccccgccccgtaggatgcaaggccccgccccagccccgtcgggtcccagagaaactgccccgcccagcggccccctccccgccgccggcgcgcggcttctttcagcaccaaggcgtggacagctcccgggccggcgcagaggagaggaggccaggagggcgcgggccagggaggcgaggggagggcaggggagcgcaggaaaggaaaggagaggtggggcaggggtggggaggggagggcagacgcaggctggcgggcggggcgcggagcccggcggccctccccgggggcggcgcccaccggagccggacgctgctgagcccgaggacagacggagacgccgggagccagtggcgcctgtggctccgggcaggggccgcggccgaaagatgccggtccgcaggggccacgtcgctccccaaaacacttacctggacaccatcatccgcaagttcgagggccaaagtgagtgtgtgtatgttggggcggggggacgatctggagtcctg

SEQ ID NO: 18711 - DNA, 2300 bp, Homo sapien
catctgcgtcatgctcatcggctgtgagtgagacctcatgccacggcctaacttcatgctctggtcttacccgtgaaattttatgtgtagttttgtactgagatagaacataacacatagcaacaattcatgcagtacactgatcctaagtgtgcagcacaatgaatttttgctggtgtgtgcaccaagtgtatacaatatttaacacccacacagcccatgctatctgccaggcaccaagacaggctacataatttgcagagcccagagcaaaatgaaattgtagggacccttgtttaaaaattattaagaatcggccagatgctgtggctcaaggctgtaatcccagcactccaggacaccaaggtgggtgggtcacccgaggtcaagagttcaagactagcctggccaatatggtgaaaccccatttttactaaaaaatacaaaaattagccaggtgtggtggcacatgcctataatcccagctactcgggaggctgaggcaggagaatcagttgaacctgggaggtggaggttgcagtgagccaagatcgtgccactgcacttcagcttaggtgacagagtgagactccgtctcaaaaaagaaaaaaaaattattaagaatttttcgccaggcatggtggctcactcctgtaatcccagcactttgggaggccgaggtgggcggatcatgaggtcaggagttcaagaccagcctgaccaacatggtgaaaccctgtctctactaaaaatacaaaaattagccggcgtggtggtacacacctgtaatcccagctactcaggaggctgaggcaggagaattgcttgaacctgggaggtggagcttgcatgagccgagatcacaccactgcactccagcctgggagacagagcaagactccgtctcaaaaaaaaaaaaaaaaaaaaaaaaagaatttttcgacagtgacagcagagtattaaaccaaatgcagggctcttagcatgcggctccgtgtgtccacatgggttgtacacatgaagccagctctgccaggcactcttttaaacactttacaaaagcccacatttcattcccttctgagcctggtttacaaagcaagaacccaggtagtgctaaagtgccagagggcacacagctaggaaatgtccgagtgactcaatcccagcccaggggttcagctccaaggctgtgctgttctcaatccctgctcccagctgcctgcctcccaagacacctggtttaggaaaacaagagtcagcgtggaattttacacatagattgagttgtgatgttcagagtatttagagatatgaaagtccagaaaaacaaaaacaagggaagaaaatgggtgaaaacaagaaattgagagtttgctcttttttgttgttgtgggtttttttgttttgagacagtctcattctgtcgcccaggctggagctcagtggcatggtcttggctcactgcaacctctgcctcctgggttcaagcgattctcatgcctcagcctcccgagtagctgggattacagacgggcatcaccatgcccggctaatttttctatttttttggtacagacggggtttcaccatgttgtctgggttggtctcgaactcctgacctcaggtgatctgcccacctcggcctcccaaagtgctgggattacaggcctgagccaccacacccggcggagagttttatctttattgtatttttacaacttaaaggagaaaacagatctgaactttaaaaatccattgccttccttctttcttctcgggagtttgaccgctaggcccagtaagatgccaagaggcacaggacagagggaggagggcagaaagcccaggggcctttgtcccgcatgtgccctggcgctgtcctggtcactcctgacttctccctggacagaggggtccttcaccagggggctgctggaaggaggaagacctgggtaagcccttggtggtgtggcccagtggggccgcggaggagctcactctccgccccgcccccagccctgatgtacgccagcatcttcgggaacgtgtccgcgatcatccagcgcctgtactcgggcaccgcgcgctaccacacgcagatgctgcgtgtcaaggagttcatccgcttccaccagatccccaacccactgcgccagcgcctggaggagtatttccagcacgcctggtcctacaccaatggcattgacatgaacgcggtgagccccgccgctccggctaatgccccgggcgtgggggggagccaagatcctgcgggggcggggcgtccccagagccct

SEQ ID NO: 18712 - DNA, 2300 bp, Homo sapien
acatagcaagatcttgtctctacaaaaaataaaggaggcaggaggattgcttgagcccgggaggtcaaggctgcaataagcactgtttgccccactgcaccaccacctggataacagagcaagaccctgcctcaaaacgaatgtgtataaattaattgacattttaaaattaatttttgtaaccttaataaggctttaagggttacatctattagtagtacagttgttcaaaacaacataaatatatattcaattttctaataaaaactaaaattttattggaaatatacgtcataaaagagaaaatttcctccccccgttagttcctatatctgtggataaatatcattattttttattagaataagacaaggtaccgcgaattttgtacgtctttttctttcctttttaaatttgtttttaaactttcctccttacaggggatttcctttagctgggcatggtggcgggcgcctgtaatcccagctactcaggaggctgaagcaagagaatcacttgaaccctaaaggcagaggttgcagtgagccgagatagtgccactgcactacagcccgggcgacagagtgagactccatctcaaaaataaaataaaattaaaaaaaaaagaggatttcttggccagatgcggtggctcacgcctgtaatcccaacactttgggaggccgaggctggaagatcatttgaggtcaggagttcgacaccagaatggccaacatggtgaaaccccatctctactaaaaatacaaaaattagctggctgtggtggtgcacccctgtaatctcagctactcgggaggctgaagcaggagaatcacttgaacctgggaggtggaaaaatcatttatcattaaaaattatatttagtgcccagaatggtggctcaagcctgtaatcccagtactttaggatgctgatgtgggaggatcgcttgagcccaggagttcgagatcagcctgggcaacatggagagatctcatctctacaaataataatttaaaaatagctaggtgtggtggcaaatgtctgtggttccagctactccagaggctaaagtgggggaatcgtttgaacctaggcagtccaggctacagtgagcccttatcacaccagtgcactccagcctgggtgacagggcaagaccctgtctttaaaaaaaaaaaaaaaaagtatttaatgttatcatccaacaattcaatacaaacctccttcaattttgatgaaagctgagaattggaaataatttatataaaggtgtcatttggtctctggcccttccccttttccaactcacaggcacagatacctttggggctggattagcatttgcgttgggatccacggcgggaagggtacaggatgggaactgacaaaaacagagccaagctggtcgggtcggtgcctaccccagaattcggggacatttctagatcctgcaggaaagcgcgggagggcctgactcaagctggcctggccctgagcgcatctgcgcgcccgaagcctgtccctgaggcacggagagagcagctttcgggttaaaagggccctgggaagagatggggcgggaaggtggtacccgttgggcgcaggccaggctgccaggccgcagggctctgtcccgcgaaagtcagtaggtcttccactaaggcagaattgtacttttactcgacagcgtggagaggccgctcagaacagcagcagcggaggggaagtcagcgcaggtcacagacggtttcactctcagagacttggcctagaacttggaggcccgctgctacagcacgctcgcctccaggccacccacgcccccaccacccgcactgagccgttatctgcctgactgacatcttggccaaccaatgacctttggggctgccaaagcgcctgcctccgagagttgggcggggcgagtagttgcaatgacaaacatttaacccaatagcgaggagatttcagacgctacggccgcaataaccaatgacaagaaagaatcctttcgaaaggacgtgtcaggcaaccaacggccggtgccgctgcgggggtccggcggcttccgttccgagagggcggggcggcgtcccaaaacggaaggtggttgtcgtccgttcccaagctggtttgaaactaggggtcgggctcggccgtcgtcgttgtttgtcgccgcatccccgcttccgggttaggccgttcctgcccgccccctcctctcctcccttcggacccatagatctcaggctcggctccccgcccgccgcagcccactgttgacccggcccgtactg

SEQ ID NO: 18713 - DNA, 2300 bp, Homo sapien
gtggtggtgcgtgcctgtaatccaagctacttgggaggctgaggcaggagaatcacttgaacctgggaggcggaggtgtggtgagccaagattgtgccactgcaccagcctgggtgacagagtgaaactccatctcaaaagaaaaaacaaattagctgggagtggtagcatgcacctgtagtcccagctactcaggaggctgagatggaaggatcacttgagcccaggaggtcaaggctgcagtgagccaagatcttgccactgaactcccgctggggtgacagagcgagaccgccatctcaaaaccaaaaaaacaaaacaaatggaatcagcacaatagctgtagaaagatgctattagaaaggatggggggaaatggaaaataagtggcagataaagtacccatactaaaaagatgtctttagcttggttgaaaaataattgtcagtcctaccactgtgagttcaaagaacttaagaaaatacagaacttcaagcagagatatagaggattgggtaaaataaggcatggcaaagagaaaatataacatcagctggcagagcacacaggaaagtagtggaagagaaaactaaaattatcacaggattaaaagccacattggaaacagaataaaggctgggcacagtggttcactcctgtaatcccagctacttgggacactgaggcaggagacttacttgaacctgggaagaggaggttgcagtgagccgagatcatgtcactgtactccagcctgggtgatgaagtgagactgtcaaaaaaaaaaagaaagaaagaaacagaataaagatgaacacacagtgctgaaaacagtaaaggttagggaggacagattgaaaaatgaaactgaagaaaacaatgagaacataatagatgcagaaagtaaaagagatctgacgtaagtataattggtgtccctcaagaagaggaccaaagaaatgaaacaaactcaaatatatggttaaagaagaacttagaagtaaagatttgaagtgataagttcaaattggcatgatttgaacttgccaaagatttgaagtgataagttcaaattggcatgaagtgataagaaaaattggcactgaacagttggcactgaaacatttcctaggaaaatttcttttttaaaaaatttatcttatttttcgtgtgttttgttttgttttgagacagtgtctcactctgttgcccaggctgggtgcagaggcatgatcccagctcactgcactcttgacctcctaggcttaatcgattgtcccacctctgcctcccgagtagctgagactacaggtgcacaccaccacgcccgctaatttttgtatttcttgtagaggcagggttttgccatgttgcccaggctggtctcaaactgtgggctcaagtgatccactaacctcagtctcccaaagtgctgggactacaggcctggcacagagcctggcatccctaggaacatttctatgttttaaggatgaagaaagaattatttggacacccagacaaaatgatcaagtcctctttaagaggggaaaagaaattaggctagctacatttgatgacagaaggccatggagcaatgtctaggaatgtacaaatactgtagattgtgctgctataaatacttggggatatacttaggcatatgtaaggtttatgtggaaataataatgctggggaacacaaaacaatactcgaaaaatgggaaggtattctcttttcttgtatagtaaagcttggtatcctaaagatgtcagtgtccctaaacttaatgtaatccctgtttaaaataccacagttgttttttctggagacagggtctcgctctgtcgcccaggctagagtgcagtagtgtgagtataactcactgtaacctcaaactcctgggcttaatcagtaggtgtctcactatgttgctcagactggtcttgagctcctgacctcaaacagtcctcctgcctgcccaacccaaagtgctggggttacaggcataggccaccatacctggccaaaaatactccagatttttaataatggttttttagaaccaggcaaactgattgtttctacagataaattttacaaacatgcacacattgtcaaaaaacttctgaaaaggtggactaatgatggatattaaaacataatgcaaagatataataaataagatcgtttgatactctaagaactgatgtataaacagagtctagaaatgaactcagaatacaaaaagaaatgtagtctgtgctaaaggtgataggaaatgaagaaaaaatattttt

SEQ ID NO: 18714 - DNA, 2300 bp, Homo sapien
aaaaggttaaacatagttatgatatgacccagcaattccactcctaggtatataactaaaagaagtgaaaacataggtccacacagcaatgtgtacatgaatgttcacagcctcattattcatcatagaaggtggaaacaaccacatgtccattgcctgatgaacagataaataaaacgtggtatattcatacaatggaatattatttggcaatagaaatgaaatactgatacatgctacaacatgcaagaatcctgaaaacatcatgctaagtgaaagaagccagttaccaaaggccacatagtgtgtgggcccattcatattaaatgtccagaagaggcaaacccacagagacagaagtaaattggtgattgcctaggcctgtgggaattggggggaaatagggaatgattgctaatgggtacaggacttcttttggggatgatgaaaatgtaaaatcaattgtgcacagctctgaatattctataacacattgtacactttgaattggtgatctgtgtgatctgtgaaatatgtcaaaacttaattttttaaaaaatgagaactgtgttgggcataggaagtacagtcctactctcagagaatttagtattacggtagaaacagatataaacattttgatatttttttaaaaggtaagtgctaaggtgcaagcatgtatgaagggctatgggcacccaccgcacctggctaatttttgtatttttagtagagacggggtttcaccatgttgaccaggctggtcttgaactcctgacctcaagtgatctgccagcctcggcctcccaaagtgctaggattacaggcgtgagccaccgcacccagccccatggaggttcttatataataaaaaataaaaaatctatgcttttgtgctttgcatccattatcccatttagtcctcacaaggccattctatggtaaggaaactgaaacaggaaagtaaaggaacttgcccaaggatacactagaaaatggaacaaccagggtttgaagccacccagtctaactgcagagggcacaaacttggacttcacactgtcctgcttctctctctctctctctctcttttttttttttttttttgagttggattctcgctctgtcgcacaggctggagtgcagtggcgcgatctcggctcactgcaacctcctcttcccgggttcaagcgattctcctgcctcatccttctgagtagctggcattacaggcgcgcgccaccacggccggctaatttttttgtatttttagtagagacggggtttcaccatgttggtcagactggtctggcactcctgacctagcgatccgtctgcctcagcctcccaaagtgctgggattacaggcgtgagccaccgcgcccggctgtcctgcttctctacctgatatgtcatgccctttggacttaatctcaccagcatgggagtcactacaaagcttttcagcagctgccgctttgtttctctccatcttctaacggattcggttttctctttcgagacagcagagagaaaatgaagaggggagtttagctccaaagggcttgtctgatcattctccctctcccaaaggcctgtgactcatctgagtctgtcccaaaccatctcttgcatctaggggcttaagtgcactgtggctatttacataaaactttattactttaaagctctaagggctcattttgtgtttctaactttcctatgttgataaagcaaatattagatccttatttataaatagggaagacgttcagagagattaaacatttgggcaattcacttctctggcagcagtttctttcccagtacaatgaggcaacaacaaaatatcattctggacttgctcagatttaggcagcaatttggaagcaaagtcagtttcataactcagatgtgtctccactaaaacattatgagaaacaaagtccggcgctctctaggcaaccgtgagggcttgagcactaactagatctgctcaagggcaagagaggagcgagtaccgtgcagccacggaacggactttgcgggcagtggggacgtgtttttggagcgaacccggtaaaggaagtgtgctacgccatcaagggcccccagtcccgggtgccgcggggacagtgtagggtcattagctgttgagccgccccgggcgggcccaagcctttggatctcaggtgaccggcacaggcggccgcggggtccggaactgcttgttccggcagtggaagagacgcgccggcgttggccgctgctgctagcagcttgaaccccagggtcgggac

SEQ ID NO: 18715 - DNA, 2300 bp, Homo sapien
ggtggataatgaaaaaaaggttgagaaacactggcctagtgcaagaacatggcctttgggagtcacacaggcttggtatgaatcctggctccactacttggacacagtgcttaacctctctaagcttcactttcatcatttaaatgcccacagtattagcataataaccttagagttattggaaaaattaaatgcaatgacgtgcctgttatattgataaatactaattttctttcccctttatccccgctttcaagaatagagattattatagttaaggaactccagtaaactgggtagagaccaaatcaagtgggaatatggcaggcttaagcttgttggaagaaaaagaaaacaggacaagggggctgattaaatatacggagatgagtgtaaagaaataagggaggctgcttgcagtggctcacgcctgtaatcccagcactttgggaggccgaggctggcggatcacctgaggtctggagttcgagaccagcctggacaacatggcgaaaccccgtctctactaaaaattcaaaaattagccgggcgtggtggcgcacgcctgttaatcccagctacttgagaggctgaagcaggagaattgcttgaacacgggagacggaggttgcagtgagccgagatcgcgccactgcactccagcctggacgacagtgtgagactccatctcgaaaaataaaaaagaaaaagaaaagaaataggggagagcccaaggtaattcttaagggatttgacactcaaggcaaagccaccactaaatgttcttagtggacagtggacaatgacatctgaggaagattattctggagcctgacatattacactggaacagaggccggagaaaggagcccacattaattgtggtggacttggaatctgaagatctgagtgtataaaatgttgaacaatgaaaaggttggggaaattaattatggtgcctttaattttgaaacatcatgcaatcagtacaattgttttggaaggatatttggtggcacgggaaaacagaataaaatgtaagcatactacaaaacaatacaaagccatttttgtcaaacgcctatctaggtaggaaatagattatctctggggtgggatcttttctttttcatagttttctgcatttttcaattttcctacaaaaagctcgtgttgcttttataagaaaaaagttattttctgaaagaacctctggcggaactcagatttccagggacccacatgccagcactatcccagcctcgggtgtctgaggtacctagaccagagggtgtggccctggaggtgtgagacagggaaagctgggctgggccggccgcccctgcccggggcaagagcagcgtcgggaccggaggaccagtcgggggatggggccgcagaggtggccgcgcgccgggaagtgctcaggccagaccctccccactcgttacacgccctgtgctgggcacggggaggagcaggacgccaccctctggaaccacccagatcgctggggcctccgagaacccggagggcggaaggcctgagggccccctgcagccgcctactcctcaccccagccctaaagtagccggcggggaactgcgccagcccgcgcgcccgccgagccttcggtgactgacgggaggtgggaatgtgggcggagcctcacgccggagctgtgattggaacaaccaacacctcccaatctctcccaagagagggagacagcaccagagagggatgcgcagaggcgggggcttagaggcctctacgtgattggctaacagcgcagggagccgggcgctgtcccgatgattggcaggcgctagacagccctcggaaaccgccttggcttcgcccattggcatcctgtgagagtaggcgggattggttcatcgtgtggtgctgatgattagctggccgctgagagttagggtgttgggagagagttggagggggacggcgggggctgccgacttccttcttgttattggctggtgaggtgggtgggggtggtgcgacggcccagcggctgcctgggattggtgggggccggcgtgagtgacagacaggggggcgagctgcgcgaccagcggtttgtttttcggagcgttcctgaggtggagaacggtggccggacggagagactgcgggtctgagggactggcgggcgggcgggccgagcggcgccgccgaggccgggctgggccgagcccaggagcgcccgggatgtagcgggccaccctgccgatgccacagcgcccggccgcgggcggagccggagccggagcctgggg

SEQ ID NO: 18716 - DNA, 2300 bp, Homo sapien
aaataattgatgggatatatatgtgttaatttgacagatgtctttttgtagatacccactttctcctcattcattatcccctttactgcatgctttctatattacagctatgtcactctcatacatacttttgtatatgttttgaagtggaatcatatgggaagttatgctcctggtggttttcctgcaagttttaaatctaattttactttcctgaacaagcaaaaacctctttataggcaactttgtccttttctgtacctcgtcagagggcatatagggcaccagagcagatttcgtctaggaagaggggagaggcaaataaggtgaggggccaggcacggtggcttatgtctgtaatcccagcattttgggaggctaaggagggaggatcgcttgagctcaggtgtttgaaatcagcctgggcaacatggtgaaaccctcgctcaataaaaaatacaaaaattagcagggcatggtggtgtgcacctgtagtcccagctactctggaggctgaggtggaggattgtttgagcctgggggtggaggaggctgcagtgagctgtgattgcaccactgcactctagcctgggcaacagagtgaaaccctgtttcagtcagtcagtcaatcagttaatcagtagtgggagaagagacttgagcagttttacttcctacatttcatgctgttcgtttctttccacagggtattagaatatttccaagggacagtgataaagggtagaagataggcactctctttgggtggaatcttttgtatttgcttcttttaaggtgtgccccaagtccccaaatggctcagttgtcaccaaagcaagtgtaacaactcatccctcatgttcccttcacgatcaacagatttattcattttcaatctccaaatgctatttgaatgggcaaagatctcttaaaggacctgggaaaaatttgtacaacatggaattggactggtttgtgttctgggttttggccagttgttttcaatgtatgagaactctagtactccatgctatttcaagaaaaggggattaaaagtaatgccagtaaggtggagacaatgcattgcttggtcagcttagggaggaaaaacaatagaactaccctttgacttccccatgggaagtagtaggcctataaacttgtaaagagttgtgggggttgctggtggtggcggcattcaaatgctaggcttgtaaaacaacttctgttcaaagcagttacctgaggcccttatttggtaccttttaaagtgtgctctcctccttatgatgctttaagaataagtctgggactgacactgtgccataatcctctctctatggattcatcttttcattcagtaccatattacattgtactgtgttcttcacttcaatttttcatctatttttcctggttaagtttctctggcactggaccaactgccctgtttgagcgtgtcccttccctgcaatgaattggtaaatattgctgcaggaaatctgattggagggctattaagaaaccattaaaggccaggcatggtggcccacacctgtatgtaatcttagcactttgggaggccgaggcaggaggatcactggagtccaggagttggagaccagcctgggcaacatggggagaccccgtctctacaaaaaataaaaaaatcatccaggcatggtggtgcatgcctgtgttcccagctactcaggaggctgatgtgggaaggtcacttgagccccagagttggaggctgcagtgagctatgatcacgccactgcactccagcctgagtgacagagcaagaccttgtctcgaagaaaaaaaagaatccattaaaattcaaattgccatagtctgaccttttgggctgcatctgattatagttacagggtctgtcattttacctgggcagaactccctgagtattagttatacagtttgtgaaagagctttgctggtctgtatttaagtgtcttagtccatgtgctctctttcattgcagacgaacaggaggcattgaactcaatcatgaacgatctggtggccctccagatgaaccgacgtcaccggatgcctggatatgagaccatgaagaacaaagacacaggtcactcaaataggcaggtgtgtgtgaccctggcagagctaagtgagatttgttggggaggggttttcaaatgggaaatatacgaaaagccaaggagactacattaccagggttgaatgcttttgaccccttcctttcacagtctgttaaatgggaagtaatacataccaaccaggtatggttaaat

SEQ ID NO: 18717 - DNA, 2300 bp, Homo sapien
tcaaatgcccctctaacctgaagctgcactgaaccatcaggtgcccttgctttccgtttcctcccaaattttaacagcagtttaaagaagaaaagtaagcctctttgggcagtgagaggctaaggtgaagggaatgacactgaccctgggctaggatggggcctggggcgagtgagtgtcgggggcggcggggagcatttccggccctcctccccctgctttaaacctcaagttcccttcgcctcgccccgccctcccccccccacacacacacaaacacagagtctgtcgcccaggctggcgtgcactggcttcatgttgactcactgtaggctccacctcccgggttcaagcgattcttctgcctcagcctcccgagtagctaggattacaggcacacaccaccacgcctggataatttttgtatttttagtagagacgggatttcaccatgttggccaggctggtcttggacttctgacctcgtgatccacctgtctctgcctcccaaagtgctgggactacaggcgtgagccaccgccgagccaagttccctttttttgtttgtttttgacgctggtcatcagtttcctttgcttctggatgccttctgcaccttgctgttggggcatcctcaatgcccatctgcagctcagcccacaggcccgtcctgggcagggtgccggggcctcaccatgcccaatggcagcaagccctgctcctagtacccccggggcttcccgtttcttgcatcaaacagcccctttggagaatctgatgacaggtgtggaagctttcccgagaggcagccactttagagggtctgacgctccccactagagagtcggcccacagtgcagacaaaacgcagatcttcctctagagagaacagaaggctggagaggagacgcggagccggtccgtggagtccgccagcctgggaaacagctggtcgctggggaagctgcagcctccctgctcccctgccaggcgtcgggcgagagctgttctgttccctgacaagcgcgtgggccgccagtgctattcctgccacagtgtgggaaggcgctgggctaagggctgtgcttcccggagctgcttctagcctgatttccggccaagccacgcagtccctggtgcccgggaaggcgccggcctcgccgccgctccaaagcgagtggccgtctctcgccggctgtgcctccggcctgctgtgcggctgcagggagggagcagctctgcggcccaagctctgtcacctcagctctctgggccgcggctcccacgtgagaaatgaggtgcgcttgttggagagggggcccccgttgctgcccacagaattccgccccagaaacgcttgagtacgtggagcctcgggggacgggtgctccgggaaccacgcataccggcctccccagcccgtcgcagggttgcagaggcgccgagggctgggggggctgccggggctgccgggccctcgtgcaggctcctccccgcagcctcgcggccgggcctggagaccgcgtgcccggacgccgccgccagcctcgtgggccgcaaaggggcgggggcggcccctggcggcgggaggactcggccgcccgagggaccccgggccaggctccggggtcgccccggctgggtctctgcggccccacagctctgggcggggatgggggcgccggcgcctacgcgcgaggccaaccgggggaaaccgaggcagtgaatggcccaggccccgcccggttatcccggagccaggccgggagcgcccagtgtcccgcgaccgcagccgccgcagcctgaactcgtcccctcccagtaggatgcggagcgcggcccttccatcctgtccctgccaccgttgcttccccacgccgggccgccgtcgggatgggcagacggcgcggccggtacccgaggcctgcgagcgcgaggcccgcggggcgctgcggagccgggagcgcggagccggggcgggggacagacaaaggcggggacggcggcgaggggaagacaaagcgcggaggggggtcggcggcggcgccggggccccgaaggcggctccgggcgcggcggagccaatgggcgggcgcggggcgggggccggcgggggcggtgcagcgataaggcggtggcggcggcggtggctcggggaccactggtagcggcagcagctcgcgcccgcgccctcctcgtacccgtgcgcccccggagaccgatcccgccccgcggcccaggccgggcctggtgagagccgcggggggaggggccgcgtccggctccggaaccgggagagg

SEQ ID NO: 18718 - DNA, 2300 bp, Homo sapien
tgtgtgtgcttgcagggatggccgtgctgccccaggtgagagctgtcccaccatccaagagcaggcccatgggtgctcactgaagctcagcagtgacctcttacactagatagaccagtttatttgaaaacctgtaacagatctgtctcttaactatctaaaattttaagactatgaattttagcctgtggtcatcaaaccactttggagctaaaaagttccaaagattgagattgaggcagaggatgctggtggcctttggcaggaaaggaggtagaagggtttgtcttgcaaccggacatgggtgtctccttaccctgggtgctagcacccaaagagcaggaaacctaagaaccagccccgcccatccctgccatgctggctggcgccagcgagtgtgagccagggggtgcaaatctgaggctccctgcagtgcttccagggcacatggcttacccttctcccagtccctcagggggaaggccctcccccagctcaggcacctcaaatgcccctctaacctgaagctgcactgaaccatcaggtgcccttgctttccgtttcctcccaaattttaacagcagtttaaagaagaaaagtaagcctctttgggcagtgagaggctaaggtgaagggaatgacactgaccctgggctaggatggggcctggggcgagtgagtgtcgggggcggcggggagcatttccggccctcctccccctgctttaaacctcaagttcccttcgcctcgccccgccctcccccccccacacacacacaaacacagagtctgtcgcccaggctggcgtgcactggcttcatgttgactcactgtaggctccacctcccgggttcaagcgattcttctgcctcagcctcccgagtagctaggattacaggcacacaccaccacgcctggataatttttgtatttttagtagagacgggatttcaccatgttggccaggctggtcttggacttctgacctcgtgatccacctgtctctgcctcccaaagtgctgggactacaggcgtgagccaccgccgagccaagttccctttttttgtttgtttttgacgctggtcatcagtttcctttgcttctggatgccttctgcaccttgctgttggggcatcctcaatgcccatctgcagctcagcccacaggcccgtcctgggcagggtgccggggcctcaccatgcccaatggcagcaagccctgctcctagtacccccggggcttcccgtttcttgcatcaaacagcccctttggagaatctgatgacaggtgtggaagctttcccgagaggcagccactttagagggtctgacgctccccactagagagtcggcccacagtgcagacaaaacgcagatcttcctctagagagaacagaaggctggagaggagacgcggagccggtccgtggagtccgccagcctgggaaacagctggtcgctggggaagctgcagcctccctgctcccctgccaggcgtcgggcgagagctgttctgttccctgacaagcgcgtgggccgccagtgctattcctgccacagtgtgggaaggcgctgggctaagggctgtgcttcccggagctgcttctagcctgatttccggccaagccacgcagtccctggtgcccgggaaggcgccggcctcgccgccgctccaaagcgagtggccgtctctcgccggctgtgcctccggcctgctgtgcggctgcagggagggagcagctctgcggcccaagctctgtcacctcagctctctgggccgcggctcccacgtgagaaatgaggtgcgcttgttggagagggggcccccgttgctgcccacagaattccgccccagaaacgcttgagtacgtggagcctcgggggacgggtgctccgggaaccacgcataccggcctccccagcccgtcgcagggttgcagaggcgccgagggctgggggggctgccggggctgccgggccctcgtgcaggctcctccccgcagcctcgcggccgggcctggagaccgcgtgcccggacgccgccgccagcctcgtgggccgcaaaggggcgggggcggcccctggcggcgggaggactcggccgcccgagggaccccgggccaggctccggggtcgccccggctgggtctctgcggccccacagctctgggcggggatgggggcgccggcgcctacgcgcgaggccaaccgggggaaaccgaggcagtgaatggcccaggccccgcccggttatcccggagccaggccgggagcgcccagtgtcccgcgaccgcagccgc

SEQ ID NO: 18719 - DNA, 2300 bp, Homo sapien
ctgggaggtgggggttgcagtgagccgagatcgtgccactgcactccagcctgggtgacagagtgagaatccgtctcaaaaaaaaaaaaaaagaaaagaaaaagaaaggaacatcaggcaaacaggaggctgagagccagaagatggccactggtggcagggcaggcaccttgtgtctggaacaagatggcctgggtttgaatcctgcctctgccatgagcaagttacttagcttctttctaaataataaataaatgaataaaaaagccagaagggagtgtttggagaagaaaagggaaatataaattaggctgagcagcatttcagcccaatccttagtgccaaatggccaggattctccactgaaagcttccataacttccgaacgtttagtctcccttcatttctttgtaattccttgtaattcctatcagagccaagagcccaccctccctccatgtgacacactcatggtttattacctgcaagaatgttaccatctcattggaacaagcttctaggttaatcctccgtacagtcacgtactctcctgttggtttgtaccttgctagattcacagtcatcaggtcctcaaatcctttgcctaaaagaaaaagggaatgccatacgcaaggacaagaacaacaaaaggttttaagaaaattttcctttaaaaaagggacttgatttcaaaagaaacttaatgttaaatttttcactactgttacttttttttttttccttttcccagcagaatttaactgttatgttcatggctcacatttcttgatttttctctcatcagttccttctcagccaacctttctgactcactatggccaggacaccggaaacatggcagccacaaaggaaagatggcaaaagagcttctttcctggaagtttgatctcttcccatacttggcataaaaaaacagagaagacccacagaagcaagtctgtgcccatgaatcctcctaactagtggatggcctctgctgtacacacatctggggctgctgagaaagctgcagcagcccctggagcagaaagcaggagagtaaggacggcccctgcacatacctatcacagtgagcagctcgtaacaccctccctctggcagaaagctactcatgacctcctgtttagagaaggatgctattgactctgagctcgcatcattggtctaaaaaagaaaaagaaaaataggttagtagagaaaactgggggtgggatgggagtggggtgaaggtggtaattcagacccacgaggagactggcatctaaacacacacacaaatcccgactcagtgccagcactatttgaagagaaacaaaacactacattcagggtagtaatcagcactaatatcagagcaagtgttagggttgtctacaaatgaggagacaaggacctgttcccatcaaatgttaatctgcttgtcctttccaacaatcaatgcatttgctaaaagctatgaaattctcacttggagaagggatgtctagagaatgaaagcatgtttggaaaagagaagcaggtggagaggtaggggttctcatgaatttcctgatgcattaggatcctatttttaaggtcctcaccacaagatcccaaaaggtcaaacgctgaatcttgctctagggaaaatgtggccaggagtagccccctctttagcaaaccaagagcccgggccagtcattgcctgacatttccaagtgaagtgggagaaccctgatgccctgagctgcaggcaaggcacagagctgtcaggtctcaggcatcgtccaggcagctgacatggcctgctccctcgttcctgcccacgtgtgctgtgagtgaagctggagtccagccacttaggatgtgtcacaactctggcctctaaggtcctagaggaaggtgtccagccatgtctgagtttgtgcaaaacacacggcagaccaacagctcttctttcagcttaatggactgtttccttcttccacacctaaatttatgtgtatgatttagggactgtgactgcttttcttttagattctctttctttagatgcacatctaactgaaatggagaaacctgggccagctcatgtttcatgtgctgcactcataaacctgacctccaggcagaaaaagtcctttgtgaaagtatgagaggctcctgacccagcactacccagaagagcacgagctgagagtgttctgaaaaggcggtgcttgaacaactctttgggaagcggctctgcagaggaaaccataaagatgacggtgctctatacctgtaagatgaccagagta

SEQ ID NO: 18720 - DNA, 2300 bp, Homo sapien
atttggcaggaagaggtgaaacactgtgctttatcatcccaggttctcattccttaccattcctgcctcctctcattttgaatgatgtgaaacgatgtaagagagacaagaggccgggcgcggtggctcatgcctgtaatcccagcactttgggaggccgaggcaggcagatcacatgaggtcaggagttcaagaccagcctggccaatatggcaaatccccgtctctactaaaaatacaaaaattaaccgggtgcggtggcacaaacctgtaatcctagctactcaggaggctgaggcaggagaatcgcttgaacccaggaggcagaggttgcagtgaaccaagattgcaccactgcactccagcctgggcaatagagcaagacttccgtctcaaaaaaaaaaaaaaaaaaagagttatacccataggagtgtcttctgttacagactgctaaaacagaacagttctgagacaatatgttttctctacccatttgtaatggctgcaagaagtttagcatcttttcagacagtctctctaatactcggttccaaaagaccacatgtgaaagacccttcagtagaacactgctagaaattttacttctctgtttatactctgttgctttgtgagtttaccaagtttgctcctgagagtggcatcttattttgagaatgagagcatgtgagggtagcccttagcaatgtcaaagcactcgataaaatcaaaatgatgtggcccagcacagatggctcacacctgtaatcccagcactttgggaggccgaggctggtggatcacctgaggtcaggattttaagaccagcctgaccaatatggtgaaacctcgtctctactaaaaatacaaaaatcagccaggcgttgtggcgtgcgcctgtagtcccagcgacttgggaggctgagtcaggagaattgcttgagcccaggaggcagaggttgcagtgagcccagatcacgtcactgcattccagcctgggcaacagagcaagactccatctcaaaaaaaaaaaaaaaaaaaatcaaagtgatgtatgtaagatcaaatgagaactcatgtgcatacaggtcccacagtttcaggggcatatttctttttttctttttttttttttttttttttgagacggagtctcgctctgtcgcccaggctggaagtgcagtgacgcgatctctgcacactgcaagctccgcctcccgggttcaggccattctgctgcctcagcctccatagtagctgggattacgggcgcctgtcaccacgcccggctaatttttttgtacttttagtagagacggggtttcgccgtattaaccaggatggtctcgatctcctgacctagtgaaccacccgcgtcggcctcccaaagtgctgggattacaggcgtgagccaccgcgcccggccttccaggggcatatttctataagtccctacttggatgtagctaaactcctcccccagtcttggaagttaggacggtctaaatctgtgtcaaagctcagagctggcaagagcgagtgttcattacctgatggtatatatccgcgttttggataccccctcctgcgcacgcgggggataagtcactgaaaaacctagtctcacaggagtgaggcttagttcatcgcttcctcatttctcaagctctgcataacctggcttggacaaacctgataggtttccacaaacggcttcagctgtggatgaggaaggcttcgggggaaaaaaaaagatactgaggggacaagatcgttttcattagttgagctattttccttgttttacaaatagtggggagcaaagaaaggatgggcttcccctttgcagcttgttgtctggtgcccgagaggccaaagtgaggggcatttgagatgtcgtccaagaaaagtgcgaggcgggttttccattagaagtcctaccacatgaaatgagaaaaacacaattctcaggaacagccaagtttgcctttctctggtccttcattgttgaagccacctgcttccccctcctgctgcgggggcggaggctgtaggcggaagcgctgcgcggcgggaaagacaacgggaactgagaaccgctctcggcgcggcggcggctgctagggcctgccgcagccgcggccactcggaaagggcgggacttccccgcagggcggggtggggcggagcgctctatcagtcctcccggtcgccccactgcgcatggcacgttgcgtactcccctcccagcaaccggtctggcggcggcgcggcagtaaaactgaggaggcggagccaagacg

SEQ ID NO: 18721 - DNA, 2300 bp, Homo sapien
tcccaagtcgctgggactacaggcgcacgccacaacgcctggctgatttttgtatttttagtagagacgaggtttcaccatattggtcaggctggtcttaaaatcctgacctcaggtgatccaccagcctcggcctcccaaagtgctgggattacaggtgtgagccatctgtgctgggccacatcattttgattttatcgagtgctttgacattgctaagggctaccctcacatgctctcattctcaaaataagatgccactctcaggagcaaacttggtaaactcacaaagcaacagagtataaacagagaagtaaaatttctagcagtgttctactgaagggtctttcacatgtggtcttttggaaccgagtattagagagactgtctgaaaagatgctaaacttcttgcagccattacaaatgggtagagaaaacatattgtctcagaactgttctgttttagcagtctgtaacagaagacactcctatgggtataactctttttttttttttttttttgagacggaagtcttgctctattgcccaggctggagtgcagtggtgcaatcttggttcactgcaacctctgcctcctgggttcaagcgattctcctgcctcagcctcctgagtagctaggattacaggtttgtgccaccgcacccggttaatttttgtatttttagtagagacggggatttgccatattggccaggctggtcttgaactcctgacctcatgtgatctgcctgcctcggcctcccaaagtgctgggattacaggcatgagccaccgcgcccggcctcttgtctctcttacatcgtttcacatcattcaaaatgagaggaggcaggaatggtaaggaatgagaacctgggatgataaagcacagtgtttcacctcttcctgccaaatccactggattcttgtacaacacaattctaaacaattcctactgaattgccaattcctactgaatgggtggaataagaaatcaatgtttttctttggtctaaattccatctaaagaaaggagttagggccaggcgcactggctcacgcctgtaatcccaacactttgggaggccgaggtgggtggatcacgaggtcaggagatcgagaccatcctggctaacacagtgaaatcccatctctactaaaaatataaaaaattagcagggcgtggtagcacacatctgtagtcccagctactctggaggctgaggtaggagaattgcttgaacttgggagatggaggttgcagtgagccgaaattgcaccactgcactccagcctgggcaacacagtgagactccatctcaaaaacaaaaaaaagaggagtttcacatctggtctttacaggaaaaggtttgctactactaaggaaacagaatcataagctactcccctcttcctcaaaaaataccctatcaatttttgcagataaagaactctgaaaggatctgcttggtttccattgggagaaagaaaagcaaaagagagtaaagcaagaatgcatcacttggagaccagtcctagatgatgccttatacttgcaaagtgcttaaacagtttacaaaacaatctcacatatatattttctcttagtgttcaactacctgtgaagcaggcagggcaaataattactatcctcacttcacattaggttaataacttgccgaaagtcaaaggattagtaattagttctgctggcactaaaagccaggtctttgtcttacagtccagtgcttattttggcattgctaaacatccaggcaatgcaaatgagattggagacttagtggttttccagtttgtgacactaaacaacatcctcctctctttgtcctcgcattcacaggagagttaatggagtcttaagaggtggaatgcagggaggagcccataaataacatatggggctctaaaaatataaaatgtttttaaaatgattgaatggtaataacaaaaggaatattcagatgaactcttttgaaggaaaagcatttcagtgctgacttttatcgaacagaaagaattttcctctgagcttatactcttgtaggataactccacaaagtcaaggcggcactctgagattttgtcaatcactttaatagatgtccataggtagttcatatgaatgcttaagttacaaaattagctgccatggtccaaatgtatgggactttaggaaagcttttcttactcaaaagataactaagactatcaactttgatttctaaaatgtaatttaaaggtttgtaaaacaaggccactactataattatataatatt

SEQ ID NO: 18722 - DNA, 2300 bp, Homo sapien
aaaagcaggagaggtttatagatttttactgtttataaaatctgatcagtatgtatagaatggcaatccattttggggttctctttttttttaagctttttttctcaaggtgcaatgaaagccttccacactttctgtgttgtccttctggtgtttgggagtgtctctgaagccaagtttgatgattttgaggatgaggaggacatagtagagtatgatgataatgacttcgctgaatttgaggatgtcatggaagactctgttactgaatctcctcaacgggtcataatcactgaagatgatgaagatgagaccactgtggagttggaagggcaggatgaaaaccaagaaggagattttgaagatgcagatacccaggtgaggctctttttattaatttattggaaaaatttgtaactagcacctttcccaaacattaaaattaatcctcaggctcaagagacctttactgtctggagtcttcattttcattcactaggtagagctcttctaaatgttctgtggtaagtttccaccttttacattaacagaatgaattgtgttcttctattgaaaccctgactggaagaggggttagagaatagatactgtttgtgggtgagaattgtattatttagaactttgcaattggctgggcacggtggctcatgcctgtaatcccagcactttgggaggccaaggcaggcagatcacccaaggtcaggagtttgagaccagcctggccaacatggtgaaaccctgtctctactaaaaatacaaaattagctgggcgtggtggtgcgtgcctgtcatgtcagctacttgggaggctgagccaagagaatcgcttgaacctgggaggtggaggttgcagtgagctgagattgagccactgcacttcagcctgggtgatagagcaagaccttgtctccaaaaaaaaaaagaaaagaaaaaactttgtcatcaaaagcatggggactcatcattttggtgttttgggtgctccccagctttattgaggtgtaactgacaaaaattgtatatatttaaggtgcacaacatagtgttttggtatacctctacatacaatatgaagtgcttaccacaatcaagctaattaacatagttgcctccgtgtgtgtgtgtgtgtgtgtgtgtgtgtgtgtgtggtgagaatacttacaatatattctcttagcagatttcaagtctacaatacattattattaactgtagtcaccttgctgcacattaggtcttcagaactttctcattttaagctgaaatttgtacccaatcgttttgttaaaaacatgtaacatctgttttctgtgcttgctgcttacacgttcttgttttccccaacaaatgttgccaacaaaatgagacacagctgctggtgacatttgtagaggaaaacggatgatgcctcatttttgtaggagggagatactgagagtgaaccatatgatgatgaagaatttgaaggttatgaagacaaaccagatacttcttctagcaaaaataaagacccaataacgattgttgatgtaggtatccaggattctgaattcccaactaaacaacaaaatgtcttgtcatcaatcccagaaataaaattaatgatgtatagctggtgttaatgcaatagtgggagctgagaaggagcttgacatcaatttttctgataaaaatcaacacctctccgtctcaaaaaaaaaaaaatcaacacctacagaagcaacccctattcatcattgtagcacttctagttttactacttatcagggaataagtaaaatttattccttggtgatgtacagtacattgaatttatttgggggttaaggaccaagtgtaaaacaaagggctttccagcttttcatcccatttgattgtccttatatttccttaaagaatcttttatcaagctagcctagaaaagtaaaatggacctatttttcaaagtataaccttattcaatgacagatatctgaagtatcccttctgtttatggattttctcattcttcctgccatgaggtagatttcattcttcagtctcagccaacatttaatggaatgattttgcttttttaggttcctgcacacctccagaacagctgggagagttattatctagaaattttgatggtgactggtctgcttgcttatatcatgaattacatcattgggaagaataaaaacagtcgccttgcacaggcctggtttaacactcatagggagcttttggagagcaactttactttagtgggtaagtgaggccaatgtcagcccagc

SEQ ID NO: 18723 - DNA, 2300 bp, Homo sapien
acagggtgagactctgtctcaaaaaaatagataaataataaaataaaatgtcagctctaccatttaccagcaatatgaccttagcctaattacttaaaattccctgttctccacatacaaaaaagggataccatttgctacttgcctcttagggctgcagtgggtattacgggagatatgtaccaagggtttttttttttttttttttttgagacggagtctgactctgtcacccaggctggagtgcagtggcacgatctcggctcactgcaagctccgcctcccgggttcacgccattcttctgcctcagcctcccaagtagctgggactacaggcgctcgccaccacgcagggctaattttttgtatttttagtagagacggggtttcactgtgttagccaggatggtctcgatctcctgacctcgtgatccacccgtctcggcctcccaaagtgctgggattacagacgtgggccaccgcgcccagcctccttttcaaatcctactcttaaaacttttttttcatatagaagcaactaaaagttaacaccggaacagtcaactcgattaacagcctgccaaaagatccgatcatttcaaattgaatttccaattagaatattcacaccatagaaacacttctgagataactcagcactataatggagatccttcaaggttatttaggttacaatcatccaagccatttttaccttggttttccctcttagaagtctccgctgcacctgtcagttctcaaatgcacaagtccttgccagaccacccagcctctatgactcctgaagcaagcaacacaggaccaaggaaaattcacacaagcgctaacaagtctggtttgattattttctgcaagctcatccaatagttcctcagcgactgagtctagacttgaggaaagaggactgagtgaggccatcattccttgttgtcattttagattaggtcttcctgacaacggccaaaacgagtattctggaaatcatgcagactttcctctgtctctttatatgtgttggatacaaacacgtttcattttagaaacctccagaagagactggccacagaggtttttgcttctattaaacccctttgcctagtttctccccacccaagagaatcaatacatcctaatgtcatcctccggcacacactgtacatttcctctaactctgcccttttggctatcatttgctcacagctccgtgggaaagttcccccaaaccattacaattatctcaaccggaccgggctacaggccaagcaactcggagtcaccgctcggcctggcccggccacgccgacgagcgcgtcctggcccgctccttacctgtggccgaagccgaaacccggcccagcgccctgcgtccgacacccctgcccggcctgcctctcggcctggccgccgcctccgcgatcgcagcggttttactgccccggatgcctctaggacgcagccagaaccgtagctcagtcacgccgcgcctctcttcacgtagcctccgccgtccgttacgtagaatgcgagcggctcgtcagcgcctgcgcgcagcctgcggggcgggacgcaaccccggggaaagcgcgagacctccctctctcccgcccggctgaggcgaggtggggcttttgggaaaattacataatccccgcccctgggccggaactgccctcgcctatcccaatcctcctacctaggattccgtcaagttgacgtcacacggaaccggtgctccggaagctaaaggtggccatgctgtgtgggaccacgtggccagaggcaagagtgtcgctctagtagtatatgcaacagtttaaactataggcatgttcatgtaaatatggtttctgtccaacccgttttctcttgggatttttggctagccccttgacgccactttttcttcattcgcagacccactttctagatgggtcatgaacactgtccacccaactgcagtttcccgtcagagtatctgaggagcctgtgaggcgttctggagctttaaggtcaggcgccttccgggagccgtagccccggccccgcccttctgcccgcgcgttcctcactgcgcatgtcgcgtttttgttcccctccccccttcagcaacgggccgtgaggcggtggcggtggtggcggtggcggcggcggtggtggtggtggcggcggcggcggcgaagggggcggagaggaaggagcgcggcgggaccgggccgggacagcgcgtactttgggctccgggattcgctccgcgcccgcggttgtagcagctgccgctg

SEQ ID NO: 18724 - DNA, 2300 bp, Homo sapien
tccaaacgcgttggtcttcacactcttaacgggccagctttgtcctcctcaaggcttttatgtttgttattctctagcttggaacgttcctttccccagataaacgtaggctctcactccaccttctagtccgcttaaatatcagcttgtctgtatggacttccctgaccactttattgcaaattccaacaccaccacctccccaaccccctttccagctttcttttccctaagatactgatcatcttctaacattcagtataatatatgtatctgtttgcctctcctcccgctactagaaagttaagttccccaaaggcaggggtctaacacctatccctatcacctagaacggcgctagagaataggcaccaataaaaataccccttgaatgaacgaattgcacattaggctacacaatgcttcttccaggtacaggaagatatattttcttttcccagctgtcaaaatataaacattaatttttgtacgaaacactcattgctcacctcttatgtgccagaaatgagcttggctctgcaaagcgccttaagacatagtccctgcgcttgaggaagtcctgggtgtgtatacgagagaggacagacatagaaacatcattgacaaaaagaaaacacagggaagccacaagaaattggataactgcctataggagtgggggcaagagggaaattctcagtgatgagaatgtaattccccaaaactctcgacagcttctcctgtttttgatgcatatgtttgcaattccatgtaaattatttattcacatcagatacgctctcaagtaggccgcaaaaaagtttgtgtgactacagtgatgctaataatcgacctactcaacgctgcacaaagatcatcgcctatatcttttcactcctctcatttggcagcttttgcctctcaggaccccaaattcggaggcctgcatctcccaagcgctgcctccttgggtcagaattctccccgcgctattcctgccctggagccgggcaccctgcaaatccttttcctaggcgagggggcgccgcctccggaaagccgccaactgggcctcggtaagacttgtgagggaagcgggagctgtgggagggcgacgcggctaggaaggaaccctagaggcctcagcccccactcccaccccttcccggcaccccggccgccggtgccccgaggctctgccgactctttgttaagcgaggccgcggttcctccgccctcgctaggcccagcagttgcctccagtgcccccaaggactggcggccttgcgtccagaaaccccacgcacaaacctgctgctatggctgcagcggcagctgctacaaccgcgggcgcggagcgaatcccggagcccaaagtacgcgctgtcccggcccggtcccgccgcgctccttcctctccgcccccttcgccgccgccgccgccaccaccaccaccgccgccgccaccgccaccaccgccaccgcctcacggcccgttgctgaaggggggaggggaacaaaaacgcgacatgcgcagtgaggaacgcgcgggcagaagggcggggccggggctacggctcccggaaggcgcctgaccttaaagctccagaacgcctcacaggctcctcagatactctgacgggaaactgcagttgggtggacagtgttcatgacccatctagaaagtgggtctgcgaatgaagaaaaagtggcgtcaaggggctagccaaaaatcccaagagaaaacgggttggacagaaaccatatttacatgaacatgcctatagtttaaactgttgcatatactactagagcgacactcttgcctctggccacgtggtcccacacagcatggccacctttagcttccggagcaccggttccgtgtgacgtcaacttgacggaatcctaggtaggaggattgggataggcgagggcagttccggcccaggggcggggattatgtaattttcccaaaagccccacctcgcctcagccgggcgggagagagggaggtctcgcgctttccccggggttgcgtcccgccccgcaggctgcgcgcaggcgctgacgagccgctcgcattctacgtaacggacggcggaggctacgtgaagagaggcgcggcgtgactgagctacggttctggctgcgtcctagaggcatccggggcagtaaaaccgctgcgatcgcggaggcggcggccaggccgagaggcaggccgggcaggggtgtcggacgcagggcgctgggccgggtttcggcttcggccacaggtaaggagcgggccaggacgcgct

SEQ ID NO: 18725 - DNA, 2300 bp, Homo sapien
acagtatatcattaggtgaagaaatcactaagacaatatgtacagtatggtttcaatttttaatttgtgtgtatatacacatatgcatacaagtagcaaaaaatagaacaaaactacatatctgggagaggaaatttcaggtagttttaaattttgttcttttttgctttctgcttttctgtaaaacttaggtaagttgtatcattaaaaagggttttggggggccaggtgcaggggctcatgcctgtaatcccagcactttgggaggctgaggtgggtggatcacttgaggccaggagttccagaccagcccatctctactaaaaatacaaaatattagctggatgtggtggtgcacacttgtaatcccagctacccaggaggctgaggcatgagaatcacttgaacccaggcgacagaggttgcagcaagccgagattgggccactgcactccagcctgggtgacagatcaaggctctgtctcaaaaaacaaaaaacaaaaaaattttttttgggccaggtgcagtggctcatgcctgtaatcccagcacttagggaggcagatgtgagaggggggggtctcttgaggctagaagtttgagaccagcctggacaacatcacaagaccctgttccttaaaaaaaaaaaaaaaagaaagaaaaggtttttggagccaagactaatgtaaggtattgtttgtaaattgattttatgaatgcacaagaaatttctttgtaactcttaaccacaggctaactgaatacttcaggcaacatgtcagtgaatcatagtttcttcctggatagtgtttctattgggcagttgttcaataaatacatggttcatagtacctttcctgcagacatgaatacatagatactgtctacaaacaactgatcttttaagttttgattctttgattcttccagatgtcattaccagaggataacctctagttttcggagagtcttggctgatagcagctcagtctttcatataaggatgaagatatttagtcttttcatatctccagtggccttgcacatatcagattccccaaaatatttctttttatgagtatttttgtcagcttaataagatgttaattagcaggcaaatccttttggaggggatgatattaaatactgcattctggtttatactgagatcccaataaaattaaaacaatttcttcagtgttttagaaaatataatcatttgttgaggctagcatggtgtgtatctgaaatacaatgtcaacttttgtgggttttgtttttgtttttttaagagacaggatttcactatgttgcccaggctggaatacagtggctattcacaggcaggatcatagcacactgtaaccttgaactcctgggctcaagcagtttacctgcctcagcctcctgaatagctgggctggaaatgaatctcttaatgagatggattttcttttcttgtcttttcttttttaatgtaaaaagagacaatctctgtcacccaggcttgagtgcagtggcgtgatcatagctcagtgtaatctggaactcctgggttcaagtagtcttcctgcctaagcctcccaagtagttggcattactggcctgggccactctcctgactacagtgttatagttttaattgagaagctaaaatttaaaataaaattttaggtggaggttggaagagacatacaactcagtggggctatatacttcttttttgtttttgagacggagtctcgctgtgtcgcccaggctggagtgcagtggcacgatctcagctcactgcaacctccgcctctcagattcaagtgattcttatgcctcagcctcccaagtagctgggaccacaggcatgtgccaccacgcccggccaatttttgtatttttagtagagaagggttttcaccatattggccaggctggtcttgaactcctgacctcatggtccacctgccttggcctcccaaagtgctgggattacaggcgtgacccaccgcgcccggcccttggggctatacacttttttaagtttaatttatatttgtgtatcttattcctaacaggtcagtcattggcaccatgaactggaataaaggtggtcctggcactaagcgaggatttggctttggaggttttgccatcagtgctgggaaaaaggaggaacccaaactcccacagcagtcccacagtgcctttggggcaaccagctcttcttctggatttggaaagtcagctccaccacagcttccttctttctacaaaattggatctaagcgggccaactttgatgaaga

SEQ ID NO: 18726 - DNA, 2300 bp, Homo sapien
agcctggacaacatggtgaaaccccgtctctactaaaaatacaaaaattggtctgggcatggtggctcaaacctgtaatcccagcactttggaaggccgaggcgggcggatcgcctgaagtcaggagttagagaccagcctggacaacgtggcaaaaccccatctctactaaaaatacaaaaattagctgggtgtggtggcggcgcatataatcccagctacttgggaggctgaggcaggagaatcactggaacctgggaggcagaggctgcactgagttgagatcgtgccactgcactccagcctgggcgacagagcaagactccatctcaaaaacaaaaagaccacaaaaattaactgggtgcagtggcgtgcacctgtaatgccagctatttgggagactgaggcaggagaattgcttgaacctgggtggtggaggttgcagtgagcacagagatcacgccgctgcactgcagcctgggcgacagggcgaggctgtctcaaaaacaaaaaagcatatatactatatagtttagcctatattattgttacatatagtcagtgttacattagtgtgtatatatatgtatgcatgtgtgtatatagcataacagttaaagcttttaaaataattcctaggaagacttgaaatgctttaactttttaaactgcagttatttatttaaattaatatttggttatattactatttgagtttgagattaaagtctaaacagtggtttagtttataaagagctgtattgacatccttttctgaaatgtttgttaaagagaaagtgataccttatccagcctttgaagatgtcctttctgaatacttaagtagtatcttaaattattttggattgagcatttattttcttgcttttttcctcgttttttgagagagtcttgctctgtcacccaggctggagtgcagtggcacaatctcagttcactgcaacctccacctcctgggttcaagcagttctcttgcctcagcctcccgagtagctgggattacgggcatgtgcaaccatgcctggctaattttgtatttttagtagacacagggtttcaccatgttggctgggctggtctcaaactcttgacatcaagtgatgcacctgtctcggcctcccaaagtgctgggattagaggtgtgagccaccacgcctggcctgaacatttattttcaattccggaagttttctgttggtccccagaaaatagcccagaatttctgaggtttttggtcttaaaagaatatctcaagtttttattaagggttataaagaataaactggatttctaatgtttcagtaagtttccttttggctgtgcacagtggctctcgcctgtaatctcagtactttggaggctgaggagggcagatcacgtaaggtaaggagttcgagaccagcctggccaacatggtgaaacccctgtctctactaaaaatacaaaaattagccaggcatggtggcaggtgcctgtgatcccagctactagggagggcaaggcaggagaatagcttgaacccagaaggcgggggttgcagggagcccagattgtgccactgcactccagcctgggcgatgaggaaaaccccgtctcaaaaaaaaaaaaaagttttcttttttcccatagcacagctctttaatatttgtcatatttatctaacaatggtcagtaagtttgtactgaaaactcttcccttttaacagaactgggagcatgatttgactatacactattgaaatggagaatctcttgtgattacttttttgtaatattgaaattttgcatgtattaagtagtacttaataattaggtcattagccaaagccttggaggtctctaatttgatctgcattacatctcctaataataagatataccataataaaaatgttgttaaatgaaagatttactgaccccaaagtaagcattcactttaccagtttgctttctaattctcagctattttgaagatgaggaagaagattctagcaacgttgatttaccttacattcctgctgaaaactcaccaactcgccagcaattccattccaagccagtagattctgacagcgatgatgatcccttggaggcattcatggctgaagtggaggcaagtatcaacatgtttcattaaaatatttagcagttagaaatagatcaagttaacttagtacttcaaatcttattcaaaatttgttttctagtcttattatttttttttttttgagaattttgctccagtagtctatagttgcatatatctacttccacttgcc

SEQ ID NO: 18727 - DNA, 2300 bp, Homo sapien
gtgaaacccccgtctttgggattggtggcaggcatcagtaatcccagttactcaggaggctgaggcaggggaatcacttaaaccttggaggaggaggttgcagtgagctgaggttgtgccactgcactccagcctgggagacagagcaagactccatctcaaaaaaaaaaaaaaaaaaaggtatctgaaaaggctactaaaatactgtcctctctttttcaactacgtatttttcctttgcttttttttctttttttgagatggagtcctgctctgtcgcccaggctggagtgcagtgacgcaaccttggctcactgcaacctcctcctcctcccgggttcaagagattctcctgcctcagcctcccgagtagctgggactacaggtgtgtgccactacgcccggctaatttttgtatttttggtagagacgggctttcaccatgttggccaggctggtcttgaactcctgacctcaagtgatccatcggcctcagcctcccaaagtgctgggattacgggtatgagccactgctccaggcctggaggcaagaatttcttataggcttaaataaaaccaacctattgcaataatttgaatatagtaggagctatttaagtcgacattaataaagagatttgtgaaaatacaatagtgtcactcttcttccaattttttttatgtatccagaactatgatttttttttttaactacctatagaatgcttatatttttcttaaaaaataagtttaagaaccaggcatggtggtgcatgcttggagtcccagctactggagaggctgaggcaggagaatcacttgagcccaggagtttgagtctagcctgggcaacatagcaagaccctgtctctgaaaaaaaaaatagtttataaaaaataatttagccaaattgataggtggtgatgtgcttatgttttgtatacctactacactaagctatgaaaagaataatagaagtgactactactttctggaattggaaattcttggccatacattttttaaaagttataaacaactccatgtttttaaacagaatagaactccctctaaaagcagagctatctccaaaataaatattaggagtgtttttaaatgcttagagctaggttaaacagctttattcaaaacatatttaaatgttatatggtgaaatatcttctctgtcctctgaggtctttggcattatagagagattccttagtctgcttcaatgttgttcaaattcgaggtttccttaagagtctctttaggaagtaggttggtgttaggctaggcacagtggctcatgcctgtaatcccagctacttgggaggctgaggtggcgtgagaattgtttgaaccggggaggtggaggctgcagtgagccaggatcgcaccactgcactacagcctgggtgacagagcgaaactgtctcaaccaataaaagaagtaggttggtgtttatattgaaaataggaacagaaaacaaactagctatactttttaggatctaagctgagaataaattaatttttttgctttctctagctggaatggctttacttgtgtaaaatttggaaaagattattttgcaataaaatcaaacttacagaattgactcttgaattctagactaactttgaataattggacctgcagattgactatccaccatttgaaaaaaacttttacaatgagcatgaagagataaccaacctcactccacagcagttaatagatctccggcataagctcaatcttcgggtaagcatcattaagctcaatattcttaatattaatgttaattagtccagatttagtattattggttatctaaactaataaccttgaatttcttttctaatggtctctgaactgtctttgccagagtaattattatatcccttctgttcatgtctcttaatttgattgttttagtcttctagatgctgttttaggataggatcattttcttgtttcatatttcagtcagttttatatgttctgtgctggatgggctagtgatgaagggtgggagtccccatctaaaggaagaggaaacaaaaggaatagatgttaacagatgatatcttagaatattttgaaatgaagataaacttgtctgtcaaattacatatagtatgctttattttaaaaattagaataaactaataccttttaaaaatatgcatgtactaatttcagaatggtttaaactgcctaccagaaagttttgggctgcacattggctacattggtttaaggtgctgatagatggtaaatgaaacacacagaa

SEQ ID NO: 18728 - DNA, 2300 bp, Homo sapien
ttatactctcccacaaaatgattgccaagttcatcaagaatcagaaagatacatatggtcagaatagcctagaagagtgtagtttaaacattgaaacctgtcattatgctttaaatcaggtcactttagaatgcctcaaaaactgcttctggccactttcccacagaatttaaatcacagtgtaaatgaagatgccgattgagttttcaaaatttctgttcctttgagctaagtagtgcataaggtatgtggctgttggaccagtatctattacagtctgagactagagaattagcacttttgccaggagtgcaactgcttagaaagtccctgtgaatgcctttaattatacttactgttcattttgttgatcttatagggtcgactgatagatcatgtgaaaaagaaagctaccaatcttcaaagagtctcttaccttgtgtttgatgaagcagatcgaatgtttgacatgggatttggtatgccttgaataccagtttcttctgtccccatcctcatgatactagttttttttccatgtctttctagactgttttttcagcatgagagaagctaaaaatactcctggatggggttagactatagaaatatagctaagatgaacatttttaggagttttctctggaaaagtatgttaggttttattgggttgaggaaatttcaaagtgcctttgtatataaggggaatattttctctgtcttcatttttatccatatgcctttgatcatagaggttaaggtctgtgttcttgggtagatgaatgtcagatcattcgaggccctttgctttcctatcctcgtagctgtctttactgattggaacactgctagacctagcccagttggatggagggaaaatttttcacttttatgctgaatgatatgtttaggagcttcttttttcttgagacagagttttgcttttgttgcccaggctgcagtgcagcggtgcgatctcactgcaacttcctccttccagtttcaagcgattcttctgcctcagcctcctgagtagttggggtgataggcacctaccccacagcctggctatttttttttttttttttttttggtatttttagtagagatagctgtgttgaccaggctgcgaactcctgacctcaagtgatccgcctgcttcggcctccgaaagtgctaggattacaggcatgagccactgtgcctggcctggggtttctaattttcttaattcttacaacttcttatgaagacttttactaatatggctttttccaggcttcccaaactgtatttcaggttataataattttattgttctgtttcttgcagagtaccaagttcgatccatagcaagtcatgttcgtcctgacaggcagagtatgtatgaagcacctttgttaaaccaaatttgtactaaaaagggcacttatttattttataagcactcagagttatggaagtaaaaatgatcttgtgtctgttggtgagaaccataataagggaggtaatgagtttatctgagctggacaggatcttagcactagatataacttgttcctttttatagatgataaaaccaaggatcagaaattaaataaactgccctaaattatacagttttatcagtgggtagaagcagtgtacagtacagatctgctgatttgaaatcaagagtctttttctgaaccatactgacaacttgtcttaactaaaaatgtaataaaaatagaataagagcaaatctttccctagtgaatcagtttctaaactaaatttaaagttcaggtgagcttatgtaaaaaaactgaataatcctgaatgccaaagaagcttaatgggtatgcataaagatatcatattgtttctctaacagaatttatcttaccttttagctctcttatttagtgcaacttttcggaagaagattgaaaagttggccagagacatcctgatcgaccctattcgagtggtgcagggagatattggagaggtaaccctaagcagggctggatgggaccttaatgggtttatttctcatattatggaacacagaattaatttctcactattgagataaaaaaaaaagatgttatgtttatagatgcaacatgcttgagattgggtattttgcaagttgtggggatagacgtaacaagactggcaaaatgttgggaatcattgaagctaggtgatgggtatgagttgattttgttcattttgtgttttttttgttttattgaatgtctcaaaacttacaattgttttaaaaaggcttcaaagagacaaaaagatgtgcc

SEQ ID NO: 18729 - DNA, 2300 bp, Homo sapien
tcttgggtagatgaatgtcagatcattcgaggccctttgctttcctatcctcgtagctgtctttactgattggaacactgctagacctagcccagttggatggagggaaaatttttcacttttatgctgaatgatatgtttaggagcttcttttttcttgagacagagttttgcttttgttgcccaggctgcagtgcagcggtgcgatctcactgcaacttcctccttccagtttcaagcgattcttctgcctcagcctcctgagtagttggggtgataggcacctaccccacagcctggctatttttttttttttttttttttggtatttttagtagagatagctgtgttgaccaggctgcgaactcctgacctcaagtgatccgcctgcttcggcctccgaaagtgctaggattacaggcatgagccactgtgcctggcctggggtttctaattttcttaattcttacaacttcttatgaagacttttactaatatggctttttccaggcttcccaaactgtatttcaggttataataattttattgttctgtttcttgcagagtaccaagttcgatccatagcaagtcatgttcgtcctgacaggcagagtatgtatgaagcacctttgttaaaccaaatttgtactaaaaagggcacttatttattttataagcactcagagttatggaagtaaaaatgatcttgtgtctgttggtgagaaccataataagggaggtaatgagtttatctgagctggacaggatcttagcactagatataacttgttcctttttatagatgataaaaccaaggatcagaaattaaataaactgccctaaattatacagttttatcagtgggtagaagcagtgtacagtacagatctgctgatttgaaatcaagagtctttttctgaaccatactgacaacttgtcttaactaaaaatgtaataaaaatagaataagagcaaatctttccctagtgaatcagtttctaaactaaatttaaagttcaggtgagcttatgtaaaaaaactgaataatcctgaatgccaaagaagcttaatgggtatgcataaagatatcatattgtttctctaacagaatttatcttaccttttagctctcttatttagtgcaacttttcggaagaagattgaaaagttggccagagacatcctgatcgaccctattcgagtggtgcagggagatattggagaggtaaccctaagcagggctggatgggaccttaatgggtttatttctcatattatggaacacagaattaatttctcactattgagataaaaaaaaaagatgttatgtttatagatgcaacatgcttgagattgggtattttgcaagttgtggggatagacgtaacaagactggcaaaatgttgggaatcattgaagctaggtgatgggtatgagttgattttgttcattttgtgttttttttgttttattgaatgtctcaaaacttacaattgttttaaaaaggcttcaaagagacaaaaagatgtgcctggaagcatcagcgtattaggttggaactgacgttttaattattgtggtaggggcctacgcaggagggaaagggtgacctggaaggcctggaaaaaatcaggtttcatttcttacctgtacatatgcgctatgtgaaaaattactctgaattgggacttggaattcagttatggctgcttagagaatccttcagttgcttgccatggttattgttaaggaaagctctacaaagtagtggggcatacaaattaggtatgtacaccaggtggagagcaaggtgattggaaaggagaggtgagttttgagctgcacttgacttgctgaaggcccaaggagaactgggattgttcaaggtcttctcgatgcaggtagaaatataatgcctagtccttgttcaggtgccctgtggctccaatgtcacaatcatctgtttcatttcttccttctcaggcaaatgaagatgtgacacagattgtggagattctccattctggacctagtaaatggaactggcttacccggcgtctggtagaatttacctcttcagggagtgtcctcctctttgttactaaaaaagccaatgctgaagagctagcgaataaccttaaacaggagggtcataatcttgggctgctccatggggatatggatcagagtgagagaaacaaggtcatttcagactttaagaaaaaggacatcccagtcctggtggccacagatgttgcaggtagagtatgaatttttcaacaacattaagttcctaggct

SEQ ID NO: 18730 - DNA, 2300 bp, Homo sapien
gggaaactggaagtgggaaactggaagtggaatctggtgctccggaaagagacgttcccaacttctactttctccccagattgagggatactccccctttccaccatgggcaagaagggcaaagttggcaagagccgacgagacaagttttatcacttggcgaaggagacgggtgagtccggattcgctcagtctgcgagcgagcgagcgatctctgcccggttcgcctgctctttgcgaccattatgtacctctcctgcagaaggggtggtcggttgcgaggccggagaaatcctactagtgaagcagtttgcgcacttggttgttttgtccaggttaccgttcccgatctgctttcaagctgatccagctcaatcgccgctttcagttcctgcagaaagcccgagccttgctggacctgtgtgctgcgccagggggatggttcgtaacactcgccacaggttgctcctggtggccgctttctgggttctgagctgggatggcttccagtttcactgcgggaggggaacccgaatcccggtcctcttgggggccgtttcctttcttgattgcagagaaagggcttggaatacgtgcctatgatatgctttggccagtacacgtaacaccagggatgagagatcagttgccaagagggggaaaaggatggctctaggtttttaaatttctgttccttttataggctgcaggtagctgccaagtttatgcctgtatccagccttattgtgggtgagtaacggacagctctccttggtgttttaaggggtgggtgtataaggtattttgtcctgtatttctctcctccctgcttgaagcaaccttttagaatactctgacctgatttcttccaggagtggacctggttccaatcaagcctctccccaatgtggtgactctccagcaggacatcacaacagaacgttgtaggcaggtaataggagtctctctcttccttccccctttatacggaaacatctacatccctgaaatcctctaaaggcaagtttttcctttttaccgtgctttgagcacgttcttgcctgacatctgtacgacaagacctatggcattcgtagtgtccactccaggctttatttagagtcagggataaaggtgtttggaattgggagaagggcagagatctttagtgaagtcttctcctgtgaattcagtgtcagactgtaatctccatgaaggtagagacatactgtttttgtttactattgtatctcctgtgcctggtactgcatttggcccatgatgggcactcagcaaatgactagatggacaaatggctgaaccagggccattccagtgtttctgtttccatagttccttttcttctctttaggccctgaggaaggagctgaagacctggaaggttgatgttgtgctcaatgatggggcccccaacgttggggctagctgggtccatgatgcttactcacaaggtacagggagtgtggtgcttggagatcaggtgatggtggaggtgggcgcatgccctcctgggctgcagagtgcgtcaactaattgtctctatcctacagcccatttgacactgatggctctacgtttggcttgtgactttttggcccgtggtggcagcttcatcacaaaggttttccgttctcgtgactatcagcctctgctatggatctttcagcagctgttccgccgtgtccaggccaccaagccccaagcctctcgccatgaatctgcagagatctttgtagtctgccaaggtgggcatcatttcctttctcttgatccaggctcccaactcccaaagcacactttttaatatatcctgtcatttttaggattcctggcccctgacaaggttgacagtaaattctttgaccccaaatttgcctttaaggaggttgaagttcaggctaagaccgttactgaattggttactaagaagaagccaaaggtgtgttttggggaatggggtcactcttgggtcctggaactctagggaggttgggcctggtgggtcctacaggtaccttagaagggcctgaccaagcttctctcttttccttcctaaggctgaaggctatgctgagggtgacctcactctctatcaccgtacctcagtcactgacttcctccgagctgccaaccctgttgacttcctctccaaggccagcgaagtgagtctccagccttgagggacatgaggtagccccagaaacatggcctgaggatctcccctgacacctttccatcctcccaaacagatcatggtagatgatgaagagttggcacag

SEQ ID NO: 18731 - DNA, 2300 bp, Homo sapien
gatccatagcagaggctgatagtcacgagaacggaaaacctttgtgatgaagctgccaccacgggccaaaaagtcacaagccaaacgtagagccatcagtgtcaaatgggctgtaggatagagacaattagttgacgcactctgcagcccaggagggcatgcgcccacctccaccatcacctgatctccaagcaccacactccctgtaccttgtgagtaagcatcatggacccagctagccccaacgttgggggccccatcattgagcacaacatcaaccttccaggtcttcagctccttcctcagggcctaaagagaagaaaaggaactatggaaacagaaacactggaatggccctggttcagccatttgtccatctagtcatttgctgagtgcccatcatgggccaaatgcagtaccaggcacaggagatacaatagtaaacaaaaacagtatgtctctaccttcatggagattacagtctgacactgaattcacaggagaagacttcactaaagatctctgcccttctcccaattccaaacacctttatccctgactctaaataaagcctggagtggacactacgaatgccataggtcttgtcgtacagatgtcaggcaagaacgtgctcaaagcacggtaaaaaggaaaaacttgcctttagaggatttcagggatgtagatgtttccgtataaagggggaaggaagagagagactcctattacctgcctacaacgttctgttgtgatgtcctgctggagagtcaccacattggggagaggcttgattggaaccaggtccactcctggaagaaatcaggtcagagtattctaaaaggttgcttcaagcagggaggagagaaatacaggacaaaataccttatacacccaccccttaaaacaccaaggagagctgtccgttactcacccacaataaggctggatacaggcataaacttggcagctacctgcagcctataaaaggaacagaaatttaaaaacctagagccatccttttccccctcttggcaactgatctctcatccctggtgttacgtgtactggccaaagcatatcataggcacgtattccaagccctttctctgcaatcaagaaaggaaacggcccccaagaggaccgggattcgggttcccctcccgcagtgaaactggaagccatcccagctcagaacccagaaagcggccaccaggagcaacctgtggcgagtgttacgaaccatccccctggcgcagcacacaggtccagcaaggctcgggctttctgcaggaactgaaagcggcgattgagctggatcagcttgaaagcagatcgggaacggtaacctggacaaaacaaccaagtgcgcaaactgcttcactagtaggatttctccggcctcgcaaccgaccaccccttctgcaggagaggtacataatggtcgcaaagagcaggcgaaccgggcagagatcgctcgctcgctcgcagactgagcgaatccggactcacccgtctccttcgccaagtgataaaacttgtctcgtcggctcttgccaactttgcccttcttgcccatggtggaaagggggagtatccctcaatctggggagaaagtagaagttgggaacgtctctttccggagcaccagattccacttccagtttcccacttccagtttcccacttcccgcagcaattccaccccgcgcccctctccgcacactacctagacccagagccgctttctccacacttggaaccgcacaagtatgcagctaactacttccgcttccgcttgcgtcccctgcgtccctggctcgaggttttccgccattttgagtgtggccctagattgttctcaatactctgtccttgggttttgtaagttgaaagttgagactaggaaggcatatcacaagaactataaacagagtttcaatgaggcaacactgaggaggagttctactccttcctcatccccttccaaagcccctgaactcgagtagccgcccctcccatcatggttcccttagtgtggtctcgccgcacaccccgcccattgacccggaattcttctctgcctggtcttcaggtcccaatcctccgcttccgcgcttgcgcgccaagacggctcggatgccggcggtctctgctgaagagagaagatggcgcttgacggaccagagcaggtatggcgggtgcagtggcggcccggcaggttacggggctgggtgcggagcgagcgtgatctgagtggagagcgggccggggcaggagcgtcgggtgggtcggaggtgcctg

SEQ ID NO: 18732 - DNA, 2300 bp, Homo sapien
gccctgactcaccgagggcggcgctgacacagcagatccggtcgcaggcagcgtccagcatggactggtccaggcacctccgacccacccgacgctcctgccccggcccgctctccactcagatcacgctcgctccgcacccagccccgtaacctgccgggccgccactgcacccgccatacctgctctggtccgtcaagcgccatcttctctcttcagcagagaccgccggcatccgagccgtcttggcgcgcaagcgcggaagcggaggattgggacctgaagaccaggcagagaagaattccgggtcaatgggcggggtgtgcggcgagaccacactaagggaaccatgatgggaggggcggctactcgagttcaggggctttggaaggggatgaggaaggagtagaactcctcctcagtgttgcctcattgaaactctgtttatagttcttgtgatatgccttcctagtctcaactttcaacttacaaaacccaaggacagagtattgagaacaatctagggccacactcaaaatggcggaaaacctcgagccagggacgcaggggacgcaagcggaagcggaagtagttagctgcatacttgtgcggttccaagtgtggagaaagcggctctgggtctaggtagtgtgcggagaggggcgcggggtggaattgctgcgggaagtgggaaactggaagtgggaaactggaagtggaatctggtgctccggaaagagacgttcccaacttctactttctccccagattgagggatactccccctttccaccatgggcaagaagggcaaagttggcaagagccgacgagacaagttttatcacttggcgaaggagacgggtgagtccggattcgctcagtctgcgagcgagcgagcgatctctgcccggttcgcctgctctttgcgaccattatgtacctctcctgcagaaggggtggtcggttgcgaggccggagaaatcctactagtgaagcagtttgcgcacttggttgttttgtccaggttaccgttcccgatctgctttcaagctgatccagctcaatcgccgctttcagttcctgcagaaagcccgagccttgctggacctgtgtgctgcgccagggggatggttcgtaacactcgccacaggttgctcctggtggccgctttctgggttctgagctgggatggcttccagtttcactgcgggaggggaacccgaatcccggtcctcttgggggccgtttcctttcttgattgcagagaaagggcttggaatacgtgcctatgatatgctttggccagtacacgtaacaccagggatgagagatcagttgccaagagggggaaaaggatggctctaggtttttaaatttctgttccttttataggctgcaggtagctgccaagtttatgcctgtatccagccttattgtgggtgagtaacggacagctctccttggtgttttaaggggtgggtgtataaggtattttgtcctgtatttctctcctccctgcttgaagcaaccttttagaatactctgacctgatttcttccaggagtggacctggttccaatcaagcctctccccaatgtggtgactctccagcaggacatcacaacagaacgttgtaggcaggtaataggagtctctctcttccttccccctttatacggaaacatctacatccctgaaatcctctaaaggcaagtttttcctttttaccgtgctttgagcacgttcttgcctgacatctgtacgacaagacctatggcattcgtagtgtccactccaggctttatttagagtcagggataaaggtgtttggaattgggagaagggcagagatctttagtgaagtcttctcctgtgaattcagtgtcagactgtaatctccatgaaggtagagacatactgtttttgtttactattgtatctcctgtgcctggtactgcatttggcccatgatgggcactcagcaaatgactagatggacaaatggctgaaccagggccattccagtgtttctgtttccatagttccttttcttctctttaggccctgaggaaggagctgaagacctggaaggttgatgttgtgctcaatgatggggcccccaacgttggggctagctgggtccatgatgcttactcacaaggtacagggagtgtggtgcttggagatcaggtgatggtggaggtgggcgcatgccctcctgggctgcagagtgcgtcaactaattgtctctatcctacagcccatttgacactgatggctctacgtttggcttgtgactt

SEQ ID NO: 18733 - DNA, 2300 bp, Homo sapien
aacaacacctggtggaaagattgttaggtgagaaacctgagttctagcccagccgctgtcaatcaaaagcaaagtaaaggtaagacaatctatttttaaaaatctagatctgttaccaaacggcacatgggtatagcatcagctaccctgcttcaagactactaaggtgaacgaataaaaacacatgaaaaagcattcaaaaatggtaaactaaacataatacctgcaaatgcacttggaattcagaattgtcttttgtggctttcccccatccaatttatattacagttgacacttgaacaacgcagggggttagggtgaaattgaaaatccatggacctgtccaaagttaaactactaacagcctaccgtaacagtataacgtaacactaacagactactgtttatgttgtctgtaaggcttactactggaagccataccttactgctggaagccttactggtaacacaaacatttgattaacaacataaacggtcctttttctatggtttagcgctttaggctagggctctgggttgcccaatttctttcattcagtctctatggaattagcattgtccagatccctcaatgatgcccttcctcacattctcacttcaccctcacccaacctcttggtgataaatttcaactcctgagcttatgtttcccttttataagaatccttttcattcgggcttcttccaaaagggttgacctttggctagaggtacctttactattaagatttgactcgaagatgtgtaacaaactgtgaacactaagaccctcaaagagatgggactggaggagaacaagagattgcttacttctgatacatacaccctactagctaagaaacaaacaagaaaggagaagcagcagcttcttccactgcactcccaaaggaattagatggatttgtggaagtccgtttccatcccccatcatcacccttcctagctccctctggagtccgtcctcacctggagttcttcaatcttggacagataatattggcggagtccgctgcctgccttcccctcctccagctccatctgaagacacagagtgagtcttaaacgacaggttaaacatccgagggggtaaagccacttgcagggcactttgaataaggcttgacaccaggtagctttgcgtagtagaaaaagtttggacttcggaggctcaggatctgggttctaatccctccctcccttggaaccctccattttcccaggactaaaataaaagaatgggaacgccgcctacctcatacgacttttaggaggaccgagaggcgatatgatatagacggggggcgctttgcactgcgtgaagtgctctacaagcccgaggtgtcagtactgacgaaggagccagcggaacggagccaaaggactggcgtcccgtctcctgcgacccgtgggccggccattcccgcgcccatcgcttccctcactcactccgcttctaccgcgtcttcctctcccagccttgccctgactcaccgagggcggcgctgacacagcagatccggtcgcaggcagcgtccagcatggactggtccaggcacctccgacccacccgacgctcctgccccggcccgctctccactcagatcacgctcgctccgcacccagccccgtaacctgccgggccgccactgcacccgccatacctgctctggtccgtcaagcgccatcttctctcttcagcagagaccgccggcatccgagccgtcttggcgcgcaagcgcggaagcggaggattgggacctgaagaccaggcagagaagaattccgggtcaatgggcggggtgtgcggcgagaccacactaagggaaccatgatgggaggggcggctactcgagttcaggggctttggaaggggatgaggaaggagtagaactcctcctcagtgttgcctcattgaaactctgtttatagttcttgtgatatgccttcctagtctcaactttcaacttacaaaacccaaggacagagtattgagaacaatctagggccacactcaaaatggcggaaaacctcgagccagggacgcaggggacgcaagcggaagcggaagtagttagctgcatacttgtgcggttccaagtgtggagaaagcggctctgggtctaggtagtgtgcggagaggggcgcggggtggaattgctgcgggaagtgggaaactggaagtgggaaactggaagtggaatctggtgctccggaaagagacgttcccaacttctactttctccccagattgagggatactccccctttccaccatgggc

SEQ ID NO: 18734 - DNA, 2300 bp, Homo sapien
catcactcttattaaaggaaggccaaaggtcaaaattcatgtatttaaggaggctacaatagggctcaggaaaaagagatgcatgtgaaactactagatgatgacagggagaaaacagtaagcactgctgtgaagacacagtgcagggagataaggacagacctcagacaaactgcccacatgcggcttcccatctttctccactcacctttagcatttagttcgttcctctgtgcctgcagcctccggaggttttggctcttatcattcacaatcagctgtggcagacaagagacaaattccattattcaagggcaggagacaggaggaggtaggatcttggccaagacctcacaggtctgaatgagctgagggaagggcacagggcacctgcatgttgtttcagattctccagtatgatcctaatgaccctgccctgtccttcaagagtccctctggaccttacagcagccatcaaagaaggctgcttgtccaatactggtccaggagtaacagaatctaatggagaaaagttacagctggctcatgtaacaccaaatttcttgcaggaaggcaacaacacctggtggaaagattgttaggtgagaaacctgagttctagcccagccgctgtcaatcaaaagcaaagtaaaggtaagacaatctatttttaaaaatctagatctgttaccaaacggcacatgggtatagcatcagctaccctgcttcaagactactaaggtgaacgaataaaaacacatgaaaaagcattcaaaaatggtaaactaaacataatacctgcaaatgcacttggaattcagaattgtcttttgtggctttcccccatccaatttatattacagttgacacttgaacaacgcagggggttagggtgaaattgaaaatccatggacctgtccaaagttaaactactaacagcctaccgtaacagtataacgtaacactaacagactactgtttatgttgtctgtaaggcttactactggaagccataccttactgctggaagccttactggtaacacaaacatttgattaacaacataaacggtcctttttctatggtttagcgctttaggctagggctctgggttgcccaatttctttcattcagtctctatggaattagcattgtccagatccctcaatgatgcccttcctcacattctcacttcaccctcacccaacctcttggtgataaatttcaactcctgagcttatgtttcccttttataagaatccttttcattcgggcttcttccaaaagggttgacctttggctagaggtacctttactattaagatttgactcgaagatgtgtaacaaactgtgaacactaagaccctcaaagagatgggactggaggagaacaagagattgcttacttctgatacatacaccctactagctaagaaacaaacaagaaaggagaagcagcagcttcttccactgcactcccaaaggaattagatggatttgtggaagtccgtttccatcccccatcatcacccttcctagctccctctggagtccgtcctcacctggagttcttcaatcttggacagataatattggcggagtccgctgcctgccttcccctcctccagctccatctgaagacacagagtgagtcttaaacgacaggttaaacatccgagggggtaaagccacttgcagggcactttgaataaggcttgacaccaggtagctttgcgtagtagaaaaagtttggacttcggaggctcaggatctgggttctaatccctccctcccttggaaccctccattttcccaggactaaaataaaagaatgggaacgccgcctacctcatacgacttttaggaggaccgagaggcgatatgatatagacggggggcgctttgcactgcgtgaagtgctctacaagcccgaggtgtcagtactgacgaaggagccagcggaacggagccaaaggactggcgtcccgtctcctgcgacccgtgggccggccattcccgcgcccatcgcttccctcactcactccgcttctaccgcgtcttcctctcccagccttgccctgactcaccgagggcggcgctgacacagcagatccggtcgcaggcagcgtccagcatggactggtccaggcacctccgacccacccgacgctcctgccccggcccgctctccactcagatcacgctcgctccgcacccagccccgtaacctgccgggccgccactgcacccgccatacctgctctggtccgtcaagcgccatcttctctcttcagcagaga

SEQ ID NO: 18735 - DNA, 2300 bp, Homo sapien
gggaaccccagcaggggacaaggtggcttcctgggaactccgagtggaaggaaaactgctggatgatgtgagttggggagggaggttctggagggaaggaggcctgtgtgggtttaagactgagaccaaggagtttgatactagcctgagcagcagagccagaccccatctctacaaaaaatttaaaaattagctgggtgcggtggcatgcacctgtagtcccagctactcataaggctgatgcaggaggatggcttgagcccaggaggtcgagcttcagtgagttatgatcacaccactgcacttcagcctgggtgacagagtgagattgtgtctcagaaaaaaaaagactgggccagacacttgggcgctcccagagaagtcctgccatagggaggggggcgctgctccaagcccgttggaggttgatttgtgtggttattacagtgttcctgcagatggcagtcgagtgtctcgaggaagtccctcgtgggctgcaagagggcaccatttccctgcctccagtctgcccagagtcctgcttccatccttcagggcccaggaatcttcagtatccggagctccagggctgaaatggggcttctctttcttgggatttagcatagcttgagatttgagagctcagcagcaccatctcacacccctttccatccccagcctagcaaacagaagaggaagttttcttcattctttaagagcctcgtcattgagctggacaaggagctgtacgggcctgacaatcacctggtggaggtgagagtgggcctggggcaaaagcaggctgatgtgcaggtttggcagggaaatggcctcagggcccttgggaggccctgtgttcacgcccacccccttggtgataagccatgcttccctccctgccagtggcaccggatgcccaccacccaggagacagatggcttccaagtaaaacggcctggagacctcaacgtcaagtgcaccctcctgctcatgctggatcatcaggtgacagagaccctggggtcatttctgggcccacagggacccctcaggaggggagctggttcctagaaacccttcctgtccctgccctattttcccactgttctactataagaacccgttctgactcccctccatccaactccagcctccccagtacaaattggacccccgattggcaaggctgctgggagtgcacacgcagacgagggccgccatcatgcaggccctgtggctttacatcaagcacaaccagctgcaggatgggcacgagcgggagtacatcaactgcaaccgttacttccgccaggttagccagatgccagcccccgttttctcagcccttgctttgccttgcctgctgggctactccttggccacagcctgcagactgctgccctcactggtcctggaatggtccactccactgtgcccacaagccaacgctgagcctttcgtatttcctccagatcttcagttgtggccgactccgtttctccgagattcccatgaagctggcagggttgctgcagcatccagaccccattgtcatcaaccatgtcattaggtaaatgcaaggagggggacaggaaggctcttctaagagcagattcacccttggcttgaactaaagccaaagaaagcatcaggtttctttttccctgagtgtgtgcagagaatgggccccagatttggcccaggtgggcaggatgaagtcagctatgtgccttccctccccatgtgctgcctgcagtgtcgaccctaacgaccagaagaagacagcctgttacgacatcgatgtggaggtggacgacccactgaaggcccaaatgagcaattttctggcctctaccaccaatcagcaggagatcgcctcccttgatgtcaaggtgggccctctggctccacagcttcctctggggcccaggattggggtgggctggctctgtccagcatttccatacatgtagcacctggaggacgggatgggaactctggctcagttgcttgcatgtaagctttgggggcacagtctgacacaggtaccctctccagatccatgagaccattgagtccatcaaccagctgaagacccagagagatttcatgctcagttttagcaccgacccccaggacttcatccaggaatggctccgttcccagcgccgagacctcaaggtgtagtcctctttcccgaggggactcctatgtaaagctctgggtgatttttacccacagcagttcccagggtggattagcccaggggtggggattatgctatggctttcctcctggct

SEQ ID NO: 18736 - DNA, 2300 bp, Homo sapien
ttgttggtgatgcatctctttccccataaaatggtgagttccggccaggtgcggtggctcacacctgtaatctcagcactttaggaggccgaagtgggcagatcacctgaggtcaggagtttgagaccagcatggccaacatgttgaaataccatctttacaaaaacacaaaaaattagctgggcatggtggtgcgcacctgtagtcccagctacatgggagactgaggcaagagaatcgcttgaacctgggagtcagaggttgcaagtgagctgagatcgcgccactgcactccagcctgggtgacagagtgagaccatgtctaaaaaaaaaaaaggctgggactgggacttactacttctgattcccagtacctgacaaggtgcctggctggctcatggtgctcagtactgattgttgaatggttcatatgagaagatgcggtagcactgtgtcccagcatcttggtccacctccagttgtgattgcctttctctctttagcaaaagcgaaagcttcggatctacatttccaatacgttcagtcccagcaaggcggaaggcgatagtgcaggaactgcagggacccctgggggaaccccagcaggggacaaggtggcttcctgggaactccgagtggaaggaaaactgctggatgatgtgagttggggagggaggttctggagggaaggaggcctgtgtgggtttaagactgagaccaaggagtttgatactagcctgagcagcagagccagaccccatctctacaaaaaatttaaaaattagctgggtgcggtggcatgcacctgtagtcccagctactcataaggctgatgcaggaggatggcttgagcccaggaggtcgagcttcagtgagttatgatcacaccactgcacttcagcctgggtgacagagtgagattgtgtctcagaaaaaaaaagactgggccagacacttgggcgctcccagagaagtcctgccatagggaggggggcgctgctccaagcccgttggaggttgatttgtgtggttattacagtgttcctgcagatggcagtcgagtgtctcgaggaagtccctcgtgggctgcaagagggcaccatttccctgcctccagtctgcccagagtcctgcttccatccttcagggcccaggaatcttcagtatccggagctccagggctgaaatggggcttctctttcttgggatttagcatagcttgagatttgagagctcagcagcaccatctcacacccctttccatccccagcctagcaaacagaagaggaagttttcttcattctttaagagcctcgtcattgagctggacaaggagctgtacgggcctgacaatcacctggtggaggtgagagtgggcctggggcaaaagcaggctgatgtgcaggtttggcagggaaatggcctcagggcccttgggaggccctgtgttcacgcccacccccttggtgataagccatgcttccctccctgccagtggcaccggatgcccaccacccaggagacagatggcttccaagtaaaacggcctggagacctcaacgtcaagtgcaccctcctgctcatgctggatcatcaggtgacagagaccctggggtcatttctgggcccacagggacccctcaggaggggagctggttcctagaaacccttcctgtccctgccctattttcccactgttctactataagaacccgttctgactcccctccatccaactccagcctccccagtacaaattggacccccgattggcaaggctgctgggagtgcacacgcagacgagggccgccatcatgcaggccctgtggctttacatcaagcacaaccagctgcaggatgggcacgagcgggagtacatcaactgcaaccgttacttccgccaggttagccagatgccagcccccgttttctcagcccttgctttgccttgcctgctgggctactccttggccacagcctgcagactgctgccctcactggtcctggaatggtccactccactgtgcccacaagccaacgctgagcctttcgtatttcctccagatcttcagttgtggccgactccgtttctccgagattcccatgaagctggcagggttgctgcagcatccagaccccattgtcatcaaccatgtcattaggtaaatgcaaggagggggacaggaaggctcttctaagagcagattcacccttggcttgaactaaagccaaagaaagcatcaggtttctttttccctgagtgtgtgcagagaatgggccccagatttggcccaggtggg

SEQ ID NO: 18737 - DNA, 2300 bp, Homo sapien
gagccctggattcctcatctggggttcaggggattgatccaggcctacctggtcctgctgcaggcagggagttagggaggctcagagtgctggactgcttttttttttttctttaactcctgagttgtttttttttgtttgttttgttttgttttgttttttgaagtgggaggagttgctagcgcctataagccctatggagcttggcaaggctcagctgggacttgaactataagcagccttcccctggggccctgagtgagccaggggctctgggcccaggaaacctggagcagatgtctgggtggagcctattccagaccctgcctatgaggccttgtcttgggacttcctgttaccggagcacctgcccaggagggatgggtggtgctgcaggttttgtgaacactgcagcagggagcttcctggggaccacagggccctcgctcacctctgcaggacccactgcttcagttcttccctgtctttgtctcaggcactaggaaaaactagtctgggatgtctgggcctgggcttacagctgtagccacacttagtttttttctataatctcaggccagagaaagaacaatctttaaggcagagaaagaggctgtcttttgcctttcaacagctctgattaatctcttcctgatgcagagagactttggcaggactcccaaagccccagagccccccactttgaactttttattctcccaaacacttccgtcccaccctgctcctcctctccccatcctcacgtctgtgggtcatgtttctttccatctccgcatctggtcaagaatctgaccctctgtgttgggaacatgggtttagtgcgggatgaagaggttggggaagaatctcatctccatgatgctggggtgggggagggtcctttgatttggtacaagtctccaccctgccgggcttggttggctggttgtgctcgttgcataatctgggccctggggccagccctgtgaagctgccagggacagtgtgtgcaaggcagagctgccaaacaggccttgcaggcagcagccatggggaggcgggtgggggtggaggtgactcccagatgggctccacagaaatgtcagggagcaaggcctcaggtgggaaatccttctgcaggcatctaaagaagctatttctgtctcccactttcctgctgctcagcctgggcctctatccttgcctcccaggataatcttagcccccttctccagcttgggattgccagggctacacggagccagagccagtcctggctgccaggtggtgcctggaccactggcagagtccaggtgctagctgctctctttcccacaggccacccaggagccatagcttcccttctggggtcttctgtcataggggtagtagttgggcagtagggaggtaagaggagggtccagttctgggctgtgggtgggggctatgtgataccagactacagggtacagggtccctgtaccctgcccgaggccacccccaccagctggtacacgttccaagccatcctgttgcagccctgctcacctggggtgctgctgcctaccagacccctttctccctcggccacagaggatggggattggggctctgcgccattggcctactcatactatagtacactcctctgcctggcagtgacactgcccctgtgcctctcagccatgcttcttcttcatgatgggagaaagagaaggagggcagggcttggcaggactgtctgagagaatagggaccagcttgcccagggaatagggcacagcatgctggggctggaaggtagcaatgggccctgaaaagctccccaaggcccttccctctgcaggcaggaccctcctcccagcccaggttctggcaggcctcattcgctggcatggctgccagggcggttgcagggggcagggcaggtgtggtttacactctgtgctcaggcgcccactcccctttgttcctggggctccagcagggctctggtgtgctgctcaggccctacctggctgacgagagggatggagggcatgggctatgggtcccggagggccttgcccctgacctatgcacccccgttggctcacttcccccagcgacctggcatgtcaccagggaaccggatgcccatggctggcttgcaggtgggaccccctgctggctccccatttggtgcagcagctccgcttcgacctggcatgccacccaccatgatggatccattccgaaaacgcctgcttgtgccccaggcgcagcctcccatgcctgcccagcgccgggggtaagagcat

SEQ ID NO: 18738 - DNA, 2300 bp, Homo sapien
cttactctgtcacccaggctggagtgcagtggcacgatctctgctcactgcaaccactgcctcttgggttcaagcaattctcgtgcctcagcctcctgagtagctgggattacaggtgtgcaccaccacgcccagctaatttttatatttttagtagagacatggtttcaccatcttggccagactggtctcgaactcctgacttcaagtgatccactcaccttggcctcccaaagtgctgggattacaggtgtgagccactccacccagctgatctgcttttaaatgcacttattagcttgccccttttctagggtagaaaaaatcttgtgttttctgatgcgacccactgggtcgcatcagaattacctaggaagcttatttttcaaatacaatactgagagccattggattggaggggtggctggcggaggtattttggagtagcttcccagaggactctgattctccactgcccctatcactttgagaattactgttgttctagaagcttaaaaggattgaaatggatattagctgccttatcatgaactcttaacccactttacagggatgggaggggccatgattcagtgactttaacaattccagtggccagtccccagactgacaggttatcgactcttggggcaatagagtgggatctctaagttcaggaggtaagaaaacagcagcagcggtgtttatcactagaggcatgaggagaactaatttctaaaaagcactggagaactatactgtaaaaaagatctggggtgctatgatgcaaggaaggaagtattacttggttggggctggaaaaataaagcaattatagtaaaaaaactaaaaaaaaaaaaaagtctagatcccggcttcttgacagtgtggtctgagaagcaacagcatcgctggcagcttgttacaaatgcagagtcctgggccctgccacaatctgcatttttaataagagcctcgagtgttttttatgtgctcattaaagtttaagcagcactggtccatatcacggcgaggagatccagaccatcagagggtaggctccctggcacagctgacgcatttttgaatactttgatacagcacagtgtacctgaaaagatactgcatttttgaaaattaagtgctataaatactggagaaagacctctttttttaaactgcggggaggtttctcataagccaaatttcttttgactagaagcattttctggggagtaaagtaccaggcttccttaaagtgaggcggagccacgttaaaaatgtgcggtagaactcagccttggccaagtcgaccgttcaccagctgggtcaagtctggagcctcctaggtcccttggcagttccgagctaccagcatgagcttttacaggaagttgagttggctgctgttctgccccacagagcagctgagtcttttttttttttttttttttttttgatgagtttcactcttgccgcccaggctggagtgcagtggggcgatctcggctcattgcaacctctgcctccaaggttcaagcgattctcctgcctcagcctgccgagtagcttggattacaggcgcccgtcaccacactcggctaatttttgtatttttagtagagacggggttttcaccatgttggccaggctggtctcgaacttctgacctcaggggatccgcccgcctcagcctcccaaagcgctgggattacaggcgtgagccacagctaccgactctgagttgagtctttaacgccgaagatgcagaaaggagacttgacaaaactattttcggggagtgtggccgcggaattcggtgagggtgctataccgggagagagtagtagcaacggctcattcactgtgaagcccctaagtgaccttagacctctgaccccgcgcctcactcggcgcttccgcgcgcagcttccgctcccgcccctccgacgaaaggctgggccaaaggtgggggggtggggctctgaggtcggcagttaggggcggtgcccgctgggggcgggtctcgcgaggggcaggattcgaggaggcactcgagcattgggcaccaggtagaggcggggcctagtgctgggctgggttgggcggggcagggagttcgtagccgcctctgggtaactcgactcgggcggccaaacctccggaggccggggacggaaggcgggcccgcagcagatcctggatccggaatctcccgggcaggagcggaatctgtcccgaaccgggtctgtgaggaactcgcgaacttggattaggaaatcccggagcccggatcgaca

SEQ ID NO: 18739 - DNA, 2300 bp, Homo sapien
cacaggtagctggtcagtgaggaagggggtggggagtcctgagtggggtgacacttcagtgttcattcatctggacccgggggaaagattcctgtctcttggatcactaggacacagaatcgttacggtctctggcttgtatttgggataacactagttaatagactatcagagaggactctccctaggaaacatgccttctccgcttggttcccttctgccccaggactgccctgtgtttctcctcttgagaatgtttttacttctttgttgccaccgtttgtgtcatgatgaactataataggctcttggtaggacaggacccatacatagctcaggtacagaaagtgagttctcctgatgacgggaaaggaacaggggccttagcaggtaacattgctacaagagctgtgtattcccagaggggactggtattgggaggtgaagtagatggtagatatggactagctaaagaggacctgtagagaagccttcaggacttcctgaagtctccgtgccctttacctacatcaggcatctaaaatccatccgaggccaggcgtggtggcttggccaggcacagtggctcatgcctataatcccagcactttgggaggctgaggcaggcggatcacccaaagtcacgagttcgagaccagcctgaccaacatggtgaaaccccgtctctactaaaattagccgggcgtggtggcatgcacctgtaatcccagctacttgggaggctgaggcaggagaatcacttgaacatgggaggcggaggttgcagtgagccgagatcgtgccattgcactccagcctgggcaaaaagagtgaaactctgtctcaaaaataaaataaaataaagtaaaataaaataaaaatccatctgacatctcccattgcatcagagaagatttccagaacagacgaaatttgtaagcatccaaaacatccattcccttagcgccaaatcaaaatggaatggtctcactctgagaagaggcataaagaagaggcatggaaaatgagtgaccctgggagttacctgcaggccaatggatctgagaatttggtgtgcataagggtccccgggaggcttgttttattccttagcatattttcaggtcccaccttcacaggtttgaaaccatgcgctctgaggtggagttggagtctgcagtttacaagcatttaggatgattctggcaaagggaatccttagccataatttgagagagacactgctttcagggataagtaatgaagttcgaatcctgtgagggtccacagcagcctattatggggagctttcaagaattctgaaagtttaggaagatattggtttcctgggcataattttttttagcaactccataatttccatggtgatactaatagagaattcaagttctcaagaaagatgataggtggagggaatagtggtgaaatcagagctaacttgttaactacagtttttttttgtttgtttgtttgagacggagtttcactcttgttgcccaggatggagtgcaatggcacaatctcaactcactgcaacctctgcctcctgggttcaagtgattctctgcctcagcctcctgagtagctgggattacaggcacgcatcaccatgcctggctaattttgtatttttagtagagacggggtttctccatattggtcaggctggtctctaacttccaacctcgggtgatccgcccaccttggcctcccaaagtggggaggattacaggcgtgaaccaccccgcccggccaattacaggtcttttgtcctgtctggttgtctgaaccttttttttcagggcaggtttcctgttctctaacctggaactagatagaataggttctgtatttatttgggtctcgtggtcctcaccagagtcattggcatatgtggttcatttttttttttttttttttttgagatggagtcctgctctgttgccaggctggagtgcagtggcacaatcccggctcactgcaacctctgcctcctgggttcaagcgattctcctgcctcagcctcccgagtagctgggattacaggcgtgcgccactacacccagcttattttagtacttttaatagagacggggtttcatcatgttggccaggatggtcttgatctcttgaccttgtgatccgcccgcctcggcctcccaaagtgctgggattacaggcgtgagccaccgcgcctggccgatgtggttcatatttcaggggtcccggaagagttgtttgaggtttctatttggccaagtcaggccctggtggagttt

SEQ ID NO: 18740 - DNA, 2300 bp, Homo sapien
gtacaaaacttagcccggcatagtggtgggcacctgtaatcccagctacttgggaggctgaggcgggagaatcactggaacccaggaggtggaggttgcagtgaggcaagatcatgccactgcactccagcctgggagacagaatgagactccatcaaaaacaagaaagaaagaaagaaggaaggaaggaaagaaggaaggaaggaagaaaggaaggaaggaaagaaagaaagaaagaaagaaagaaagaaagaaagaaagaaagaaagaaagaaagaaaaagaaagaaagaaggaaggaaggaaagaaggaaggaaggaagaaaggaaggaaggaaagaaagaaagaaagaaaaagaaagaaagaaagagaaagaaaaaggaaagcaagaaagaaaagaaagaaagaaagaaagaaaaagaaagaaggaaagaaaagaaactaaaataactaaataactgagtagcaccacaccacctgctctggagaaaggacttttgttgttgttgttgttgttgtcgtcgttgttgtggttgttgaaatggagtctcactctggcgcccaggctggagtgccatggcccaatcttggctcacggcaacctctgcgtcctgggttcaagcgattctacctcctcaccctccggagtaactgggattgcaggcttctgccaccacacacagctacttttgtacttttaagagatggagttttgccatgttggctagtctggccttgaactgacctcaagtgatccacccacctcagtcttccaaagtgctgggattacaggcatgagccaccgtgcccggcctggagaaaggactttaaatgatgcaatgtgggaagagcaaggttgtggagatctgctgccctggctgaggtagctcatgtaatcagtctctctgagcctcagtctcctgatctgtgaaatgggatgatactcatacctcctacacaagacaagtggcagatcagacgtgagaatgcacaggcaggcctttgacaactggataagctctacacaggtctggaaaggaggaagagacaaaagaggacgggcttccatggctggatagggcatctttcggcgtgatgtgttctgagttccaaagctgggaagagactcaaatcttttttttctttttttttaattattattattcttttactttaagttttagggtacatgtgcacaatgtgcaggttagttacatgtgtatacctgtgccatgctggtgtgctgcacccattaacttgtcatttagcattaggtatatctcctaaagctatccctcccccctccccccaccccacaacagtccccagagtgtgatgttcccctgagactcaaatcttcaagagctcttccaaccttgagattctctgatggtttcagggctgtgggaggaagcgcttgtggtccgtgtctgttcccgggatttctgtttcttggtttgtgtctctgctgcaggtccaaggagctgaggcaataccttgagtctgggttcttcgtccccagtgacctgggggagccccaccgcctccgccccaaggttcagggaaaggggagagcaatgtgtggggttggttctctctagtggtcagtgttagcactgcatccagctgactcaggtgggcccaggagtcatcagcaaaagtggaattcaggactcaatggtgctcagaacccccacaatctattggctgtgcttggccccttttcccaacacacacattctgtctggtgggtggaagttaaacacgcggggaggaggaaaggaataggatagagagtggaatggggtcggtaggggtctcaaggactggctatcctgacagccttccccgcattcaggttgaccaacatggcctgcggccagagggcacccacctgacccttaaagagaggacaagttgggtggagtctgtggctgacactctgtgcacaatccttacaacactggtgatggtgagaagggaaagacgacaagccagggggcatgatcccagcatgtgtgggaggagcttccaaattatccattagcacaagcccgtcagtggccccatgcataaatgtacacagaaacaggtggggtcaagcagggagagagaactggccagggtataaaaagggcccacaagagaccggctctaggatcccaaggcccaactccccgaaccactcagggtcctgtggacagctcacctagcggcaatggctgcaggtaagcgcccctaaaatccctttgggcacaacgtgtcctgaggggagaggcagcgccctgtagatgggacgg

SEQ ID NO: 18741 - DNA, 2300 bp, Homo sapien
tcaggggggaagatttcaccactagagagggtgctctttcctgctctcatctctgggggtatctgatgcttgtgacctccagattatattgaagtagccccaaccctgggcaccaggagacaggaggctcagtcctggccttctctgccttcaccttgtcctgctctgaggtttccacaaggcaccccatgccactgggccattctcacctgagaattgagaaagaacaatctgccccttatggaaagacaaaatgaggcaaagggccccttgtgttgggggcaggatccctgcactcagagggatatagaagctgaaataactgggttgggagcagtggctcacgcaagtaatctcagtactttgggaggccagggagggtggatcacctaaagtcaagagttcgagaccagcctggccaacatagtgaaacccccgtctctactaaaaaagtgcaaatcttagcccggcatagtggtggacgcctgtaatcccagctacttgggaggctgaggcgggagaatcaccggaacccaaaggtggaggttgctgtgaagcaacatcatgccactgaactccagcctgggtgacagaatgagactccatctcaaaaaaaaaaaaaaaggaaatgaagctaaaataactaaataactgagtagcaccacactacgtgctatggagaaaggattttttttttttttttttttgagatgtagactcgctctgtcatccaggctggagtgcagtggcgcaatcttggctcacagcaacctctgcctcctgggttcaagcgattctcctgcctcagcctcccaagtagctgggattacgggctcgtgccaccatgcccagctaatttttgtatttttaggagagatggagttttgccatgtgggttagcctggtcttgcactcctgaccttaagtgatccacccacctcagcctcccaaagtgctgggattataggcatgagccaccgtgcccggcctggagaaaggactttaaatgacgcaatgtgggaagagcaaggttgtgaagatctgctgccctggctgaggtagctcatgtaatcagtctctctgagcctcagtctcctgatctgtgaaatgggatgatagtcatagctcctacacaagacaagtggcagttcagacgtgagaatgcacaggcaggcccttggcaactggataagctctacacaggtctggaaaggaggaggagacaaaagaggaggggcttccatggctggatagggcgtcttttggcgtgatgtgttctgagttttaaagctggggaagagactcaaatcttcaagagctcttccaactttgagattctctgttggtttcaggactatgggaggaagcgcttgtggtccgtgtctgttcccgggatttctgtttcttggtttgtatctctgctacaggtccaaggagctggggcaataccttgagtctgggttattcgtccccagggacctgggggagccccccccccacccctcccacacccacacccacccccacccccacccccatccccacgccccgcccccgcccccgccccaaggctcaggtaaaggggagagcaaagtgtggagtttgttccctctagtggtcagtattagcactgcatccaggcgggcctgtctcaggcgagcccaggagtcagcaaaagtggaattcagcactgaatcatgcccagaacccccgcaatctattggctgtgctttggccccttttcccaacacacacattctgtctggtgggtggaggggaaacatgcggggaggaggaaaggaataggatagagagtgggatggggtcggtaggggtctcaaggactggctatcctgacatccttctccgcgttcaggttggccaccatggcctgctgccagagggcacccacgtgacccttaaagagaggacaagttgggtggtatctctgctgacattctgtgcacaaccctcacaacgctggtgatggtgggaagggaaagatgacaagtcagggggcatgatcccagcatgtgtgggaggagcttctaaattatccattagcacaagcccgtcagtggccccaggcctaaacatgcagagaaacaggtgaggagaagcagcgagagagaaggggccaggtataaaaagggcccacaagagaccagctcaaggatcccaaggcccaactccccgaaccactcagggtcctgtggacagctcacctagcggcaatggctgcaggtaagcgcccctaaaatccctttgggcacaatgtgtcctgaggggagaggcggcgt

SEQ ID NO: 18742 - DNA, 2300 bp, Homo sapien
tgggcaccaggagacaggaggctcagtcctggccttctctgccttcaccttttcctgctgtgaggtttccacaaggcaccccatgccactgggccattctcacctgagaattgagaaagaacaatctgccccttatggaaagacaaaatcaggcaaagggccccttgtgttgggggcaggatccctgcactcagagggatatagaagctgaaataactgggttgggagcggtggctcatgccagtaatctcagtactttgggaggccagggagggtggatcacctaaagtcaagagctcgagaccagcctggccaacatagtgaaaccccgtctctatttaaaaagtacaaaacttagcccggcatagtggcgggcgcctgtaatcccagctactagggaggctgaggcgggagaatcactggaacccaggaggtggaggttgctgtgaggcaacatcatgccactgcactccagcctcagagacagaatgagactccatcaaaaacaagaaagaaagaaagacaaagagagaaagaaagaaagaaagaaagaaagagagagagagagagagagagagagagagaaagaaagaaagaaagaaagaaagaaagaaagaaagaaagaaagaaagaaagaaagaaggaaagaaagaaaggaaactaaaataactaaataactgagtagcaccacaccacctgctctggagaaaggacttttgttgttgttgttgttgttgttgtcgttgttgtggttgttgaaatggagtctcactctggcgcccaggctggagtgccatggcccaatcttggctcacggcaacctctgagtcctgggttcaagcgattctacctcctcaccctccggagtaactgggattgcaggcttctgccaccacacacagctacttttgtatttttaagagatggagttttgccatgttggctagtctggccttgaactcctgacctcaagtgatccacccacctcagtcttccaaagtgctgggattacaggcatgagccaccatgcccggcctggagaaaggactttaaatgacgcaatgtgggaagagccaggttgtggagatctgctgccctggctgaggtagctcatgcaatcagtctctctgagcctcagtctcctgatctgtgaaatgggatgatactcatacctcctacacaagacaagttgcaggtcagacgtgagaatgcacaggcaggcctttgacaactggataagctctacacaggtctggaaaggaggaagagacaaaagaggacgggcttccatggctggatagggcctctttcggcgtgatgtgttctgagttttaaagctggggaagagactcaaatcttcaagagctcttccaactttgagattctctgttggtttcaggactatgggaggaagcgcttgtggtccgtgtctgttcccgggatttctgtttcttggtttgtatctctgcttcaggtccaaggagctggggcaataccttgagtctgggttattcatccccagggacctgggggagccccaccgcctccgccccaaggttcagggaaaggggagagcaatgtgtggggttggttctctctagtggtcagtgttagcactgcatccagctgactcaggtgggcccaggagtcatcagcaaaagtggaattcaggactcaatggtgctcagaacccccacaatctattggctgtgcttggccccttttcccaacacacacattctgtctggtgggtggaagttaaacacgcggggaggaggaaaggaataggatagagagtggaatggggtcggtaggggtctcaaggactggctatcctgacagccttccccgcgttcaggttgaccaacatggcctgcagccagagggcacccacctgacccttaaagagaggacaagttgggtggagtctgtggctgacactctgtgcacaatccttacaacactggtgatggtgagaagggaaagacgacaagccagggggcatgatcccagcatgtgtgggaggagcttctaaattatccactagcacaagcccgtcagtggccccatgcataaatgtacacagaaacaggtggggtcaagcagggagagagaactggccagggtataaaaagggcccacaagagaccggctctaggatcccaaggcccaactccccgaaccactcagggtcctgtggacagctcacctagtggcaatggctccaggtaagcgcccctaaaatccctttgggcacaacgtgtcctgaggggagaggcagcgccctgtagatgggacgg

SEQ ID NO: 18743 - DNA, 2300 bp, Homo sapien
acaggaggctcagtcctggccttctccgcctcagccttgtcctgctgtgaggtttccacaaggcaccccatgccactgggccattctcacctgggaattgagaaagaacaatctgccccttatggaaagacaaaatgaggcaaagggcccctgtgttgggggcaggatccctgcactcagagggatttagaagctgaaataactgggttgggggcggtgactcacgccagtaatctaagtacttagagaggccagggagggtggatcccctaaagtcaagagttcgagaccagcctggccaacatagtgaaaccccgtctctactaaaaaagtacaaaatttagcctggcgtggtggcgggcgactgtaatcccagctactaaacagggtgaggcaggagaatcacttgaacccaggaggtggaggttgctgtgaggcaacatcatgccactgcactccagcctgggtgacagaatgagactccaactgaaaaaaaagaaagaaagagagagagagagacaaagaggaaggaaagaaagaaagaaagaaagagaaagaaagaaagaaagaaaaggaaaggaggaaggaaagaaaaagaaaaagaaagaaagagaaagaaagaaagaaagaaagaaagaaagaaagaaagaaagaaagaaagaaagaaagaaagaaagaaagaaagaaactaaaataactaaataactgagtaacaccacactacctgttctggagaaaggacttttttcttgttgttgtggttgttgaaatggagtcacactctgtcgcccaggctggagtgcagtggcgcgatcttggctcacagcaacctctgcctcctggattcaagtgattctaccacctcaccctccggagtaactgggattacaggcttgcgccaccacacacagctacttttgtatttctagagagttggtgttttgccatgttggctagtctggccttgaactcctgacctcaagtgatccacccacctcagcctcccaaagtgctgggattacaggcatgagccaccgtgcccggcctggagaaaggactttaaatgacacaaagtgggaagagcaaggctgtggagatctgctgccctggctgaggtagctcatgcaatcagtctctctgagcctcagtctcctgatatgtgaaatgggatgataatcatacctcctacacaagacaagtggcaggtcagacgtgagaatgcacaggcaggcccttcgcaactggataggctctatacaggtgtggaaaggaggaggagaaaaaagaggacgggcttccatggatggatagggcatctttcggcgtgatgtgttttgagttccaaagctggggaagagattcaaatcttcaagagctcttccaactttgagattctctgatggtttcagggctatgggaggaagcgcttgtggtccgtgtctgttcccgggatttcggtttcttggtttgtgtctctgctgcaggtccagggagctggggcaataccttgagagtctgagttcttcgtccccagtgacctgggggagccccccacccaaccccctccctccgccccgccccaaggctcagggaaaggggagatcaaagtgtggggttggttccctctagtggtcagtgttagcactgcatccagctgactcaggtgggcccaggagtcgtcagcagaagtggaattcaggactgaatcatgctcacaacccccacaatctattggctgtgcttggccccttttcccaacacacacattctgtctggtgggtggaggttaaacatgcggggaggaggaaaggaataggatagagagtgggatgtggtcgataggggtctcaaggactggctatcctgacatccttctccgcattcaggttggccaccatggcctgctgccagagggcacccacctgaaccttaaagagaggacaagttgggtggtgtctgtggttgacactctgtgcacaaccctcacaacgctggtgacggtgggaagggaaagatgacaagccaggggacatgatgccagcatgtgtgggaggagcttccaaattatccattagcacaagcccgtcagtggccccatgcataaatgtgcacagaaacaggtgggggcaacagcgagagagaaggggccagggtataaaaagggcccacaagagaccagctccagcatcccaaggcccgactccccgcaccactcagggtcctgtggacagctcacctagcggcaatggctgcaggtaagcgcccctaaaatccctttgggcacaacgtgtcctgagggg

SEQ ID NO: 18744 - DNA, 2300 bp, Homo sapien
tcaccataattctgggtcaacagaaatggagaggtaagaggagacactcccctgccctggctggtcccacgtgttcatggcagtaacctgtctggggagcctcgccacccctgtgtccacctgcagagttatgcagtggtccccaactagggcccctgccaccctcattcctaagggaggctggagacttcttccatggccgaaaatccacatctaagtccccggcactagcaaaaaggccctgtcatgggggctccctgccccagttgagattggaggaacatggaagaagctaaaataactaaataactcagtagcatcacactacctgctctggagaaaaaaaaatttaatattattattttttgttttttgagatggagttctgctctgctgcacaggctggagtgcagtggcgcaatcttggctcacggcaacctctgcctcctgggttcaagtgattctcccgcctcagcctcccgagtagttgggattacaggctcatgccaccacgcccagctaatttttgtacttttagtagagatggagttttgccatgttggctagtctggccttgaactcctgacctcaagtgatccacccacctcaaagccacccaaagtttggggattacaagcgtgagccactgtgtccggcctggagaaaggactttaaatgacgcaatgtaggaagagcaaggttgtggagatctgctgccctggctgaggtagctcatgcaatcagtctctctgagccacagtctcttgatctgtgaaatcggaagaaaataatacctccttcacaagacaagtggcaggtcagatgtgagaatgcacaggcaggccctcggcaactggaaaagctctatacagatctgaaaaggaggaggagaaaaaagaggaggggcttccatggctggacagggcatctttctttttctttttctttttttttttttttttttttttgaggtggagtcttgctctgttgccaaggttggagtgcagcagcacgatctccgctcactgcaagctctgcctcccggattcacgccattctcctgcctcagcctcccgagtagctgggaatacaggcgcccgccactacgcccagctaacttttttgcatttttagtacagagtggatttcacctggttagccaagatggtcttgatctactgacctcgtgatccgcccgcctcggcctcccaaagtgctgggattacaggcatgagccaccgcgcccagcctgatagagcatctttcggcgtgatgtgttctgagttccaaagctgaggaagagactcaaatcttcaagagctcttctaactttgagattctctgatggtttcagggctatgggaggaagagcttgtggtccgtgtctgctcccgggatttctgtttcttggtttgtgtctctgctgcaagtccaaggagctggggcaataccttgagtctgggttcttcgtccccagggacctgggggagccccagcaatgctcagggaaaggggagagcaaagtgtggggttggttctctctagtggtcagtgttggaactgcatccagctgactcaggctgacccaggagtcctcagcagaagtggaattcaggactgaatcgtgctcacaacccccacaatctattggctgtgcttggccccttttcccaacacacacattctgtctggtgggtggaggttaaacatgcggggaggaggaaagggataggatagagaatgggatgtggtcggtagggggtctcaaggactggctatcctgacatccttcgccgcgtgcaggttggccaccatggcctgcggccagagggcacccacgtgacccttaaagagaggacaagttgggtggtatctctggctgacactctgtgcacaaccctcacaacactggtgacggtgggaagggaaagatgacaagccagggggcatgatcccagcatgtgtgggaggagcttctaaattatccattagcacaagcccgtcagtggccccatgcataaatgtacacagaaacaggtggggtcaacagtgggagagaaggggccagggtataaaaagggcccacaagagaccagctcaaggatcccaaggcccaactccccgaaccactcagggtcctgtggacagctcacctagctgcaatggctacaggtaagcgcccctaaaatccctttgggcacaatgtgtcctgaggggagaggcagcgacctgtagatgggacgggggcactaaccctcaggtttggggcttctgaatgtgagtatcgccatgtaagccca

SEQ ID NO: 18745 - DNA, 2300 bp, Homo sapien
caaataaccctgcaggcggtggggcccccgctgcctccgcccctcctgaaaacagatccctgcccggcatgaatgggaatgaagcccaaaggccacatctgcatccttgtccacgggatgtgtgtgtcttccctccctggagtgggagctgcttctcacttgtttttttaaattttttatttcaatattttctggggtacaggtagtttttttggttacctggataagttctttagtggtgatttctgagattttagcgcacctgtcacctgaggatgggtgccaactgccccccaccaacctccgtgccccctacagtccgctgagccctaggaccagctccagagtaggccccacaccacagggtccaggcaacacacctgtgtgagcatgcacatacacacacacacacaccccccacaaacacgtgtgccccaagcctttcccagttataccccccaactttggggagacactagccccaaagttaatgaaggactctgtcgttaggggctcaggaagagtatttcctaaaccatgagactcccagattttgccccactccccccgggtcagtctctctccagccaccctcaccagcatgcgggcccatgggcctcaagctgacctcaggtgatgtttatatttctgagctgtttattccatgaactgaacatctgacagcttttcagagaaatgttttttcatttggaacatctggaaacaagaaagaacatctggggctgcccggaacgggctgttcctcggatgaaaccttaaccctcctgcccctgacttccgtggctcaggtcctggcctgcaccccttgagagtggcccccaccttatcaggtccgaggcctaggccaagatctaaagagggaccacccagaccctctgccttccaaccatggcatgggaggtggttctgcttctccctaaatccagacagacctgccccagcacagactggaaaacggagggttgtgaggagagtgagaggtggacagagggcaccgacgatttagcatctcttcctctcctgggggtcgaggatgagagacaaaaaagaagctgccaggaaacataaaattcagagggctcagctgcagggctgaggtctgcaagcatgctgtgtacacttgtgcatgttgtgccctgcacaagggcatctctgaaggggctgcattggacccaggggcaggggcgcaaaggtgagtttatatcagttcctgagcactgtggctccatccagcactctgaggacaggcaggatacagctggaggacctgagggctcccccacaccagctcctgttccctgcccaagaccccctggacctgcagacaacaattcaacgcactcagagtcccacagttaagaactccctgaagaagcccccagtggctgcgtggtggattttcgcaaagctgtctccacctacatccaccctgtttggcagcccctacatactctttcacagcatgaggaagggaggcctctcaccaagacctggactgaatcttctcccagtggctgccacacttgacctgctcttgctccagaacctctgtggctcccatcctccacagggtcaacttccaacatggctgcctgcactccagccaagaggctctgctctgggcccctccagatgcctgacctgggtctgtggctgccctgtccttcttcagtgctcctcttcccgctgggtgaggaatagttcaggacagaggagctaagttcaggttcattcataggacaggtgcctatttcgctcacggcccaggaatagagacttgccgggctcggcccttcggggagttggcagacggcagaggggaggctggctggcccaggggatgaccaccggtggggtaagcacagacagaggggagcacaggcttcccccagaagactgagaggccccccagaggcatccacagaggaccccagctgtgctgcccaagctgggcgaccgccaaaccttagcggcccagctgacaaaagcctgccctcccccagggtccccggagagctggtgcctcccctgggtcccaatttgcatggcaggaaggggcctggtgaggaagaggcggggaggggacaggctgcagccggtgcagttacacgttttcctccaaggagcctcggacgttgtcacgggtttggggtcggggacagagcggtgaccatggccaggctggcgttgtctcctgtgcccagccactggatggtggcgttgctgctgctgctctcaggtacagaacccacgacgaggcctgtggggtttgctctcat

SEQ ID NO: 18746 - DNA, 2300 bp, Homo sapien
agaggtgtacgctgtgcaaagaaaacaggctgcagagcaggccccagagaagaagcatcttccaggggcagggaaggggcaggtcccagagcagagctggggagagtggccggacgcacaggtgatgtcctgctcccaagaagaaaggcggtgtgcggtgtgggaagctcaggagggccagcggggaagaaaacactggatctgtcccctggggagctctggtgactcaggtgagagtcatttcctcgagtgctggggttgggagccagactatgtgtctgtgggcttttgtggccctacttgggctcgtgtaatgaaaagagtgagcagtatcaggacaggaggatcatcacagcagggactgcagactgggtgggtgcacagcagccctggggtctcttcaaggccatctggctggttggcgccttctgtgtagtgacaagcagcatgtgggggtgtacgtggagtgggtgatggggaggaaggtggcaaggtatatgacagagctgtgagatgcaactgggaaggtctgcatgtggggtggctccaggccgggtgtgcgtgcatgtgcctgtgtgtgcaagtgtgtgcacatgcacgcccacgctcacgacaggggccagtgagcagctgagggcagggttggcaggaataagcagagtcatccccgtggaaacacgactccctgggtgctgtaaggagcagctgggagccaggcacaagggcgtggccagctctgcccagtggctctggcctctccctggccaccctccccacctgttgagcaagcctgagaagcgcccgtgctgaccagggcaggggcgctgctgcaagggtcaaggcccactgggagaggtccaccctcaggtgtggctttgggggtctctaggggtctgtccaggtccctgtggtgcaggggtggctccaggtctgtccatgtgggtctggcagtggctgcctgcagctggtctgcaggggtctcactgcaactgcctgctgatgtggtcattcccccagggccatttgcaataagtgatcccccttcccttccacaggaataggctctggagggctgggcagaaggggagaggggccaggtggggcccagaccacacaatgctcacaggcatcaaaggctccttgtggatgccccttcccccaatccagcttgtgctgggaccaccagccaaaagcagtccccaggagctctagccctgcccccaccattggagttgtccatctccttgtccctgtgaccttccctgtacgtcttctcttccacgttagcacctgcagctctccagatgcaatgttcctctcccagttcaccctgcctgcccagtgggctagagcccccagggctgtgggagggaactgctaggagacccctgccgggcccagggccctttcttcttccctctcccagcccaacaccaagtaccccaaagatcaggaaagaggaatccacacccacccccatctttcttttcccttccctccaggccagggatggcaaacacaggcagaggcaccacggtcttcctccttgcgcccctggcagacatcactaatcaatcacagcaacctttttgcacagagcctggctgccaccttcatggtctccacctacatctccaggtggccaatatcaggatccacgtcggccctcagggtgaagtccctgtgccagtcccactttgatctaaccccccaaccaggcccctcatcctggcctatccagaggtcgcctgagcacagccagctgtggttctctctctgtcccattaggctgaagccacacagttcccggagcttgggcccaggaggcagtcgaaggcactggggtgttgaccccaagtcccaaggccacaaagaatctggttggtttgccgtcggtcctgagggcagccgctgccacttctggggaaagtgtggtgggggggccaggggtgatgctctgtgcccagcacctgtgcagcagcagcaccttgcaggcacatctcccagtcctgatagagtctgcacgcccacctccccggctcggccactgggcaagcaggaggtgaggagtggacggcccgcccagggaggggcggccgcccagcaccccggggctgcgcactgcagctccccaggccacccaccacccttctggtctctgagcccaggatgcgaggatggccagaccatctctgtgcaccctggtgcctctgggccctgagtgcttgcgccccttcacccgggagtcactggcagccatagaacagcgggcggtggaggaggaggcccggctgcagcgg

SEQ ID NO: 18747 - DNA, 2300 bp, Homo sapien
ttggccaggctggtcccgaactcctgacctcaagtgatctgcctgccttggcctcccaaactgctgggattacaggcgtgagccaccgtgcctggacttatgcatatgatttttaaaacaaaaataagatcttactatgcttactgatatttttgactcaactgtcttggacaacttttcacatcaacagagatattctattcccacattatccatggttgaatagtattctattgggaggatgcatccccatcagacatttgtttgttcgtttgttttagaaactgggtctcaccctgtttcccaggctggagtgcagtgacgtgatcgtagctcacagcatccttgaatccctgggcttgagcgatcctcctgcctcagcctcctgagtagctggcactataggcacaagccaccgcacctgaccccctatcagacatttgttacttctaaatgtggttgacataaacaaaggtggacaagaacaatcttcctgaaacatggctggccacagcacttggtatctcccttttgcttgaaacccactgatagctctccattacccacagggccaagcctaaattccaaaccttggcattccaaaccttggcctgtccctggacctctgctctctgcccagctcctcttctacagtcagacagtttgacccaccgggtcatctcaggtcctgtccattcatacacctgggtcttggcttgggctctgtccccagcctgatagcgcccgtcttcccctgctgcttggccccatcaaggactgacttccttggaactccatccctcagcggtcaagtcctctctttttcattatccccggggcgtagtcttatctttctgctctctttccatggatacattttcacttcccaacaatgctgggacaagtgaccatactgcttatgcctccagggttcagatggcacattgcacacgcagacacttccttggtcaaggtttgttgatgatgagcaaaatggcttgttctctttctacctggaatgagaatggagatggagagaggcatctctgtgttctactcactggggggctgtgaccccagtgcctggatctcagcttgttaatggctgttgaagccataagacccatggggacagtaaagtaatgcccacaagcctgctcccctagagacaggtactacggagcaaaggaggaggtgggaatggtctttctggttcttactccaggactggcaggaaggggagctgacatggagagtgggggaagggctactcggggtgctaagcccagcttcctgtctggattttccttgactgctgccgggggcctatcttaggatggtcacagctgcagaaatagatctcccccttcacctgttcttaagcaaggaagaccttgctaacttcctgtcaaaagaacgcgtgctttggtaacttttccagtacgggagacagtactggggacgcgggtgctgaagtcaccacgattttcctcgtctgaggagcagtggctcaccttggccaggaaacagggcaaatagccgcaaggagagaggcgagaagccggccacgtgtttccagccagagtcctcagcctcttccgtgaattcgggcggtgtttccttccttggtctgctccagaaaccactctttcctggcaggaagcccctctctctgtcagagtgacagggaacagaccctttgtcctcctcactcgtctgccctagcccccagcctgctcctgcaaaagtctctgtttctcctgaacttttcagctgagtcaatcgggctctgggaccccgaaaccaagcctccccagtcactcgcttattcactcaacaaacacaccccccttccccgcactaacccaggcccagttctgggaaccagcaaggggaggggaggggagccccgagcagcgcggcgggaggtggacatgccggggaggagactggcctcctggtggcgggggagggctcctggggaccccaagtccgcggaggaggagacaggagggagcagggagatggaagacccaggagcacgggcgggctccgcgcatgcgtgggaagagaccttggcgtcctcggcgtcgccaaggcaaccggcgccagccatggcctctggggcgggcggaagctggggtcgctccccaccgcagagcgcagtcccgacggtgagggctgagcccgggagcagatcctgccttagcttgggagacggcagagtggggagctgtccctggaggggccagatcctggaggggtgggggacgaggagagacagccccaaaccgagagga

SEQ ID NO: 18748 - DNA, 2300 bp, Homo sapien
cctgggtggtgctctagggagctcttacacaacagcacagatccggcccgtccaggaactcattggcgtggggcagggactgatttccccaggagaagagggcctggctgaggttgagggagtgagaaggactgccagccatgggcaccggggagtcgacaagagaggtgcaggaggcggctccggggctgtatccagagcaggaagctggtgcagttcccagggccggggtctgtcctcataggaggctctcggcatcatagtagtctggggaaacaagaacctcatcttgactccctcctgtctcagtggaccccaaagaggtaaagggaaggggacaggccagttgcctgcagcagtgatgttaggaaacccccaaaccccaccagagggcacagggccctcctggcctcctgattcactcccaggcctgggccccgctgcccaccaccccagccctacctgaagccgggggtacatcagcacccacagtccctgtggcactggggggtgggggtgggggcacagctctcctgagatgggggaaagaaaaagacccccatcagaggcccaggggtggcctctggagtttcacccacaagttatctccaccgaccaccagcccctgcacagctcttctgcaacttccagcccagagcagaaccctggcagcacccagcctcacttacacctccctttccctggaggcaggacagtgctgaatcctgggcacgtcctgcaagtagggctgacaagcaggggtggggaagaagggggctggccagggcagcagggcacccggggagggcatcaaatagggcaagtagtggtggtgaaacaccaaaggccctttctcccgcacgtccatctcctcctcctcctcctcaggctcttcctgtggaacctccaggtagacctggggattgtgcaaaacagggaggggaaatgagaatctaccatcaggctctccccaccgccactcctccattcccctaagttatttcctccagataggctttgtaagaatggcttgtggccaggcatggtggctcacgcctgtaatcccagcactgtgggaggccgaggcgggcggatcacaaggtcaggagattgagaccatcctggctaacacggtgaaaccccgtctctactaaaaataccaaaaaaaaaaaaaaaaaaattagctgggcatggtggtgggcgcctgtagtcccagctactcaggaggctgaggcaggagaatggcgtgaacccgggaggcggagcttgcagtgagcagagatcgagctactgcactccagcctgggcggcagagcgagactccatctcaaaagaaaaaaaaggaaaaaaaaaaaaagaatggcttgtgtaggcggggcgcggtggctcatgcctgtaatcccggcactttgggaggctgaggcggacggatcacaaggtcaggagatcgagaccatcctggctaacatagtgaaaccccgtctctactaaaaacacaaaaaagtagccgggtgtggtggcaggcgcctgtggtcccagctactcgggaggctggggcaggagagttgtttgaacccaggaggtggaagttgcagtgtgccgagattgcatcactatactccagcctaggtgacagagagagactccgtctcaaaaaaaagaaaaagaaaagaaaagaaaaaaagaatgggttgtgtttattgagcgtttactacatgcggacaacaaattgtggagacatttactcctgtagctcaaggacgttgagcaacttggccacccagttgattccaggtgtgacccccagagctggggccaggagtccactgagctgtccccggcctcacccccggcccctggacccacctatgtgtcatcactgaggacccaggggtgaggggtggcagtagctcctcagggtctccttctgtctggattccttgaacccctctccgcctcctccgagctgaacaacattctctctccacccagtccctgcttctcctgacctcaggatgcccactattggctgagtaaggctcagccttagagctatatgcacatgcatgcacacacacgcttgcacacacccccacttgcacacacttgcttgcacgcacacacttgcttgcacgcacacacttgccttcacaacccgctcgcacacacgtgcacgcacacccttgcacacgcacgtgaacacacacttgcacacacatatgcatgtacacagccttgcacacacacacgcatgcacacagacacccacttgcacacacatacacacacacactcttgca

SEQ ID NO: 18749 - DNA, 2300 bp, Homo sapien
tgtatgcaggtgggattcccaagcactgtcccttccagaagctgtttggagcactccaggcatggatcaccccaccttcccacagtccctcacagtgaggcaggccccagaaccttcctctggccttctgctatgttgcttttccctcttgagggtctcctgggaaccaggctcctaacaatcctcttcttgcgcctgctcgggcgggcttcaacagtcaccatggcaggctatcattcatggtgacttcattttttctaggtatgtgatcttgaacaagtcatttaaccttgacgtgcctcagttttcccatctgtgagatggagacagtaacagtacctgcctcagagagttaggggattaattggttaatatttatagagtgcttgtgacagtgcccgacttgtagtaagtaaatgtttactattattattattgatgttgttattgttattattattctgactcagtggaggacacagagtctccactacagcaatgtccccatccccacccttctgtcccagcccctggcttgggtttcaggagtgtttcctgctctcaggactttgctggccccacatgaaatcagattccttcaggctgggggtgaaactccaccctgttctccttttctctgctggccccaggccctgcctcttcctccctgcatcattcccaagtccagcaaccccgtccagggacttccctgggtccaggctgacaatggcagcccttgatggttgtgtacagtagtaaccgcctttgccctcagcagtgagggaagggcaggacctcaccctgccctcccaacccggaatggagcttggccaaagtcctgaggattctggggcatccctttggaaaggccccatcaggggttcccctgagaaagcaagaagtcctgctctttccctgcctggttgcaaaagggatcttaggcagaactgagggatgagactgtgtggcgatcccccaggaaggtcctctcgtccattgaaatccctcccttacctgctcactgcttctgcggattcctccctaggaataaagtgaaacacctcaggctccaaccctcccaacccaaggctccctcctggagggagagagaggatggaggacatcaggtaggccaggaaatgaaggccatggtttgggggtgtggctgcagccagactgaccccattctctgtctgtgcctgggttgctggggactattatgggatgcatttcctgaggctctgggcctcaagttggccctgaatcagctgagtcaagatcaagtctaggttgaaaactgagtgagggccaggtgcggtggctcaggcctgtaatcccagcactttgggaggccaaggcaggcagatcacctgaggtcaggagttcaagaccagcctagacaacatggtgaaaccccatctctattaaaaatacaaaattagctgggtgtggtgacgcgatcctgtaatgtcagctactctggaggctgaggcaggagaattgcttgaatctgggaggcagaggttgcagtgaaccaaaaattgtgccacagcactccagcctgggcgacaagagtgagactccatctcaaaaaaaaaaagaaaaagaaaaagaaaagaaaactgagtgggatgtgaaggtttatgcagaattgcaccaggcatttagcaggagaagctcaaattgccctccaggcttccttagaaaagcccaagtcactgtccccttttgctatggtaactgcaagtcctggacaggtcctggcctttggatgcttgtctcccaggcatgactccaacaatgcatcccatgggatttggggttccccagatctggggcttgtaggcctgactctcccctgtgcacacgtctcatacacgcatgcgtgcacccattgcctgccccgccccttgcacagggagtcagcagggaggactgggttatgccctgcttatcagcagcttcccagcttcctctgcctggattcttagaggcctggggtcctagaacgagctggtgcacgtggcttcccaaagatctctcagataatgagaggaaatgcagtcatcagtttgcagaaggctagggattctgggccatagctcagacctgcgcccaccatctccctccaggcagcccttggctggtccctgcgagcccgtggagactgccagagatgtcctctttcggttacaggaccctgactgtggccctcttcaccctgatctgctgtccaggtaagccagtttcctggggttcctgatttggcacatgccagccgagagggtgggggtgccctg

SEQ ID NO: 18750 - DNA, 2300 bp, Homo sapien
tggaatggtgtgtcacagccaaggaagcctcagctctgtgatcttcgcctgcctcacttgggggaccagaaggtagcttgtcctggaactgcctcattcacagaaggccccagtgagtacagaaactgcacatcaaagggaggagtaaggaaaacaggatggcaaatcttcaaaaattaaacaaaattacttttttttttttttgtagcgatggggtctcactttgtcacccaggctggtcttgaagtcctagactcaagcaatcctcccacctcagcctcccaaagtgccggatttacaagtgtgagccaccaagcccagtcagaattaccactaaaaaaaaaaaagaaaaaaggttaagatggtagattttgttgtgtatattttaccattatgatccagcatttccacttctgggtacataccccagagaactgaaagcagagtcttgagcaggtatttgtacaaccctgtttgtagcagcactattcacaatagccaaaggtggaagcaacacaggtgtccatcagtatatgaatgcatgaacagaatgcggcacacacgcacaataggatattgctcagccttcaaaaggaaggcagttctggccaagcgtggtggttcatgcctgtaataccagcactttgggaggctgaggtgggcggatcatttgaggtcaggagttcgagaccagcctggccgacatgatgaaaccccatctctactaaaaatacaaaaattagccagtcggcacgtgcctgtaatcccagctactcaagaggctgaggcaaggccaggcacggtggctcatgcctgtaatcccaacactttgggaggccaaggcgggcggattgcctgagctcaagagtttgagaccagcctaggcaacatggtgaaaccccatctctgctaaaatacaaaagaaattaaccaggcgtggtggcgtgcacctgtagtcccagctactcaggaggctgaggcaggagaattgcttgaactcgggaggcggaggttgcagtgagccgagatcacaccactgcactccagcactccagcctgggcgacagagtgaggctccatctctacaaaacaaacaaacaaacaaacaacaacaacaacaacaaaaacactgaggcaagagaatcgtttgaacctgggaggcagaggttacagtgagccaagatcacaccactgcactccagcctgggcaacagagcgaaactccatctcaaaaaaaaaaaaagaaagaaaagagaaagagagagctccagagatggatggtggtgatggttgcagaacaatgtgaatgtacttagtgccccaaactgtacacttaaacataattaaaatgggcctagcacggtggctcattcccagcatttgggaggctgaggtgggaggattgcttgagctcaagagtttgagaccaggctgggcaacataagcaacactctgtctctacaaaaactacagaaattagccaagcctggtggctgcacacttgtagtcccagtcacttgggaagttgaggagggagggtcacttgagctcaggggtcagaggttgccacgaactgtgattgtgccactgcactccagcctaggtgacaaaagcaagactctgtcttaaaaacaacacaacaaaaaattggctggacgcagtggctcttgcctgtaatcctagcactttaggaggccgaggaaggcagttcacttgaggtcaggagttcgagaccagcctggccaacatggtgaaaccctgtctctactaaaaatacaaaaattagccaggcgtggtggcaggtgcctgtggtcccggttactctgcgggctgaggcacaagaatcacgtgaactcgggaggcagaggttgcagtgagccgagatcacaccactgcactccagcctgggtgactgagactcagtctaaaaaaaaaaaaaaaattgaaatggtaaattctgttgtgtacgttttaccacaattaaaaaaaaaaaaagcggaatgggagtggagctaaatgaggctagtttagggtgggaaccggggcacaggaagcacgtcacttctggtggggagtggggggagggagaagactgaataagccgtgaactgggcagctgtgacacgcgcaccttgtcaccttgtcaccaatttcctgcccgggatcccagagctacccttcttggagcccacaggggtaaggttgagcttctcactttccctccaatgaagcgtggcagcatgggaaggattttggcagtgtcgaggtctgagttttagtccgttcccctctctgggtct

SEQ ID NO: 18751 - DNA, 2300 bp, Homo sapien
ggcctggtcaccacaattagagcttgatgcctcccggctttgcagggagaccaggcttcccaaaccaagtgccttgagctgcctgctctgcagcccacagaggacagtgctgaccccaggaagtgggagaagtggcccctcgtgacctacagggaactgggaagatgctggccccaaaagccttacggtcatgatgtctgcaaaggagggcctcagagacagcgcgagtagcacccccagccatctactggataaacttgcttcagactttttaaattcctgcttaatgtcagtctacaggcctttcaggaagggagaggagggaatcgtacattttgcttgcgtgctgggacagctaggctgagatgcaccaagtacagccttcactggagaccggaattgagaggtgggggatgctgaggagggggaggacggagttcagagggtgtcgtcctgcagtgtgagatttctcattgatcacagatgtgcccagagtagcccaggtcactgttaactagtgtttctgcagaggcagcaggagccatgagcatgaggtgtggcattagggactggtcagctatgcatgctggcaggtggggttgtgtctgcaggtctcagaaatgaagaggctgctctgttctggaggcagccgtggcccagtgccagtggccagaacagtggcctttggtgggtgtgtcccgggccatctcggggtggtgctcaggagcgcctggggcaagaggtaaagagttccctggccttcaaggagagcagcgaagacccagacaggggccagccttcaggaccagagggaggccgccgaatgggaccctcctggtcaccaggagaaagccctgggccagcgagtaggcagtcaaactccttcgtccccaaggccggtggaacaagaggctcgtggtgagtcagggccagggtgggtggccaaggccagggtcaccgtgtgcttcatgggccagcttttttgtttttcttggcaaattttaataactatattttgattatactgtagaatgctatgtcagcataagtaagctaaacttgaagctttcttgtgaagaataaatgcaagatagaatacatcttctattttttgtggtaccaaaaatcaccatcccctcaagagtgttcatgtatagaacattctctaatgctgaagagtaaaacattatagcaacactatgtaaatgtattgaacagtatcaaagaaatagtctctaaattgtttgtaccatatttttttttctaaacttaacataatttttagctttagtttcagtcaaaactttgtcttttctctcccgagagccttagaggttaaaatgcaatcagcctaccgtgtaaggagatgttgtccatgtactttctccagccagttgggggatcattgcagctcaggcctggtgaactcagagattccattcagtattaagaatgggattgttgaattttactcacagagaaatcactgtttcttcatgttgtaagatgttttctgtttgtgtatttgtatcatggttactcatcaaaagctctcattctgcctttgtagaattcagttcccttcctttcatcatagctaaagtgacttttttccctactattaacgtgatcctacatccttaaatctcatcgattacctcacttaggccttggaaccttggcccttggtcggtgtccttggcgtcttctaagcaaggctgtgcgttgttcagaaacgtggccagaccgcatttcctgctgctcccatgccgcatgccaggtggcctgagacagagctccccatacggctgcaaggtgctttacctgtgggctttggcagtaacccaagagaggatcagaaggtggagaaggtgccacgagtgatttaacaggcctgccacagggagtgcccccagcccagctcgttctcagcacaggttttctctttgggagtacccaggtgatttctagtgacccaattttgtgtcatctccctgttttagccccacttgcctagagacaactgtttccgatgccttttctgcttatcatactagtttctaaccacgcagatttctcaaaatcatttattcaatgtattttatttgagcacttagtgtattgagctaggcaggatatagggtgccggagatacagcgatgaacaagacaggcaaaacttctgctttcctaaaacttgtgatgagagagaacaataaaaaagtgttgctgccacaaagaaaccaaagtgtgtggggaagggcgcgtgtttgcggtttacatctcttctgtcccagaatc

SEQ ID NO: 18752 - DNA, 2300 bp, Homo sapien
caaaagagtgaaactctgtctcaaaaaaaaaaaaaaaagaaagaaattcagagaacatgtaacagtgcaattaagccctggggatttggtccaactgagtgtaagataaataatacctaactgtccaggcttcttggaacagattttttttctttctacgatctttaaaactgatttatgagtgaaattgaggtcagcattcccctttgtgtttcatctgctgatgttacagggtcacagtgacattttgaattgtaaaagggctgccagagttccagtacagcaaattttcccctcctagacttactctgtttgagaaaaagcaccagagggggggatgtgaaagtgacatttttcagtcaagcttctcttttaagtcaagtatacagggtctaacagatgctgttgtcagctggcaaactggacaggtaatcactaaagaggtcctcccaagccaggtgtcgtggggcacacctgaagtcccagctactggggaggatctcttgagcccaggagtttgagagcagcctgggcaacaccgtgagacctcatctctaaaaagaaaagataaaaggtcaagaaataaagagctcctcccagtttcagggctgtaggcctccctggaagcccggctatactgctcaggagtgctgggcctctcagtacatctctctgccaatcccaaacctctgtttgcatttagacattcaggtaacacttttcaaaatgtctctactgttttcacagttgccaagattcttcccactcttacagagatgtgttggagtctccagcatgcggtaggacttagtcccttcactgtaatccaggcctagggggttaggaatggggagctctatttgcaggatttgggcttactgtcattttggtctgttttagttggataagattgaccacaatgcacacagactggacatttggccagtcccccactactactttgttgttttgtctaggagtgcttattcttttccttcaaacctgaaaaatcttaggctctcatataagcaagtcaggaaaaattagagaatttcatagccgttttctttttctcctaggataagttagatacctttccctgggctccaaatctcagtttactgtctttccttgcaaaagacgtgtcctccctacccatgtccctctcagtggaggccagtgccagtgaccaaacagctgccgagctctttaactctaattagtactccacaccctcacatagaccttgcaggaggcctcaacccacccactccctccaacgagttgtgacgcagaccatctcaaacttcacatccacacgtgtcacatcaacgcacgtgacacaagtggccgaaatggtttcctccttataatttttggtgagtgacttggccgtggttcattccaagcggaagtgatggctggtggatatgacttgaggggaattcctgagggcaaggaaaaggaagaaaggggccccagagaagacgaggcacagctggagaaccctagggctgtgaacactgcgactgccgcgcggggcagctgcgccgtgtttgctggaagcctccggtagctgctgaaaccttcgctccggaggtcgcctcggtaaaccttgcggatgattccaccacggcggaaagacgaaaaggaggcttctaggcacccgggaccgcccgtgtcccgcccttttccccgatgaagtctgacgcggcaggtccctcggcagggttaatgggacggcctggtggggcattgccggtctttcccagccacagacaagcttcgcgcctcgatcccccagcgcccccagacgctggatgccgaggcctggtcctttacagccgccgacgcctcatgagcgaagccagccagatgccagcaccgccttcggccccgccccgagccagcccctcccacatccccgcccggggcacgccctcggcccgcccccatctccgccccgaacacgcccctagattggccccgccccgtccccgcccgcaactccgccccgaccggaagaagccgcggcacccagcgcttatagggccgggaatgggggtgccgccgctgcctagtcagttctgcgtccgctgaggctcggtcaccgcctcgctgtcgtcgcggcgcccccgccccgtcctctgtccgtaccgcccccggagccagggccgagtcctcgccatgccggcccggcggctgctgctgctgctgacgctgctgctgcccggcctcggggtgagtgaccggggagcgtggggtggaggacagctcgcgacggccgggtcggggccggg

SEQ ID NO: 18753 - DNA, 2300 bp, Homo sapien
gggaagtgaaaataagattttctcccacctccccatagtcagatcctgctgtacttctttgttgaatctgatgtatatatgtttcttacactggtggaaaagaggccttatctttacactaagaccatgacctttgctttattcagtggatgttatttaatgtgacttgcagaaaggtcatttactgcccatttgcaggtcttttatatggtcaggtccacttcaaaggcaccctacaaaatattccatttctgtttgtgtttatcagtgctatcagcttttactttatcataagcaaaaagctgcctaaagaagtacttgactgtagagcaagattatgggcaatgccaccataaataaaaccagtgcttatctgtctggattgccaatcaagtgaagaagtgcatgaagcatgtggacgatgcataagaaattcagagaatggggccgggcacagtggctcacgcctgtaatcccagcactttaggaggcggaggtgggcagatcacgaggtcaggagttcgagaccagcctggccaacatggtgaaaccccgtctctataaaaatacaaaaattagccaggcgtggtggcaggcacctgtaatcccagctactcgggagtctcaggcaggagaatcgcttgaaaccgaaaaggcagaggttgcagtgagccacgatcgtgccactgcactctagcctgggcaaaagagtgaaactctgtctcaaaaaaaaaaaaaaaagaaagaaattcagagaacatgtaacagtgcaattaagccctggggatttggtccaactgagtgtaagataaataatacctaactgtccaggcttcttggaacagattttttttctttctacgatctttaaaactgatttatgagtgaaattgaggtcagcattcccctttgtgtttcatctgctgatgttacagggtcacagtgacattttgaattgtaaaagggctgccagagttccagtacagcaaattttcccctcctagacttactctgtttgagaaaaagcaccagagggggggatgtgaaagtgacatttttcagtcaagcttctcttttaagtcaagtatacagggtctaacagatgctgttgtcagctggcaaactggacaggtaatcactaaagaggtcctcccaagccaggtgtcgtggggcacacctgaagtcccagctactggggaggatctcttgagcccaggagtttgagagcagcctgggcaacaccgtgagacctcatctctaaaaagaaaagataaaaggtcaagaaataaagagctcctcccagtttcagggctgtaggcctccctggaagcccggctatactgctcaggagtgctgggcctctcagtacatctctctgccaatcccaaacctctgtttgcatttagacattcaggtaacacttttcaaaatgtctctactgttttcacagttgccaagattcttcccactcttacagagatgtgttggagtctccagcatgcggtaggacttagtcccttcactgtaatccaggcctagggggttaggaatggggagctctatttgcaggatttgggcttactgtcattttggtctgttttagttggataagattgaccacaatgcacacagactggacatttggccagtcccccactactactttgttgttttgtctaggagtgcttattcttttccttcaaacctgaaaaatcttaggctctcatataagcaagtcaggaaaaattagagaatttcatagccgttttctttttctcctaggataagttagatacctttccctgggctccaaatctcagtttactgtctttccttgcaaaagacgtgtcctccctacccatgtccctctcagtggaggccagtgccagtgaccaaacagctgccgagctctttaactctaattagtactccacaccctcacatagaccttgcaggaggcctcaacccacccactccctccaacgagttgtgacgcagaccatctcaaacttcacatccacacgtgtcacatcaacgcacgtgacacaagtggccgaaatggtttcctccttataatttttggtgagtgacttggccgtggttcattccaagcggaagtgatggctggtggatatgacttgaggggaattcctgagggcaaggaaaaggaagaaaggggccccagagaagacgaggcacagctggagaaccctagggctgtgaacactgcgactgccgcgcggggcagctgcgccgtgtttgctggaagcctccggtagctgctgaaaccttcgctccgg

SEQ ID NO: 18754 - DNA, 2300 bp, Homo sapien
gtagtaggaaggtttattgtgaagagcaaaagtacaaagcttccacactgtgtaagggcacccaagcaggttgccgctgctgctggctagggtggccagcttttattcccttattgtcccttcccatgttctgtttttgtcctatcacaatgcccttttttcaatcctctctgcgattggctacttttaggatcctgctgattggtgcattttacagagtgctgattggtacattttacagagcgctgattggtgcgttttatagggcactgattggtgcattttacaatccttttgctagctacagagtgctgattggtacatttttacagagtgctgattggtgcattttacaatcctcttgtaagaaaatttctccaagtccccactccacccaggaagtctagctggcctcacctctcagcaagactggcagacgggtgggactgagcagtgtgctggctcaggcacagctcagtgactggtgaacaccaagcttcagaatgagtgcacggagctatgtgctgtagaccttgggagtactcacaaacaattggatctgcagattcaaatccatacacaccaagcaacaacgtgtgcaccacagcactgacccaggcacacagcttcaatgtgggcacagtcacagctgctcagaatggatagcactggcacgaatgcacaagcacaaagcgtggaggtgatgagagtgtctggtgtgtgttatagctgcagccagcccatgagggcagaacagatgcacttatagtagccatagagggaggggaaagggggaataattcacagattctgcatttctaaatcttttcatctttgctttccaaagctcattgtttctgcaaggctacagtctaattagagacctcagcacaggaaaatgtctgccatatcagggggccagctccccttcccccacccccaccgccacacacaggacagagcagatagaggatgggagaacaggactgtgtgtcaggcgctgcactcatttctaaaatggaagtaaagttcctgtctttccagggtattgtgagacatgagtggacctgagacaggaatgtgcccatagggctggcatgtggtcagtggacagctgctacattactgagctctcagcccgtgcctgcaccaaccacataaaccttacaacaccgtctgtgggtgctgctgtttacccttctttatctccatccctgaccccctccaggccagagtgcacagtctaatgattagccaaggaaatcggagacttgggtttactttctcccccacctcacacattggccacagcagatgcttcagatggattgtatcaaatggaagtaaggatcagggtatttcgctgggccgagattggtgagaacagctgtagatgtttcatggaagccctgagagcagctctctctaatccagatctgtgattcatcgtcttgcctgttcattacattaccaggggagcatctgaaactcctgatgcccactgaaatcagtgactctgggggtaggatccaggcatcagtatttttaagcatcccgggaatattttgacctcacagggttcaggctgaacttgagtcctggccattggggaactgtggcgtctgcccggatgagcaccagcttgacaattacacgtccaagccttagcttgaagaaagatgggcaggcattttatcagatgtgtcactgatgcataatgttgataccaagctaatttggacgcagagcagtttggctaagctaatagtatgaaatattagctggtttacaggaagactggtagaaaaagaaaacagacaaagagaaggttttagctgtgatggcagctttcgtttctcccctttcctagtcaccaatacaatgtgggacttgtaatttatagggaaggagtatgactcgtgtggtctcctgtttctataaggagggaccttcagtgactttataaaaataagcacctgtcttattctccagttgctttctagctaattttggtcccttttcttttgccagttgccagaggttccaccctctgaggaggaagaacaggaagcctgggtgaatgccttgcttggaagaatattttgggacttcttaggagagaaatactggtctgatctggtgtctaagaagatccaaatgaaactcagcaaaataaaggtatcactttccacacaagaggcttctaatcctctatacttcttcatttctggaaattttgtacccttatgtcctaagtgaaaaataatttggtttaaacgtataacatatgagggtagtaa

SEQ ID NO: 18755 - DNA, 2300 bp, Homo sapien
aattttacccatttaagttactatgtatctttgaattttgatatattattgattatatttacgatgtatttaatgcctaattctcaatcatctgctttactgcatggtttcaatgaggtacatattgtagtgcaacagaagtggagaggtagttctctgagtcctgtgataacatgaattaatacctgaaatttcaaagattccaactgggctgggaagagcatgtgtttagctaattaagaaggccagactgggtgggattaatcaccccaaaggaggtcaggcagagaggcttgctcagtcacatgaacaaatcttctgagtttcctgatgtgcttataagctttaaaaaaagaaagaaccttttatttaggataatgaacattgccatttttcctccaaatccagatttttggttatcaaaaacctcctcagttccagttatcctcccagctaagcacttctctttgcaacctgtagtcattggtgagctgatatctgtgtcgtgatcaagtttggtttcagtgtcccaaataccacagtgttcatcatttcacactaaatcagatttgcgattattctgatattactaatggaagtttttcttcatcagggatggatgaatgagatttacaactatgatccagaaacctaccatgcgactttgacacattcagtctttgttcgacttgagggtggaaccttaagactttcaaagcccaataaaaatatatccaggagggccagctacaatgaacccaagccagaggtcacctacatcagccagaaaatctatgacctctcagacagcaaggtgagcctgagcaattttggaaggatagcttagatgaatgaaaagcatatggcatcttggatgcttaactgcatttttttataccctaaaaaggtttgtggtcgttgaacagtataccttaggggacagtacctctcacactttaaagtttatgcacatcacctgggcatcttgttaaatgcagattctgattcagtagctgtgggcagggcctcgggcctgcatttttatgagctcccagatgatactcaggctgctggtccacagaccacaacttgaggaacaagtgttgtgcactcagaattctgcctttaaaagctaattatttcagtcaaacaaaaagctgtgtggctatgtgtggtgattctgcggtacttaactattgaagtctttgtacatgtgcaaatgatagatatgcaaaataactacattttgattaagtattatatacttctatttttgtgagaaatgtaaattatgtattccacaaagctattgtttctctgttcttacagttcatctgaatgatctttagatttctccaatgtgagagaagtacttaaaatagtttttatataagtttattcttaacttgagtttgatactcaaggttgactttagcttcccatctagattttagctatctttttttttcttccaacttaagtttggtccaaggtcattaaattcagttgatagccaaacatagttgatgataagcagctaaacattattattgtgctactgccacctgaaaattacggatatttataactctcgcaaaattattaaatgcctactttgtggaatgattttgaagaataacaagacacttctgaaaattccagtttctgtagtcatgttatgaacaagtgttgaaagttatttcatattcatcattttagtcaaaaagtctataaggtttgcactttgtgctatgcataatattaatgcatagtgtagccaatctttaatatataaatcatcatttttctttctctgtagatttatcttgtacctaaaactttggctcgaaagcgaatctggaataaaaagtaccccatttgtatcgagcttggtcagcaagatgactttatgtctaaagctcagactgataaggagacttcagaagagaagccgccagctgagggaagtgaggaccctaagaagccaccccgccctcaggagggaacaagatctagccagcgagatcagatactctatctctttgggagaactggccgagaaaaagaggaatggtttaggagatttattctggcatctaagctaaagtcggaaatcaagaagtcatcgggtgtctctggaggtaaaccaggtaatgatgtttgtgctaaatgcttatgcatttttaaagggccactagggagaatagagaaagaatgccaggtaggaaggaaggaaggaaggaagcccaccctgaactgatggttgtctgccacctaatgtgcattctcatgactcattt

SEQ ID NO: 18756 - DNA, 2300 bp, Homo sapien
aggattgctgtgaaaattgcagtgaacgcaatacccctcctgggttagcttgttacagctacaagactcctagtgaaatttttgttccaagatcctcaaactcaacaggatgctacattttatcctgttgggcttctcaagcaatgctggtaacatctattgttcaggtattttaaggcttaagatagaaaattgttggtagaaattaaccagttaaaagggaggaaatgattactcaggtgttgtgaagtaagacagattgtatggcatttataacattggttatgtagtttgctcataaaagagaatgcctaactggaatttagtgaaaattaaaccattaaacccaatgaagtgaaaaacggtggacatctgccaagtaaaagcataatcaccacttaaacagcttcatctgtgctcctatctgcgaatgacagcgtctcctgtggagaaactgctctctgacttctggttttctcactgttttcacagagcctgagcccttgtgaagccggcaatgacaagtctgtatggtcgccatgccgagaaaaccactgacatgccaaaaccatcagcccctaaagtgcacgtgcagaggtccgtgtcccgagataccatcgccattcacttctcggcatccggcgaggaggaggaggaagaggaggaggagttcagggagtactttgaggaggggctggatgaccaaagcattgtaacagggctggaagccaaggaagacctctatcttgaaccccaagttggccatgaccccgccggccctgctgcctcgcctgtcctggcagatggactgtccgtgtcccaggcccctgccattttgcccgtctccaagaacactgtaaagctgttggagtcccctgttccagcagcacaagtattaagtacagtgccattggctgtgtccccagggtcgtcttcgtcggggcccttagctagctctcccagtgtgtcatccctttctgagcagaaaaccagttcttcctccccattgtcctctccttctaagtctcccatcctctcatccagtgcctcaacctccaccctttccagtgcaaaacccttcatgagccttgtgaagtccctgtcgaccgaggtggagccaaaagaatccccacaccccgcaaggcacaggcacttgatgaagacattagtcaagtctctgtccacggacacttcccggcaggagtcggatacagtgtcctataagccacctgattccaaactgaacttacacctgttcaagcagttcacacagccccgaaacacaggtggagattccaaaactgcaccttcttccccactgacttctccctctgatactcgttccttttttaaagtgcccgaaatggaggctaaaattgaagatactaaacgacgcctttcagaagtcatctatgagccttttcagctccttagtaaaattataggggaagaaagtggcagccataggcccaaagccttatcttcaagtgcttcagaactctccaatctgtccagcttgaatgggcacttggaaagcaataacaactacagcatcaaggaggaggagtgtgattctgagggggatggctacggaagtgattccaacatccccagaagtgaccacccaaagtccactggtgagcccacaagagagatagaactgaaaagttcccaggggagcagtctgaaggatttaggcctgaagacaagttctctagttctggagaaatgttctttgtctgccttagtgagcaaagaagatgaagagttttgtgaactgtacactgaggacttcgatttggaaacggagggggagagtaaagttgataagctctcagatattcctctcaagccagaggtgctcgcggaagatggtgtggtccttgacagtgaggacgaggtggactcggccgtgcagcacccggaattgccagtgaagacgttgggcttctttataatgtgtgtctatgtgtacctcatcctccccctcccccactatgtgagtggactctttctgggaattggccttggattcatgactgcagtttgcgtgatttggttttttacaccaccaagtgctcataaatatcacaagttacacaaaaatctgcgacactggaacacaagatctctggatatcaaagaacctgaaatactgaaggtaagcctctccccgggagctggctagtacacacacttctcacatacagccgtattttagatctgacttgttttttggttagctgttaaagatttttgcacaggccgtgttttttaagagcttggggccacttcattct

SEQ ID NO: 18757 - DNA, 2300 bp, Homo sapien
tgtggatctacctccattttacagaccaagatactgagacatcgagaggccctggcttgttcaaagtcccacagagtcagctgtagaaagacaagtactagaagccctatgtcctgggcccaagctgggtgctctttccactgccccacgatgccccttttgtctcaatggcctcccactgctccccacactcaccctctgtcctggaaacagaatagagccaggtggctgcacacaccatgcccattgccatctttatgcccttgtcccttccctctgcctaatcatgctcatcccactacaactcacccatcagttccaaagacccgttggatgtcccacctcccacactggtgtcatcctcctcagaacttctgaagcgtgccctgtgtcttggctctttttacatggtctctgtccaggtgtggtcttaatttttacatagtagggctagtgcccagtaaatgggccatgagtgaataaagagagatgactgtaccatgtcacaaggtgggcgtggcatcttgttttgctgcccagcttttcaggcttctgacttcgttccagctaagctccagaaagaagcaatcagctattaagctccagaagggcagaaagcatagcttccacatctctcaccacagtccttggtagagttcttggttggtggtgggttacagcagtgatacttcattttcctgacacatgaatcttgcattcagtttaaaatatgtttgctttatcctgatgcctcagaacgtggccatgtcctcatggctgcctcatgtcttcatggctgcctaaatactctggtcttatggtacctaccatttgaggaggccaacagaccatggcaattagtttacagatttccacatttggatactttgctacttacttgcaatagcaggaagttgggagatgcaggccaaataattgttaggattgctgtgaaaattgcagtgaacgcaatacccctcctgggttagcttgttacagctacaagactcctagtgaaatttttgttccaagatcctcaaactcaacaggatgctacattttatcctgttgggcttctcaagcaatgctggtaacatctattgttcaggtattttaaggcttaagatagaaaattgttggtagaaattaaccagttaaaagggaggaaatgattactcaggtgttgtgaagtaagacagattgtatggcatttataacattggttatgtagtttgctcataaaagagaatgcctaactggaatttagtgaaaattaaaccattaaacccaatgaagtgaaaaacggtggacatctgccaagtaaaagcataatcaccacttaaacagcttcatctgtgctcctatctgcgaatgacagcgtctcctgtggagaaactgctctctgacttctggttttctcactgttttcacagagcctgagcccttgtgaagccggcaatgacaagtctgtatggtcgccatgccgagaaaaccactgacatgccaaaaccatcagcccctaaagtgcacgtgcagaggtccgtgtcccgagataccatcgccattcacttctcggcatccggcgaggaggaggaggaagaggaggaggagttcagggagtactttgaggaggggctggatgaccaaagcattgtaacagggctggaagccaaggaagacctctatcttgaaccccaagttggccatgaccccgccggccctgctgcctcgcctgtcctggcagatggactgtccgtgtcccaggcccctgccattttgcccgtctccaagaacactgtaaagctgttggagtcccctgttccagcagcacaagtattaagtacagtgccattggctgtgtccccagggtcgtcttcgtcggggcccttagctagctctcccagtgtgtcatccctttctgagcagaaaaccagttcttcctccccattgtcctctccttctaagtctcccatcctctcatccagtgcctcaacctccaccctttccagtgcaaaacccttcatgagccttgtgaagtccctgtcgaccgaggtggagccaaaagaatccccacaccccgcaaggcacaggcacttgatgaagacattagtcaagtctctgtccacggacacttcccggcaggagtcggatacagtgtcctataagccacctgattccaaactgaacttacacctgttcaagcagttcacacagccccgaaacacaggtggagattccaaaactgcaccttcttccccactgacttctccctctgatactcgttccttttttaaagtgcc

SEQ ID NO: 18758 - DNA, 2300 bp, Homo sapien
cagggaccattttcagcatttgaaaaggcttaacagaaactatgcttttacccaggatgaacatacaaaagctacccaaaccatcaagtttccttgcttttgtttggaattgcaaccctgtatggaaggtttcatgctgactccacgttctgattggctgtggatgacataataggagtttctgacacaggattggtctaactgtagatattgttactggagctggtaccaggtctcacttcccactacctttagaatgaggttgaccttgaatgtgagtgcccttgactatggaaatgaagccactgattgtttcttgcttgctcagctatgcttattatcacacctgtggcagtgacttgatttttataatgtcattatgaaccccttataaatatggattgttgattaaaatttggatcagtattgaaatggaagaataatacacagaattaatcagtttactggtaaacaatgtaagaatattgaaaaacatgtggccaacatggggaggggacagaaaaaaaagaggttgatgaaactacagatcttatccacagctctcatttaaaaaagatcctttttcatcagcttttcactgaaatcaaacaccaataactctttcaccacgaaacaccaactattaatacttagtctctataagcctcctaggatcctgttgtgttcatttacctaggtgatgtacatcatcctaaattctgccttttcattttgtattacgatgtatatgtacagtacatatttttacattgtcattgtgtcattcttaatggtcacagctgcctgaactaaacctaaagtcagacagtcaggacagtccagtgctggtgattagagaaggctggaaacaagctgtctgatcccggataacatgccggtgagtccacaggctgagtcggcacggataaaaagatgtgctcacacctgctgtggatgctgattatagtagcttacatatgttaagtgttatttcttaattctcccagcagcccctatgagataggcactattatctgcattatatgtaaggaaaaagaggccttttgccgtaacttgtccagggtgacacactgataagaggtggaactggaatccaaagctgggtctgtttaatttcagagtttgagttcttaaccaggttttctgtgcaattgtgttgcaccccaggacctattcagttctcacctcccttcagaatctaaccaccttccaccttaataatgacaaacacatctattaatatgcattaaagtgacagaagcttaatactgaaacaagatagagtggatgttgctggcgaacaggaaccccagagacggtcctgtccacatgaggctgtgttagttttcctagagcagagtggtgtgaagggccagcctgcattcagtctctcctttggttccgtcctttagtcagcctcagagtttttcagacttgaatgggcacaacagtgaccacacagggttgcctgaagcacatatatggtacttggtgggagactcaagattcttagtgaggctgagaagtggtgcttgggtgatgtttgtacagagtaagaactaatgaagcactgggatagagagccccatgaagttcaaccccatcacagcctgagcaggagcagcctcacagtcaccttctgtactgtttggcagtaggtgggggaaagataggggctgctgaggaggccaagttgatgcctgtcctctggtgcctgagcacatgcaggtgcggctgatctgcagctcattctcataggttggaaactctccacctaatggccagcacacataagggatgtttctacagctgggctgagcaagacaagtctggaaagtctagaagtatttgttaatgggagatgagctgtttcagtactatttgaaaaatattttgacttaattgccttaggcacattagtcagctgatgtgcactctggtttgctttccttgactttaacagttgccaagaatttctcttgttacaaaagagaaaagtaggactctaagtatgttctgttccatggaaattgagtcatagactcttagaatttagagccttctggaaaattccttgaagacaatggaggaagcttccctcagtttacagcagaaccccaggctcagggaggtgaagtggggagctccgtcactgtcatttgagggccatttgagggctgtggtcctccgtggagctcctccctctgctgcctcatggcctcactcggtctgtgttttcaatgactgatttactactaactgaacaattgtctgaatcc

SEQ ID NO: 18759 - DNA, 2300 bp, Homo sapien
tgcctttgttgcacatttccagaaaaccacaactggaaacctcttctgttgggacatgaattctttttcctttgggaagggcaacagaagcaagtggtgatcccaggcagtaatgcctgcagcccagagactgcattctcatgaggctgatcaatccttgtgcagagttgtccctggcaacacaacatccatcagaaatcacagcacaaacagggttattgtgtggaggccattccaagagcctgagatctgtgtgggaggcagctgacctgcaagatctagtgggcgagggctgacctccaagtctgaggacaatgacttctgggtcaggcaggtgtctgggatactaggaaggggagaggaatgttgccaggagggtaggcagggcttgctggcattggaatgaggcaccagagtagcagggcattcttctgggatcatgactgggcctggtggtgagccggagtgtgtctgccattaagatatttatgcactgtctcacgggtcagagaactagcctggcttccctctgcttgaggcatcaaatcttcttcctgcttgaggatttcaatctttcagatgttgtttcatctgggtccagtgcccttctacactcagttcttggcatgacttattctgttatgagtgtcttagtaggtgacctcctcccttactagcaagtctcccaaccatattactaattctgaggatgaaaggagtttggctttcattttgccaattgaatttgaatttcatgactatgatagactcaaaacacgcacctgagtgtggtccttgtaccacttgcattagaatcacctggagggaggggtgtcgaaggccatctcagacttactgaattacaggttctggggtgggacttagagatcttcatgttaaaaccctccaggatgatctgacgttgaagatctgacatttgggacccactaatgcaggagacacactgacacatctgtttgttgtcttggtcctttcttgtggtgggtgggaagtgcagaggggcaaggactacgggggaagggggaactctccctatgtgccagtgcttctgccagccaacccaggttcgcagaagataaatgcacaatgggcattgccatcccaggaagctcattctaagtgagaatttacctcgagaagtcactttacctctctgagcctcagatattgcctctctaaaaatgagtagttaatactatataagttctaagctctaagaactcgtggccaggcgcggtggctcacgcctgtaatcccagtactttgggaggctgggtccggcggatcacgaggtcaagagaccgagaccatcctggccaacatggtgaaaccccgtctctactaaaaatacaaaaattagctgggcatggtggcacgcgcctgtaatcccagctactcggaaggctgaggcaggagaatcgctttaacccaggaggcggaggttgcagtgagcccagatgacggcactgcactccagcctggcgacagagcgagactccgtctcaaacaaaaaaactagtaacagagttagttcaggataggatgtggtagtgtggtagtcaggtgggggaagtacataatgcgggaaactgggaatttgcctttttaaatcaatgtctgcagttggatggggatagatacgtctgatggccctctaaaatgcaaatcgagtgaatttgcccagggggatacccctggttctccgcgcctcagtcaccccacctcaacccccagccctcgtctcaagggcacttgttgctgctagactgcaggaagaggaaattaagaagtgcaaagagctggggacagtgtgcagccccgttgggagagtgaagcttttgtccccctcacctggggctcttccaggtaaccctccccaccactcctctccctagctccaagggcggtggcccctttaacagacctgacaaatcgctcccccatttccgcggcctcacctcggcgcgcggtagaactggattggttgggcctggcgtgccgtttgctccgcccccgcgccctctggttggcggcggcggccgcgggcgcggggcgggtccgccggcggggcggggcggcgtgtgcccgggggcgggcgggcggcagggcagcaggaccgcggccggtgccccagccgaagccggagtcgcgcggccgggagcacgggcgccggcatagtacaatgaggcagccagcggatcttgggtgagcagtctcagggccaggcgggggcggtggagggagcgccccgcggataaggcccgggctgggcgcggatc

SEQ ID NO: 18760 - DNA, 2300 bp, Homo sapien
tgagaaccacacctaaccaaaattactttccctgtttgcctcagtgacacagctgcaggaaccctggtgggtgttgtattaagtaaatttgacctttattctttgcagatctgtgaaatgttgtcttctgaggggccacgtgtatctgtagtgctgaggactccttgggcctctgaagtcacagagagaaccctgcagggtgggggaccagtgtgtgacagccctgctttgcattttctttgagaagtgctgtcattttgcatttctctccaccagggcaatcttcaatcttgagaggtgtgatcataacttgccttgtttcttgtcgctacagagaacggaaggctcccttgatggaacttagacagcaaggccagatgcacatccctggaaggacatccatgttccgagaagaacagataatccctgtatttcaagacctctgtgcacttatttatgaacctgccctgctcccacagaacacagcaattcctcaggctaagctgccggttcttaaatccatcctgctaagttaatgttgggtagaaagagatacagaggggctgttgaatttcccacataccctccttccaccaagttggaacatccttggaaattggaagagcacaagaggagatccagggcaaggccattgggatattctgaaacttgaatattttgttttgtgcagagataaagaccttttccatgcaccctcatacacagaaaccaattttcttttttatactcaatcatttctagcgcatggcctggttagaggctggttttttctcttttcctttggtccttcaaaggcttgtagttttggctagtccttgttctttggaaatacacagtgctgaccagacagcctccccctgtcccctctatgacctcgccctccacaaatgggaaaaccagactacttgggagcaccgcctgtgaaataccaacctgaagacaccgttcattcaggcaacgcacaaaacagaaaatgaaggtggaacaagcacagatgttcttcaactgtttttgtctacactctttctcttttcctctaccatgctgaaggctgaaagacaggaagatggtgccatcagcaaatattattcttaattgaaaacttgaaatgtgtatgtttcttactaatttttaaaaatgtattccttgccagggcaggcaaggtggctcacgcctgtaatcccagcacttcaggaggctgaggtgggcggatcacctgaggtcaggagtttgagaccagcctgatgaaaccctgtctctactaaaaatacaagaattagccgggcgtggtggcgcatgcctgtagtatcagctactcaagaggctgaggtgagattatcgcttgaacccaggaaacggaggttgtagtgagcggagatcgcgccactgcactccagcctgagtgacagagtgagaatccatctcaaaaaaaacaaaaaacaaaattgcttgctaaagaagtggtctcctgaggtcttaagacattcctgacagtgtcttgagtgggtgggagagaggctgctgtcattgcgctgtggaatttcacagatgagaaccacgcctagccaaaatcacttttcctgtttgcctcagtgacacagctgcagggaccctcgtggatgttgtattaaataaatttgacctttgctctttgcagatctgtgaaatgttgtcttctgaggggccacatgcatctatagtgctgaggactccttgggcctctgaagtcacagagagaaccgagcaggtctatgtttttgttttgttgttttgagacggagattcgctcttgttgcccgggctggactgcagcggcgcaacctctgctcactgcaacctccgcctcctgggttcaagcagttctcctgtctcagcctcccgagtagctgggattacaggcacatgtcaccacgcctggctaatttttgtatttttagtagagatggggtttcaccacgttggccaggctgatctcgaatgcctgacctttggtgatctgcccgccttgtcctcatgtgtgctccacaggcctttgggttgggattgcaggcgtgagccaccatgcccagcctagactcttttgacaatatgatgaaagctgttggttcctttccccaacacacacacaccgagttgtatcacgaaaatgtcatacaatttccaggttttctgagtggtgggctcagattgaggtcaaaggatcagacgacctctaacgaccttcatgtctctgttgatgatctggggacagccagatcccctgtgtccagggagttcct

SEQ ID NO: 18761 - DNA, 2300 bp, Homo sapien
tttaggggtgcatgctggggaggggcctctcatagggctgcgtatgtcacccacaccaaaagctgaggagagcttcctagttctgttaccagatggtgccgcgcagctccaggctgttggtgccatgaacaaagaattggacatgacacacgtacaaatagcgaagcagcaaatgattaagcacagcgacactctcggagaggggtgagtgggctgacctgtgagtggttatcagtgccggtttgttacatttcacggccttttacatgtttttcctcacttgcttaatgtcacttgcctttctcttatagtgccttcaccctactttatttcttgtaagatagttgttcaaccttgtttacccccactttacctcttctgaccaaattgcccatctttacttttattttttgcgaccaaatagctactggaagtccttccaacttacttctcttaccatgtcccaacttactgcttactcccttatctattatattactttttgtggcaatatttgattgatgttttaaattacagactataaagaaacaccataaaatattaagacagtctgagagattttgatgtgttattaatatccacatggtttgcttcttttccaaagcatcccataacgtttgactctatgactgtaacaagttagatttttagaaactgatgcaaaggatcagattctagtagtttctttctctttttttttttttttgagatggagtttcacttctgtcgcctaggctagagtgcagtggtgccatctcggctcactgcaacctccgccttctgagttcttctgcctcagcctcctaagtagctgggattacaggtgccggccttcatgcccggctaaggctaatttttgtatttttagtagagacgggtttctccctgttggccaggttggtcttcaactcctgacctcaagtcatcctcccgccttggcctcccaaagtgctgggattacaggcatgagccatcgcgctctgccagattctagtattttctaccatcaaaatatctattacccaatgaaaagtctaaaggccaatcttttttttttttttgagacaaagtcttgctctgtcaccccaggctggagtgcagtggttcgatctcggctcactgcaacctccgcctcccgggttcaagcgattctactgcctcagcctcttgggtagctgggattataggcgtgtgccaccgtgcctggctaatttttgtatttttattggagacagggtttcaccatgttggccaggctggtctgaaactcctgacctcaggcaatcctcctacctcagcctctcaaagtgctgggattaccggcatgagccacgactcccggccccaaaggtcaatcttaaagctacaaggtatcttttaaaaggagtaggaataacgtattttgaggcttaaaggagtaggaatagtgtatttttagatttgaagccatcttctaaagggtacgatatttggttaacatgtcactccttatcgccatggaagaagttaattctattctttttttttttttttttgagatggagtctcactctgttgcccaggctggagtacaatggtgtgatctcagctcactgcaacctctgcctcctgggttcaagcaattctcctgcctcagcctcctgagtagctgggattacaggggttctccaccatgcctggctaatttttgtatttttttttttagtagaggtggagtttcaccatgttggtcaggctggtctcaaacccctaacctcatgatccgcccgccttggcctcccaaagtgctgggattacaggcgtgagccaccacgcccagccgttaattctattcttactgcttactcccttattttgtatgttcttcttctatcttacatcttttgcttttgctattgcttaagctagcctacgcccaagggtgctctttgccccctacttcctctgctattctctcgcctcagttccgctgcattccaagctcagcctgccccagcagcaggtctctttgacaaacctgcaattttggggaaaagtcagcccaagaaaggcagggggcccagacttatgctgtgtggcaaaagccctctttgatgggggaaggggaggactggaaaagcagagagatctttctggatgtcctgggagagcagccctttgggtggtgggtggaggctggaggcagggaggaatcccctcacagtgccatgagaagggcccccaaacccaggcgagacagagggagggtcaagaacgccaaggcaaatgtcacttgtgcc

SEQ ID NO: 18762 - DNA, 2300 bp, Homo sapien
tggaggttgcagtgagccgagatagcgccactgcactccagcctgggcaacagagcgagactccatctcaaaaaaaaaaaaaaaaaagagagagaaagaaaatgtgggtgcggggaatgattctatggttgtctgttcttttccagctggccagcagtggtagccaaaaagtgacaggatgctgatgaaaaacattgcagacgtgaagaaaagaaaaagttgatggaattttgcacatgtatctgacagttcacccatccaaacttttataaagtgctgtaaagttgttgtagtaagggttgggcatggtggttcatgcttgtaatcctagcacttttggaggccacacgcaggagaatcgcttgagcccaggagttcaaaaccagcctgggcaatatagtgagacttcatctctataaaaaagttaaaaacctagtagtgtatggtggtttgtgcctgtggtcccagctactagagaggctgaggtggaaagatagtttgattctggtaagtggagattgcagtgagccaagatggtgccactgtgctctagcttgggagacagagcaagattcagtatcaaacctcctagctagaggatgctagctaggtgacgctgagtcaataaggaaggatttggttacatcttgggacctaaggtacagagatgaatgtcccagctcaaggctgccccagccattcaactccttgcttcctctcttggtggacctgtcaattcttgcaagtgtcaaccagctgtcttgcccacctagccctatagtcatacctttctatccttttggtgatctccactccatcaagaagtggctctgcacattctatttcaactgactttttttttttttttttgagacagagttttgctctatcacccaggctggagtgcagtggtgcaatcttggctcactgcaacctccacctcccgggttcaaacgattcttctgcctcagcccctcaagtagctgggattataggcacgcatcaccacacccagttaagttttttgtatttttactagtgatgggatttcgctgtgttggccaggctggtgtcaaactcctgacctcgggtgatccgcctgcctcagccttccgaagtgctaggattacaggcatgagccaccgcacccagcctgcacgttctatttcaaaggctgatctaaggtaactcctacttcagatctcctggcactggagggcttgccgtaatatcaagtccccaaggctcccttgattcagaaatcactgaggcagcagcaccttgtacagatatttctcagccttcactgtgcgtaagaattgctcagggcccttgtttaaaaaaaaaaaaatcagcgtcctggacttgaaacccagtaagtctggagtggggtctaggaatcaacgtttaacaaaagcaggcatttttggccaggcacagtagctcacacctgtaatcccagcactttgggaggctgaggcgggaggatcacttgagctcaggagtttaacaccagcctgggcaactagacccctgtctttacaaataaaaataattagccagtcctgatggtgcacacctgtggtcccagctactcaggagcctgaggtgggacgagcacttgagcccaggagtttgaggctgcaatgagctatgatcacagcactccactccaacctgggtgacagagtgaggccagtctcaaaaaaaaaaagcaggcatttttgatacaatatttgtatgtatctgcttaagacagtcggtttgcttccaaagactaaatcaaacttccaccaaactccttttggcatagactgagtccagagcaaggagatcagatgggtttacatagacaatgtaacagtcagatttacctcttctctttcccagccagcatgggacgatgtgggggtgtgggggggtggggggggcgggggagtggcaatctaccaaatatctctcttcttataggaactcacagaggaagacagattggtcgaacaaaccagtattatgcaaacctcatccaaaccctctgatttccttaacttggctaagaaaaagaggaagttctccgagtgactcaccactgtggttctactatgccttctgaccccgtcttggacttcaactgggagaatgtggagccatttgaacaggctcctcttctggagcatattttcttctgtcacttgtaagccccccttatcattctgaggctcgaacctccaagccaacgtgtcatgtggaaagtgagctttatcgtgttccttttctgtttcaggtagaaaagctgtatt

SEQ ID NO: 18763 - DNA, 2300 bp, Homo sapien
acatacattagccctttaagatggccaggagctaagcttgagtctcctttactgaatttcgttcttagtgcaggttacttgtagattctagtcttcacaggctccctggggctcttaactagtcacactgggagtcatgaatgtctttccaataattcagggaattctagagatcctcaaactgtaaggtctattcatactcaacacaaggaaaaaacctcattaaaattaatgactaatcaggaggcaacgtaaccaaaagcacagtgaatgaaagttttcatggtaggttcaacatgggtttattgctagaaagatccaggggatagctttaggtttaacttcggctcaccaacgtaactttctaatcatttatttcagtaatagctagaagtgggtctgaatgttttcccagagtctgatacgtgtttttttttgccagaagagaggtcttcaggagacttcatttaaattctgattattaaactgaggctttaattgatgttaatgccttatgtcaaatgtaaagttagaatttgctagggctgggatagggagtgatatttctaggacttagacattgaaaactaattcagcctgtagtaacctggatggttttcaatggcatggttagtcaaattcatggttttaaacttagaagcagctttcgggggagagggtaggttggagcatttattacatattttactgtttaatgtcttaaccgtgggccttttaatttgtaaacactgaaatgattgttgggctgtggaaaacatttacctatttaccttggaagttttaaaagacagtccactttttagcatgtgtgttgtgtccagcctgtggtcgtcttaactaataaatgtgatttttctccccattctctctttttatttatttgcgtataggccttttacctggtgtgagttcctgaatgtggaaaacacctggcagtagtacccagctttgcagttaattactatctagctggcctttttttaaacccttgtatacacttgtaaagaagaactatttcctgaacctggtacagcactttactaatgataaaactttactcctgaattacattaactcaattgctaagctgttacccctcttaatcaggtagtagtttggtagtctcacagtgaaatgtagattgttcctttttccctgaacctctttaaaggttttcgtaactgaggctggtataagaaatcatggactttggaatcaaacttcctcagtctgggtataccacttttccactttctgggtaggtcttaaggtctcgacctatttaaatagaaactgcaaaatcagaaacctgcaatttaatcatgagtctcttaataataacagtcacaagtctcattgttttgatgaacccatagaaggggcccctggaagaaattgcacgtacgtggttttctctgacaccaggagggtttaagacatgtcagggccccttggtttatttctagtgcattcccaggtgaggcagatgctgctggctggggactgccctttggaagccactgcaatatttaaagtgaccataccactaccctagtcacgaagcctatcgcccccctccccggaagcttaagcgtcaagacaacggctctggggttaggcctaggccacctggcggcagcatttgcctagttaagaaggcctgggcttacaaatcaccgtaaaggactaaaactgtttaaagggaaaccaaatgccaaatttagtccaagtgcttgattgaggtgtatatagaaggtgatttggataatactgaagtattttaattttctggactgcaaaacagtggcagaaggaagtgactcaagtggctacaccacggttataaataggtgggaataacctttactggtgcttacgaggaaagaaaaaagtcaatctgaagggaggggcgcgacgcgaacggcaagctagcagagaaccatccgagccggcgtccgccatggtgggcgggggacggctgcggccggaacgcagacatgcgcttccggggtggggcctgccgcccgcaagcacgctcacctccgttgcgcctgcgccgtggcctctccggattctgttaacggtagtggtggcttgttgggatccgttgagtgatgggagagtgtgctctttaacttcggagagagatgcgctctcgtgtagccgtcagggcctgccataaggtctgcaggtgcctgttgtctgggtttgggggtcgagtagatgcggggcagccggagctgttgacggaaaggagtagccccaaaggagggcatgtg

SEQ ID NO: 18764 - DNA, 2300 bp, Homo sapien
tttacaaattggtgagtactggcacatgagatctagagcaggagcaacttctcacacatagtaagtgggaaaagaaagtgctttgaaagttcctccctcacctacacagtagtcgtcatgtcgagacctgccagagagagacacattctcaagtgaatcctggcttcttggaagcgcttgcctagacgagacacagtgcataaaaacaacttttgggggacaggtatgttttcttgcagctgcggttgtaaggtcttggcaagacaagcagtgtggccagaattttgaacttctgatgaatgtgtaatgcaaaggaccttgtacatttttttgtttcaaggtcctcaaaatgagcacatgaagaggttgctgtgaaactttaagtggccctactgcgcagaagcattcagatgtcacttgatgatctgtaagggaacttgctgatttgggaatgtgcttagggaacacacattccttttgacagggtctgtcactgggtgggtgatgaattatacagatgacatgtgcttttttttcttttttcaacctcaatggtattcctacaggaaatggataaccattttaactgtattttttgcagcccgtaccttcttgggaatacaattgtctaactttttatttttggtctggctgttgtggtgtgcaaaactccgtacattgctattttgccacactgcaacaccttacagatgtggaagatgtgaaatttgtcatcaattatgactaccctaactcctcagaggattatattcatcgaattggaagaactgctcgcagtaccaaaacaggcacagcatacactttctttacacctaataacataaagcaagtgagcgaccttatctctgtgcttcgtgaagctaatcaagcaattaatcccaagttgcttcagttggtcgaagacagaggttcaggtaaggatgactgataggaaatgttggtagttacgagtcacatcgttgtctacaaatccatttaaatggtattggagggtgagtaaaaccttgaatgtgaaaacttaagctgaaaaattgtaaaaacatttcacgcctaccatgaatagatctgtttctttctgtccacaatgatttgtgtcatagacataattgatcaatttgcaattgttttcttgacaggtcgttccaggggtagaggaggcatgaaggatgaccgtcgggacagatactctgcgggcaaaaggggtggatttaatacctttagagacagggaaaattatgacagaggttactctagcctgcttaaaagagattttggggcaaaaactcagaatggtgtttacagtgctgcaaattacaccaatgggagctttggaagtaattttgtgtctgctggtatacagaccagttttaggactggtaatccaacagggacttaccagaatggttatgatagcactcagcaatacggaagtaatgttccaaatatgcacaatggtatgaaccaacaggcatatgcatatcctgctactgcagctgcacctatgattggttatccaatgccaacaggatattcccaataagactttagaagtatatgtaaatgtctgtttttcataattgctctttatattgtgtgttatctgacaagatagttatttaagaaacatgggaattgcagaaatgactgcagtgcagcagtaattatggtgcactttttcgctatttaagttggatatttctctacattcctgaaacaatttttaggttttttttgtactagaaaatgcaggcagtgttttcacaaaagtaaatgtacagtgatttgaaatacaataaatgaaggcaatgcatggccttccaataaaaaatatttgaagactgaattaagtggaaattgtactttattttatataatgtcatgtaaaactttgcttaagatggtctggttttttttttgtttttgtttggttttttttttccatgaaaacaaatgactgttcctttttatttaatttgggaggcagggggaatcagaaggcccttctttataatgagctattcatattgcaggagtcagaatgaattgatacaggtgaatttttagttacaggctaaattgcataaaagctttgtcagcttccagcatcaggggagtcatttaatagcctttttccttatttgctagtatggttaaatgagaaaatagtaaaatagatacaaagtcatctatatagtgtgagaacgtgggtgactttttcaaagtttataatttaaaaagctccaaataactggctttttcaagagacttatactcatgct

SEQ ID NO: 18765 - DNA, 2300 bp, Homo sapien
ctgagtttttgccccaaaatctcttttaagcaggctagagtaacctctgtcataattttccctgtctctaaaggtattaaatccaccccttttgcccgcagagtatctgtcccgacggtcatccttcatgcctcctctacccctggaacgacctgtcaagaaaacaattgcaaattgatcaattatgtctatgacacaaatcattgtggacagaaagaaacagatctattcatggtaggcgtgaaatgtttttacaatttttcagcttaagttttcacattcaaggttttactcaccctccaataccatttaaatggatttgtagacaacgatgtgactcgtaactaccaacatttcctatcagtcatccttacctgaacctctgtcttcgaccaactgaagcaacttgggattaattgcttgattagcttcacgaagcacagagataaggtcgctcacttgctttatgttattaggtgtaaagaaagtgtatgctgtgcctgttttggtactgcgagcagttcttccaattcgatgaatataatcctctgaggagttagggtagtcataattgatgacaaatttcacatcttccacatctgtaaggtgttgcagtgtggcaaaatagcaatgtacggagttttgcacaccacaacagccagaccaaaaataaaaagttagacaattgtattcccaagaaggtacgggctgcaaaaaatacagttaaaatggttatccatttcctgtaggaataccattgaggttgaaaaaagaaaaaaaagcacatgtcatctgtataattcatcacccacccagtgacagaccctgtcaaaaggaatgtgtgttccctaagcacattcccaaatcagcaagttcccttacagatcatcaagtgacatctgaatgcttctgcgcagtagggccacttaaagtttcacagcaacctcttcatgtgctcattttgaggaccttgaaacaaaaaaatgtacaaggtcctttgcattacacattcatcagaagttcaaaattctggccacactgcttgtcttgccaagaccttacaaccgcagctgcaagaaaacatacctgtcccccaaaagttgtttttatgcactgtgtctcgtctaggcaagcgcttccaagaagccaggattcacttgagaatgtgtctctctctggcaggtctcgacatgacgactactgtgtaggtgagggaggaactttcaaagcactttcttttcccacttactatgtgtgagaagttgctcctgctctagatctcatgtgccagtactcaccaatttgtaaaaggcttagtaccttttaaagctgctctctccatttcaaacttgaacaaaaatttcattgaacattgaagtttggaactacttcttcgacatttcagcaaactcactgaaactcaaagacccacagatcacagtgaacagtttgaaacaaggctgtaccatggcagtcatgcaaagcatgggacagaagaaataccacggcagtgaactgtgaggataacttccattttttccctcggagagaacagtttacggggcagaggtgatatgttctgccttttgaagattactggcacacgttcagctttttcacctctctaatcgactggaagcagccagccgatcactagtcctccatccccctcgagtcctccgattgtcatgcctaggccttgccacaaagacagcacctttatgtgaaaaaaaacttagaaaaaatgcaggttaaagaaagcaataaactttctttaaaaaagttaaatggagatcttctgggaaaccaagccatgaatgcgagtttgtactaacctagccctctggaggccacatctgtagcaatcagaataggagcttttccatgtttgaattctacaaaggaaggcatatacatgatcaattatctgagcagaattctagctaggttaagtaagggggaaaaatacttcatttgaaatatttaccatttagaacccagtcacgctcttgttgactcttgtcaccatggatacccatggcaggccacctaagttaaaagacaagttgtgttattaaactcacattgaaaacctcagactccagtgcttgaccacttttggtcacagatctctttaatttcgccagaaatgaaaaagttaaattcactatcagatatgaaaaaaatccactgctcgtgatccaagtttgccctttcctaagctgttttaatcaatctgcttcaatggaggagctcacacatacccatctctcctcatttttctggtaagctcatcacat

SEQ ID NO: 18766 - DNA, 2300 bp, Homo sapien
tgtttctctttccttagtgtttggtgctggcaccaactcgggaactggcccaacaggtgcagcaagtagctgctgaatattgtagagcatgtcgcttgaagtctacttgtatctacggtggtgctcctaagggaccacaaatacgtgatttggagagaggtatgtaatgaaaagggttttatttgtcattggtgctaaatatcctaggtattgtagttacacttacgtatttaattaaaggtgtggaaatctgtattgcaacacctggaagactgattgactttttagagtgtggaaaaaccaatctgagaagaacaacctaccttgtccttgatgaagcagatagaatgcttgatatgggctttgaaccccaaataaggaagattgtggatcaaataagagtaagtgtcctttgaaatatgtgatcaaactgaattgtgttttcactcttaagagtctgatactaatttttccccccaaaatccattagcctgataggcaaactctaatgtggagtgcgacttggccaaaagaagtaagacagcttgctgaagatttcctgaaagactatattcatataaacattggtgcacttgaactgagtgcaaaccacaacattcttcagattgtggatgtgtgtcatgacgtagaaaaggatgaaaagtaagttttattaactctgttatatttgcttcctaacaactttgctgtaaaattgagggatcattgtttggtgagttgttttaggttatttcagttggtgtgatttcatttagttagcctactaatcctgaaaatttcttgaatccttcaaataatggctgtcaccatttatagctttcctatagaaggaattcatgtgtcccctggttgacttaaggaccaagggtcgaactgctcgataagtggattagcaggcgtttcctctttgacttccagccatgtaaattgaacttaatgttttgctgaccataaatgtgtggccctagcaatggtcttttaaaactcaggatttttcctttctctctcctattattagacttattcgtctaatggaagagatcatgagtgagaaggagaataaaaccattgtttttgtggaaaccaaaagaagatgtgatgagcttaccagaaaaatgaggagagatgggtatgtgtgagctcctccattgaagcagattgattaaaacagcttaggaaagggcaaacttggatcacgagcagtggatttttttcatatctgatagtgaatttaactttttcatttctggcgaaattaaagagatctgtgaccaaaagtggtcaagcactggagtctgaggttttcaatgtgagtttaataacacaacttgtcttttaacttaggtggcctgccatgggtatccatggtgacaagagtcaacaagagcgtgactgggttctaaatggtaaatatttcaaatgaagtatttttcccccttacttaacctagctagaattctgctcagataattgatcatgtatatgccttcctttgtagaattcaaacatggaaaagctcctattctgattgctacagatgtggcctccagagggctaggttagtacaaactcgcattcatggcttggtttcccagaagatctccatttaacttttttaaagaaagtttattgctttctttaacctgcattttttctaagttttttttcacataaaggtgctgtctttgtggcaaggcctaggcatgacaatcggaggactcgagggggatggaggactagtgatcggctggctgcttccagtcgattagagaggtgaaaaagctgaacgtgtgccagtaatcttcaaaaggcagaacatatcacctctgccccgtaaactgttctctccgagggaaaaaatggaagttatcctcacagttcactgccgtggtatttcttctgtcccatgctttgcatgactgccatggtacagccttgtttcaaactgttcactgtgatctgtgggtctttgagtttcagtgagtttgctgaaatgtcgaagaagtagttccaaacttcaatgttcaatgaaatttttgttcaagtttgaaatggagagagcagctttaaaaggtactaagccttttacaaattggtgagtactggcacatgagatctagagcaggagcaacttctcacacatagtaagtgggaaaagaaagtgctttgaaagttcctccctcacctacacagtagtcgtcatgtcgagacctgccagagagagacacattctcaagtgaatcctggcttcttggaagcgcttgcctagacgagacaca

SEQ ID NO: 18767 - DNA, 2300 bp, Homo sapien
catgaatttactcactgctgtgcgcctagccaaatcagggtgctcttgataaaaattcttctcaaatttaggcagctcatcaagattccacttctttttaactaatttctccccagggtttccaaacttctttccagataagggccctgccctacttcctccaaatcgaggtgcaccaaacctggaatgaaaaaaaacgttattcacattttcaaatggctatacccaggtttctgtatagatttgtcatccattggcacaagctaaaaaccactgaaaacagacttcgagaggtaaacctagcactgtccttcgtgaaaatctctctctctctcaacagccacagttaacatttcccgtagtcccaagtacacattacttaggtcatgtaaacagcctgggatttatcatgtcggaagccggggatttatcatgtcggaaacttgtcacccacatgccagaatttgggattctggcacacaccacttcttgtggttactgtaatcttccccaccagcctagcaattcactatcagcaataacaaggctacatgaaccgaagagcatcacgacgatgttactcatatggccgttttggaaccaaacagctttagtggtaagaacctaaacagtacagtcagcgataacagaacaagggttttctcagaaacacttctgctagcaaacccagctgggggaacgccgcggtagagctccggatcaacgaatcaaaattatataacgcaggaaaaaagaaaaggaggagccggcgactaccgggggaggagtcccggcccgggcggagtcggccgggcggcgttcccgctggggcggcgcttccccctttgtctcgcatttctctctgcgccacattttctcgacgctgccattttgagctcctccgccgggcggggtaacaaaggcgccgccgccatgtccgaggccggcattttgtactcgcgactcagccacatggctgatgccggccgccctcctaccccaacagcaccagggctttggaagtggtcccctcgctcccacagaatgcccggccaccccaaaaacacctcccgaaacgccgcacctaacagatgttccttcgtctgcctcgaagcgtcccgctttcatccgcacaatacgctccctctcaactccctcaacagctaccaaatggcagccgccccgacagctccccaatccccacacaaaaagcaagcttgaagacactacaccgtcaaatctcttccaatcactgtgacgtgaatatcaaaatggcgcaagccttcgggaaaggaagtcccaagatagcccggaaaggccaagtccaagccgcaaagcccccgccggccgccaccctgacccgccctcccatccccccacccgccaggcctgacagctcggctcccaaactcaccctcggtcccggccgcggtctcggtcactcgaataacccgacatggcgtcaatggttgcggttggcggggaacgaagtatatagaaaagcgtgcgacaagtcgctggaaatggcctcgatgacggcgaagccttgcgggggcggcagcggaggaaggacaccgatgacaccagccgaagctgcactactagagaccggtagaaatgaatgaggtgccggccgctttccggcagccgcttttatagtctggaccgcctcctacgccgcagggaacgctgggagccgctctatgacctaatcgccccgcccctcgcgcataggccgcaacgcccgctggcgttccaggatcgccgcgctttcacccctccccgcgccactctctcaggtcagggcccacccaccattggaatgcctcattctgcactctcttgacctcaccttcttctggtctttccacacctcaagcaagccaccccgccctttcccaagcccagccccgcccaccctcgccactcggagatgtttacgtctccaaagagccctcacgtctgtaaccaaaagagggggaaggcggggcctggcgttgtcacgtggctgtaccaccccggaccaccgagagagcggtccgcactactttcccgttgacgtcggcggagggatacaaaacgaaatagctcaccggaagtgcgctgctcgcaccccgggacccgcccgggctgccggctgatgtggaccgtccgacccgcgtgtctgataatcctttgacgggttttggtcggcggagaatggtctctaaacttcccaaaccgcccccgtttcacgtcctgtgaaaggaagtgctcctctgatgaccaatcagcggcgagaagctcttttaacgtccgtc

SEQ ID NO: 18768 - DNA, 2300 bp, Homo sapien
tttccagagtgctgtaatttctacatagtcaaaactatactgcaaattcaattgatactgttgcagcctaaaatcttaagttacttatataagccttacatgggtgtttttagttaaaacatatttacaagtaaacaggaatattatgtcataaacaacagtttaatgataatccgaggttaccagaaactcattaatggaggctgcttcgcacttgcaatagtattggtcttgtgtttacccaattatcttgtgcaagtcagggtttctctggtgccggaaaaagtggtgattaaacttaggctgttaagaactggtataataacaacatcaacggtaatgcatttgttagtttttcttttttattatatcgatctatatgaaagaaaatatgggaagtacatgaagctcagaattatcaatactgttgacgtttcctgcgtaccacattctcctctcccctagatattgctgggatttgcaaagtttaacggtttctgtaccaaaagtaacttagcttaaaatacttgttccttgaaatgcctgggaattggtaggaaagcactttcaatcggtattagaaacaaacatctccactatgttctggacacgtaacgttctggaaacgaatgagagtgtattttccatgcacataatccccctccccacgcccatttctcacagctggccaaaccatgacaactggtttgtacgcagtccttgtgaaaaggatgaaagcgtcctagacaaccaaattaattcgctcttcaaaagcggtgctagacaaagcccatgactctagagggcactgaagagaaaaaagcacaactattctacaggggcatattctactattctgcaggggcataataaatcttaagaatgctgttcctttaaagaccaatacaaaagcaggtacgacctcagggcccatagtgcaagggcggagggcacacggacagcggctagacgccccacagaaagacaagtccggggacgacccttctgaccgctctttttacagccaggacccaagtgtcctaccggcctcgccccagtgcctctctctctcccacagcatactgctgttccacggcctcgaagcgaagaggtggtgaagctgagagaccctatccagggaacccgccagcgcgacgcggcgtctgaaggtcacgagccccgccgacagcccagacccagtccgggctagcccgaggcctccctggaggtggacggtttcagtccacacatactgggaccccagggagacactcaccagcatccgagcctgccatgtttcagaggcaggtcgccgccggactccgacgcggccgggaaggcgacggtgtcctggaaggaccgatccacgcagacccgacactggggcgcggacgcacgaaccaaagcgcggggaaggaggcgtgaaagaaggacggacgttaaaagagcttctcgccgctgattggtcatcagaggagcacttcctttcacaggacgtgaaacgggggcggtttgggaagtttagagaccattctccgccgaccaaaacccgtcaaaggattatcagacacgcgggtcggacggtccacatcagccggcagcccgggcgggtcccggggtgcgagcagcgcacttccggtgagctatttcgttttgtatccctccgccgacgtcaacgggaaagtagtgcggaccgctctctcggtggtccggggtggtacagccacgtgacaacgccaggccccgccttccccctcttttggttacagacgtgagggctctttggagacgtaaacatctccgagtggcgagggtgggcggggctgggcttgggaaagggcggggtggcttgcttgaggtgtggaaagaccagaagaaggtgaggtcaagagagtgcagaatgaggcattccaatggtgggtgggccctgacctgagagagtggcgcggggaggggtgaaagcgcggcgatcctggaacgccagcgggcgttgcggcctatgcgcgaggggcggggcgattaggtcatagagcggctcccagcgttccctgcggcgtaggaggcggtccagactataaaagcggctgccggaaagcggccggcacctcattcatttctaccggtctctagtagtgcagcttcggctggtgtcatcggtgtccttcctccgctgccgcccccgcaaggcttcgccgtcatcgaggccatttccagcgacttgtcgcacgcttttctatatacttcgttccccgccaaccgcaaccattgacgccatgtcgggttattcgagtgaccgagac

SEQ ID NO: 18769 - DNA, 2300 bp, Homo sapien
agagataagccatgagaactgtaatactgaacagttccaggaagacatctcaggaactgcagatggtactttcctgtggagggaaaaaacactagtatctgaaacacctacataagaggctttatgtacatgaccccattttattttcactcctttgtcagatactgtctaatttccttagtttttgcctaaatgctcctggcagctcaggctctgcttgaaagtctgggtgtgccattttcctactccttgtgaggtggcatctgggccagccttgttagcagcttcctggtggcatggggagtgagccctcagttccacaggagtgcccaggatcactgctgccctctgctgcagtggggtgttattggagctgctcttcagattgaggtgataaagctgccaaaggctgaagggcttctggggccactggccccccacacgtgacatactgcctgaagacatcgtgatggggagtgaggcagatgagaacgctggaatctgcattcctcttgtccttacccttctcttccctcccctttccctttcttagcaagacttcaaggactgcattcgtaggcaaaggttgacccaatcaaagataaaagaaaatcgacagcaaatcgttcgtgctcgaaaatattatgatgattatagagttcagttgtgtgcaaaaatgatgagaatgaggacccgggaagaaatggtaagtctgacttttctgtccagccctgttaagaaggtgaactttgttatctttcaggaccaccttctttgttcgtgactcttgtccaaatttgaatccaaaatctaaactgaagtcctatagtgctggccctgagttctgcttggccacacttcattttcttactccattgtgcattcccgtccattctcagtctccgtgtccctcatcttaatgtgaagtcttacttcctccctgcctcctacacataacaggtacttctccagtaaaactactttagaggtttgggaacatgtgagagacaaatttagtgtgataacatgaccttgcattccacataaaatcaggactagtgtccagctgtgctgtgaggggttttccacaaggatgacatttgctatgtcatcctaatcaggctgtgaaatgattaaccttttgagatcccaagctagcaataaatttcatctgtaaaatattttagtaattatagtttactaaagacttggacatatttctagaggaaggctttgaggagagcgtaagtaacttgtctgtagctcatgaatgcgtcgccgtcagaaccagtttttctatccagaatttacactgatgaagggaggacaagtgcgcatatccaagccctttgagcagtgtgttttccggtggcctccccaaatgatcactccccctcctcagtgatgtacatgtgtaggtgtggcatgtttctgctcttggcgttcttaccctatgtacatggctgcttgacactgcttttctgaaggttgtaaagaacctctgtgatacatgaaaagataatgaacaccttcgtcattagggaaatacgactcagaaccacagttagaggacgagtgttggcaaggatgtggagaacttggggctgtaaaatggtgcagctgctttggaaaacaatctagcagttcctcagaaggttaccaaaaggtcatatagagttaccctatgacccagcaatttcactcctagctatataatcacacaaaaaacacaaatgttcatagcattacttataatagcctaaaaggggaaacaacccaaagtgtccatcagttaatgaatggataaagagtgtgcattcattcatacagtaggatgttacttggcaataaaaaggaatgaagtattcatacatactgcagtatagatgaaccttgaaaacatgcggagtgaaagaaaccaaatacgaaaggccacgaattacatgattccatttttaggaagtgtccagaatatgcaaatccatggagacagaaagtacagactggtgactgctaaggatgggacagggggaatgagcactagtcagtatacggtttctttttggggtggtaaaaatgttctgtagtggtgatggttgcacaactgagtataataaaacatactgaattatttattttaaaagggtaaggctggactcagtggctcacgcctgtaatcccagcactttgggaagctgaggtgcaaggattgcttgggaccagcctgggcaacatagtgagacgtcatctctccaaaaaattaaaaatttagccaggcgtggtggcacatgcctatagtc

SEQ ID NO: 18770 - DNA, 2300 bp, Homo sapien
ctcttctcactgctatctatctatctatctatcttctgccaaccaacagaaaccataatgcattttttattatttttttgagaaagagtctcacttttgttgcccaggctggagtgcagtggtgcaatctcagctcactgcaacctccacctcccaagttcaagcgattctcatgcctcagctgagtgccaccatgcctagctaatttttgtatttttagtacagacagggtttcaccatctctgtactaaaccagggaaaccaggtttggccaagctggtttcgaactcctgacctcaagtgatccacccgcctcagcctcccaaagtgctgggattataggcatgagcctctgcacccaactgccgtaatgcatagtctctcatcgtccagccatgttatgaagtctacacatacatggtattgtcaaggttctccgaggcccacctctgataaccacccacctttcttctctcatgaatcagaaataatatagtatttttttgtcctcaagtgctaattcttaattaattatttttgttgacttaaagcaacaaacttcaggagctggctgctcacacaaggcttgttacttgctttagcacaaatacgactaatgattattttccccttttcaggtgtcaggtcataaattcaaaagcaataagcttttagaaaacaatttttatttaaaaaatcataaaaagtactggaatgaaaatacaggtaaagcatttgaaaattatttttctggcttagactgtttactggctcgattctagctctgtcctggtaaaggcctccagaaccttcacctactattatcaagtctggcctcatagggagggacttttactgtactgaaaggaagccagctgaagccgagatctgaagcgctcagcttccagttcccggaagaaaacatcatcatcattctgtgttatcatgtcctgcagctgctgaatttccttctccatcttagatctcagctccctcttcaccttatgtaatgtctgaaaaaagaaggcatgtcatcccgctgttcacagcatttatccaggccctcatctattgttccctctccatcttccagctaatcaaactcctccaaaattttcaataatctagcaacagcagctcttacagagacctaactaaagttaaaatcataggataaaaatgtcttgggtcatagatggattgccttattagtcttctctccattccctttacaggtataatacatttggttttctacttcctaaaaatgtaaattagtcatgtgtcacttaatgatggagatatgttccaagaaatgcatcattaaatgattttgttgttgtgcaaaatgtcagtgtacttacacaaacctagagagtacagtccactgcacaccggggctatatgatacagcctattgctccaaccaccaatgtacgaggtcccttgctgaaagaaacattgccatgcagtgcatgacttggcttctatcttaattattacctgggcctgagatttctctctggctttaagttcttgatgttcctgtgatatggcttctgccagcaatgaaaactgtttataggaagaaaaaaaacaaatattatatttaatgtttgtagtccaaatgtaacatttcttaatgttcacaggcttaaaatcattttaatggaaatagggaaatatactgtactatggtcaggtattatttgatcttaaatttcaatcttgaaatggggtcctctaatctgtagagtgcaaacttcagttaacacaaggtttattgtcaacagactaagcaagttttgccacaagggcaagtggtcaggactaagcacaacagcgtaagcaagtgccaggagcccacctggtccttatagtagttctccatggagtccagttcatcctggtggcgtctcctttgttcatctcgcttttctttggcatagtttcttaggtctcgtaatctttgcttttgaatgtttaaaccttcttcaaacagtttcttaaatatctgtcagttatttaatcgtaaaaatagtcattgaggaatatcattttggccaactagaggtatatactgattgtatttcccaaggttttttttttttaaatactagttttattcagatgttttgacataccataaaatgtacctcctttttctgagacaggttattgctctgtcacccaggctggagtgtagtggggcagtcacaactcactgcagccttgacctcccaggctcaagcaattctcccaccttggctacccaaatagctgggactataggcatgtgc

SEQ ID NO: 18771 - DNA, 2300 bp, Homo sapien
aaaaaaatttttttttttttggtagaaacaggatcttgtgttgcccaggctggtctcaaactcctggcctcaagtgatcctccagcctccgcctccctaagtgctggaattacaggcgcgagccaccatgcctggctcgtagtcagttttttttgttgttgttgtttttgagatggaatctcactctgtcgccaggctggagtgcagtggcgcaatctcggctccctgcaacctctgcctcctgggttcaagcgattctccagcctcagtctcccgggtagctggactacaggcgcatacaaccacgcctagctaatttttgtatttttaatagagacggggtttcaccatgttggccatgctggtctcaatctcctgaccttgtgatctgcccgccttagcctcccaaagtgctgggattacagtcatgagccaccgaacccagcccagttttttgttttttaaccttactactgtcagggtttgagcagaataaatggaatgtgacagtgatctgctttttctgaactttattccatagtagaatctcaaagtagttgagttctgctcttatttgtgttctaaatacttggtaaaacaaaacaaaaatttggattttctttttaaaaaacacatacacacaccaaaaacacaagacacatcagatgagtgttatgttgggaaggctgcttatgtggagacgttacttctttttttaatctctagagtagtttttcaaatgttacataatggtagtaatttaatttagactccatcacatagaattttgaaacagtttcctttaactagttttaatactattctgcatttgctcaaaaatattattcaatctgtttaatccataatatcaaaatatatcatttaaataaccttccctagccaaggaatgacaagaattaagactagaactacatctcttaagtcctagactagtgaatttccaaagtgagtaacaaattatcttttatactttgaaaaatttgaaggttttaataaattcaaggtggaagtactttttattccaggttttaaaaacattgatttacattgaagtcaagaagtggtatggaacatacccaaagaatgcacgtttgcccttgagtccatacctacaccaaatgccttgcaatccttgcccacttatatttttatcatggtatgtttcagggtttatacagtgaatgataatgaaatgaataatgaaatgtccttaatactacaacaaaatatagccttgtccaaaatgaagagtaaatcaatactatattatatgtctgtataaactggtcgtgataggagtagaccaggataatagagatgacgtggactttttttttttttctttgagacagggtctctgtcacccagcctggggtgcagtggtgcaatctcagctcactgcagcctcaacctccagggctcaagcaatcctcccacctctgcctcccaagtagctgggactataggcacttgccatcaacctggctaatttttgtattttttgtagagatgggatttcgccttgttgcccaggctggtcacaaactcctgagcacaagcgaaccacctgtcttggccccccaaagtgctgggattacaggtgtgagccaccgtccccagcctcacatggacattttgaaataaaaccatattcttccttttgttttatgtttattatggattacaaatttatttggcaattaaaagtaacagaccactggaccgtatcatctcgtgagtagctgaactgttggataatacttttatactctttgatgctaaaatataataaaattgcctaaattttgcgtgagatgttacttcaatataatagagtttttatatgctatttgggtacggtagatttttccaatgtgatcttatataactgtagttagtgcttttttgccttttattaatttaaataattatttgctaaaatgattagttaatgacatatcttaataaaaatgtatacattaacaaaaaaattccttggtcatatcttgttttctagggaatggttgtatctcttgtcacatgaaatgttgaatccatactatggcctcttccagtattcaagagatgatatttatacattgcagatcaatcctgattctgcagttaatccggtatgatttgaagttatgatgtgaattgtgaccaataatgcttttcatgtttacatgttaatgtagtttattatatagaaattatttgtccttgtcttagttgtgccctttgactcagcaattccccttctataaaattttcccaag

SEQ ID NO: 18772 - DNA, 2300 bp, Homo sapien
caagagagaggatctgactggctcatactggatgtggtagctgcttattatccaattagcagtggccagtgggtcaggatcacatactgcaaatgtggccacagatcacttatcctctatggctcatactctctataaatgatattttattgaggcaatactattttctttccccctcccctctccttccctcccctcccctgtcttgctctgttgcccaggctggagtgcagtggcatgaacacacagctcaatgcagcctcaacctcctgtgttcaaacgatcctcctgcctcagcctcctgagtggctgggactacaggcatttgccaccacaccttgctaattttaaaaagttttttgtagagatgaggtctcaccatgttgcccaggctggtcttgaactcctgggctcaagcagtcctccagcctcagcctcttgagtagctgggtctacaggcatttgccaccaaaccttgctagtttttaatttttttaattttttttttttttttttgtagaggcctggcatggtggcgtgcgcctgtaatcccagctacttgggaggctgaggcaggagaatggctggaacctgggaggcggaggctgcagtgagccgagattacaccagtccactccagtttggatgacagagcaagactccatctcaaaaaaaaatttttttttatagagatgaggtttcaccatgttgcccaggctggtcttgaactcctgggctcaagcagtcctcccgcctcagcctcccaaagtggtgggattacaggcattggccactgtgcctgacctaaggcagtataatttatagcattttgatatcgtattaaggttgaaggaggactctattgtaggattatcagacttgctttttagtcagtagtgtgtcatttgttgtagctttatttttgcatgcggtaactttctctgaaaaacaagccatcacaaattagtgaatattgtaattatatcataaagttgtttagtagaaccaccccattataattttagcttattttgcatatatatggataagctatggagggaaccatgtcttcacattatcaaatatgtatagacaagacaacttacgtttaacttaagctttttcctgtctacgtatagatttgtcaaggaatattggtagggtttagatgcttttacatacatactaactaggtgttttgagggcattatgtccaacttggtatcagtagatttttgtcagtaatttttcttctgctgctaatgttgataaggatttggcattatgcctttcatttaaactctacatagcaagttaaaaatggtaatttcaatggaactcggaaaaggatgatgtaaatggcaatacgccattatagaaagaatctaggaaatgtgatgtatattcctttgcactggaaattttactggggaatacttaacaaaacttctggcttgcgatggaataaaagggaggagcagtggaaaaaggaagctttttgtttactgtaaaacaatgcagtgaattagacatagtggtgttagaacaggagtctaaacatgagaaatctaggcagattccattggaatgatgagttatgttatgactcaatctggagccaccttctggagtctcagaggttcggtgtttatagtagttattgaatgcctactgtgcacttttttctagactctgggtatacagtggagatcaaagttaagttcttgatatcatggaacttaatgatctagtgaaggtagaccttaggagctgaagggttcattggctcaactgtttatatttgaaaattttgggtctttatggatgtttaaatttggtaattcctagggttgcttggagaaatgactaattctgaggccagggtagggaacttaaatgagcctagagcattttccatcagtaagaaagagctcttcctttcccctcaatgatggaagtatgtcaaaggaacacacgaaccaatggaaagagctcccaatggccaaagctggaaaaatttgagcaataaaataaagtagtattggattataacccaaagtacaaaacaaatgtttgtgagtccatactgatataaatgattagataggggatagacaaatctcccatgcagaataattccaaacaatttatgtagatatcccactcttaaggaggtatagtataactctctagtccttatgtgtgggttttgtatagtgacatccttccaaagagtacagtatagaaagggggaaaaagaggaactttacagtggaaaaacttgacaaacactactttag

SEQ ID NO: 18773 - DNA, 2300 bp, Homo sapien
agcacttcgggaggctgagtcgggcagattgcctgagctcaggagtttgagaccagcctgtgcaacatggtgaaaccctgtttctactaaaatacaaaaaattaggcaggcatggcggcatgcacctgtaattccagctactcgggaggctgaggcaggagaattgcttgaatccaggaggtggaggttgcagtgagccgagattgtgccattgcattccagctggagtgagactaatagttttatcatctcatggtttctgtgggtcagggatttggcaaggggcttaattgggtcattttggcccagagtctattgtgtgtttattcagatggtggctggaactggaattgctggggggtggctgggcatatctctcacttcaggtcatgtcagagcctccatgtggtctgtctacatgggctggtttatggcagctttacggcagctacactgctaacatgactgactcagggcaccagcaggaattgtccaaggaacaaagtgaaagttacatctccttttctgacttagcctaggaggtcctacctgcattctattggttacaaaacaagttagttacaggctattctagattcaaggagagggaacatgaactcccatatcttgatagaagaagtttcaaagaatttgcagccatttaaaaaattgtcacaggtggtggcagtggcagcaggtgctgctactttttgttttttttggggggttggactatttattctttgatatattaatctaatagataaaaattttcagcttttataatttattttatgttctacctttgaatttccaggaattttattacagagcacttaacaaatggcataaaaattttcagcagcttctagaagagttatgatagcttattaaagtataaaatccataaattattttgataaaggattataaaggtcatagagaagcagattggtaaaaaagcagatactatctgaataaaataatttatatgaatatgtgaatttaattctttaattctctgaaatgtttttttttggaatgatttttgtattgaaaaaatattataattcagggttaagaataaaatgatgttagtgcttccctatagggtctgcattgtttttcttttttttcttttttctttttttttttttgagatggagtctcactctgttgccaagctggagtgctgtggcatgatctcggcttactgcaatctccgactccctggttcagatgattctcctgcctcagccttctgagtagctgggatcacaggcacccgccaccatgcccagctaatttttgtatttttagtacagacggggtttcaccatgttggccaggatggtcttggtctcctgacctcgtgatctgcctgccttggcctcccaaagtgctgggattataggtgtgagccactgtgcccggcctcattgtttttctttaacccgtctataatccattctccacagtatagcttcatgaattaaaaaagaaaaaagtaaattggatgattttacttccttgctttaaccctccagtgtctttccattatactttgaatgaaatagacactatttatccaagaccttatataatctgcccctgttgactgggctttcctttgctcattatgctttagtcacgtggattttcttttaatttcttgaaaaggccaatctcttccacctcagagtctttgtatatattctttcttttgaaggaattttctttctcttgtttcttcttatttttctgtgtcagttgtattatctcaaagagttcctaagtagtctgtctaaagtagtctctactctcattatgctacctccataatatcctgttaacttctgagaactgaacacaatttcttttaatattcatttatttacctgtttactgtctttttaaaaataaacttttgattttagaatacttttagatgtatagaaaaacctgtaagtctaaagataagaaaaatctgtaaatctaaagatctgtaaatctgaagatagtatagaattcctgtatttccataaccagttttccctattaactaaactaatcttacattagtatggtatatttgttataattaatgaaccaatattggtacacttttattaactaaaatccatatttattccgattagtttttacctaatgctgctcattgttttttaatccctattagatggggagcacccacagggcagggattgtgtgtgtgtttcatttacctaatgtgatgccaaacagtaacgggtacttgggaagtatttcttgagtgacta

SEQ ID NO: 18774 - DNA, 2300 bp, Homo sapien
caaatgtgtatgtgtacattagtttgctaagttttttgccactgtctgccctcttaaattgtggtagcagctattgttcacattgatttctatatatttgtagtacaaggaagcatttctaaaggaccttgttcattgctttgcacaaaatggccacttaatatttgttgaatgaattgctggcactatctctggtattttaatttttatttatttatgtatttatttttgatatggagtctcgctctgtcacccaggctgaagtgcagtggcgtgatctcggctcactgcaacctcccgtgttcaagcgattctcttgcctcagcctccctaattgctgggaccacaggcatgcgccaccaggcccggctaatttttttgtatttttttttagtacagacggggtttcaccatgttggccaggctggtctcaaactcctgacctcaaatgatccgcccacctcggcctcccaaagtgttggaattacaggcgtgagccactgtgcccggcctatctgtggtatttttagtgtgatgtctagaacttcatatacttttttggattacttttaattgtagggctgtatccaaactgatgaaatgttctcgcaggtaactatctggagaagtgagttcactgatgtattaaaagaaatgactggcatggaataaggattaaaatatattaatccaaaacatttaaaattgcattaatgttataatagcctaaagcaaaactaacgaatcacataaaaaatcccccacgctattgtccttagtagtttacattgtgctagatactttcgcatgtatatgcatacaacttctattctgtttttaaactttgcattacatatacattcttccatattatatgatcttcataaaaatagttacatggctgcataaaaaaccatgcggttcctggactattatgctattccctcattccccttttgttattaatggaatatagcaaagaacatcttctgtacgattatttgtcaagaatagggccggtgcggtggctcaggtctgtaatcccagcactttgggaggccgaggcgggctgatcgcttgaggtcaggagttcgtgaccagcctgggcaacatgggaaaacctaaacgtctctactaaacatgtctctactaaaaatacaaaaattagtggggcgtagtggtgcacactgtggtctcagctactccagaggctcaggtgggaggatcacctgagccccggaagttgagactgcagtgagccgtgttcgcaccactgcactccagcctgggcgacagagggagaccctgtctaaaaacaaaaaaataaaaaataaatttctagcagtacagttacaatgtcaaaggataaggtacacattttttaaaaacttttctctttctcctcctgagataacgaaatacagtagcgtatgaacaactcttcatacattactctccaaggtttatcttgttaatcctttaagacgtatcatctccccatccttggctgcacctgaaaagagcgggagtcggcaggtaacctgatctcctccaccaggtgagtcccggatggaggtgtcaactacaagaccaggagcagagcattcctggggttttgctggaaccatcggcgtgggaatgctttctcttccctcgcccgaaagacgccaagttcccggcaggcagcggactcggttctaaccttcctcgccccagcctctcggagcgccctgcacgcagtgggcgtctaataaaatgcagttggccctgcttggacaaaagttctcccttaagtggcccggacagtaaacccctccaggtgccacagagctgccgcgcccgccgccgctttgctccctgcctgctccctcccagcgttccgcgtgggaccctcggcggcagctcacaccctccctgactgccggtgcccgccagggcaccctgcgcgcgcccgccggccccgccccggccccgccccgccccgccggccccgcctcccgtctcctccccgccccccggagccgacgagtggcggcggcggccccaggtcccgggtccctcagacaagagggcgggtggaggaggaagcggccgagcccagagttctgctccggcgcccccgagcaccgcccgcttcagccgaccagccccgtcggctactgggcctcgccgagacgagaggagggaaaggcctcggcggccgcgaggaggcggcgggggcgcgggcggaggcggcgcgggcggccgcggctgccgctttgttgtgcggcccgggccgaggaaggagaagtgggaggagg

SEQ ID NO: 18775 - DNA, 2300 bp, Homo sapien
cctgtgcccagatgccaatacctcctaagccaggagctgggttatgcacctgccatgaccacaagcctggcctggtcagagccctcattgccccatccctgagtgggcaggagtctggcctggggagggcttaggcctgtgaggattcttcccgaaggcgcccttggaaacagactaattctcagggaaatcagattgcggtaaaatgggatggaaacagacaacattcagatctgcgatttcctgtccttgaaggcccctttcagattacaagttggcaccctctgcccatctaggtgccacagcttcccccaaggacaatagatggtagggccagagaagagaagagaaactgggggagggaggcccagtggagggccatggcacatgacctggttctgccctgccagtgggctcagcccctctccatcctcagccaagcgcctctgagggcacttgtttccccttctcacccatgtttttttgagacggagtcactctgtcacccaggctggagtgcagtggtgtgatctcgactcactgcaacctccgcctcccaggttcaagcaattctcttgcctcagcctcccgagtagctgggacttccccttctcttctgcctgaaggaggacgggtggtttggagattccagtccaaaccccaagagctcatcacataataaaagtgtcataatagctgatataggcaggcactgtggctcacgcctgtaatcccagcattttgggaggccgaggcagtcagatcatttgaggtcaggagttcaagaccagcctggccaatatagagaaaccccgtctctgcagaaatacaaaaattagctgggcatgatggtgggtgcctgtaatcacacctactcaggaagctgaggcaggagaatcacttcaacccagagacagaggttgcagtgagccgagattgtgccactgcactccagcctgggcgacagagccagactccatctcaaaaaaaaaaaaaaaaaaaaaaatagctgatatatggtgtacgctgggcatgtggtaagcactgcttagtggatctcatttaatcttcccaataatccagtgaagtgggtgttactattgataggaaagaaagctgagctgcagagataaggcagaactcccaaggcctaccagccgccaagcagcagagtggggcatcatacctgcctgaccccacgcaaagaccatcaccactgccagccgctgcctggctgtgctgcaggtggggagagacctaaaaggtagggagggagagaagattcctccagtcactattttctaagcatgtcgggcaccaaagaccaatgctgagttctgctgtgtgcccaccctggagggtcccaaagtgccaccaggcctcagacacactgagattctcagaggaagtgtagactcacgggtgggcaacgcctagcaggggcaaagatacagaggtaagggagttccagaacgagtgtggccagattcagcttcccatccaaccctgggcccccaggaggtggagtcaagaggggccatggcctggggtgtgggcttctcttcgtcccagaacactggcctgaatcagccagctctccgcacacacagccacgtccataggcacaactgtttctgggggcccctgagggcagggggtctgctagggctgtggtttgtgacgtgtggagtgagcgcaggctcagatcagggcgaggcagcttgtccagagaggcagataattcccaaacagaagacccccaaggcggagggccctggggctggactcctggcccccaggaggttgttctgagcttaccctgtggacggattggagggtggacctctttccccgcaagggtcaagagggagtgggggatggtgggaaggcaatctggccaggagaagctgcgcgggagactcccgccatccccagtcccaccatctcagccccgcggcctcttcctccctggagacagccaggatcccgggagtggcccaggatcccgggaaatgcaggggagggggtggcatctttcctcttcaggcgcgggcctggcccagaggcgacaggaagccaggacgccggggattgtctctcgcaaccgcagcccagccccagtccgggaggaagttctgccgggcgctctccgccggtgcctcactggttatagtgctatacaggaaacctggcagcgccggagccgcgcggtcgaggagggagcgcgggacgccgagcccacgcgcgcctgccgggacaagtggagacgaggccggcgagcggacgccccgaggtgcccg

SEQ ID NO: 18776 - DNA, 2300 bp, Homo sapien
tagcttgggaggtaagagaagaccaggagataggggctcctaaaaagcagacaagagattaccggggggttccccacactccagcacacagccgctgcacaaaaatgcagtggaattactgagggacattatgtgcttgatggggggggacagggaatgcttgtgccaagccaccaaggatcatgctgtgccagttgtatactatcgttttgccaaggtgaaaggatttccctactaaatcccttactttccactttgtttaaaatgagtttaacaccgagagaatagtttgtctctatgtccttatttctaatcttcctgctcaaccattaactgcactaaacacactcagacccatctagtctaaaattgagaaggggaggttctcactcctggagagagaattactgaaagggcggccctcatacagtccagggtcatacccccaagtgctggttttatacttgaaagcagacagtgggactctgacctttgcagagataagagggacaccttcctacccagagaagccaaaagagcacaggacgcccaggccgagggcagtgaagcttgcttccaagaactggcccgttccccagccaacccctgtgcccacttacgactggcatgtagcagtacctctcctcatccacactcaggccctaggctcccaattgaccaaagcctgcaagtataaagtgtccagagcatgggtccctgccaacactccctgccctgctcttcactacctgtggccaccacttatgacattttgttccgagttcatctgaaagagaaatgtcacttttgcgttagaaagaagatatacaggccaggtgtggtggttcatgcctgtaatcccagcactttgggaggccgagtcaggaggatcgcctgaggccaggagttggagaccaggctaggtaacacagtgagaccctgtctctacaaaataaataaatttttttaaaaatgaaaagattggccgggcgcggtggctcacgcctgtaatcccagcactttgggaggccgaggcgggtggatcaccaggtcaggagatcgagaccatcctggctaacacggtgaaaccccatcctactaaaaacataaaaaaattagccgggcgtggtggcgggctcctgtagtcccagctactcgggaggctgaggcaggagaatggcgtcgacccaggaggcggagcttgcagtgagccgagatcgcgccattgcactccagcctgggcgacagagccagactccgtcgcaaaaaaaaaaaaaaaaaaaagaagaagaaaaaattagctgggcgtggtggtgcacgcctgtagtcccagctgcgtggaggctgaggtgggagaaccgcttagtccgtgaggtcaaagctgtggtgagccgtgatcgtgccacagcactccagtctgggcgacagagtgagaccctgtcccaaaaaaaaaaaaaaaaaaacagaaaggaagaaagaaatcctctacacgggctagaagagaataaccagacccctaagcttcaagccaggcggtgctaatgggcgagttacacacgggagtgtgcccaaggggacctcaaggcgttcccttgggataaagtgtggtcaaaacagctgtgtttatcctgaaagcgcaacgcggaggctccaatttgggcccgggctccgccccacgggctgcactgctgccctcggagaggcaaagatagggcaggcgttattagtcccactcacaagtgggaactcttcagctgagggaggcgaagtgacagccccaatgttgcacagatggttctgaggccaaacgaggtcaggaacccagaagccaggatctagtttgacgcagacctgcgggaggcgggcggtaacggatgcgttctccctgacaccggtgccgtcgcctctctgcgccctgcaggcgcccccagttccccagcctcccagacctcgcatctgccccggggctcagctcccagggacttccgggagcagctggccccgccccaaggctccttcgggctgcgcgattggcaccgcgggccgggggcagggccggagcgccgagccaacgtgatggcgtcaggggccggggcgctgcttcctgttgtcagtggccgagagaccgcatcgtcggctcggaggctgaggggctgccgcagccgggagcccccctcgcctcgctcctcgctccgcttggtgagttagggggtcaagatgcgaggagggcggcggagtggtgggagggccgaggcgcgaacgggcggtgggcctcccgctccctccgcgattcccagccc

SEQ ID NO: 18777 - DNA, 2300 bp, Homo sapien
ttccagccgccgtttaggatggttgattaggacgcgttgcagtggcggtagctcaccaatccagtgcgtgcacccgctcctttattaggccatagagccagtggctcccacagggacctgatacaacagtgcgttaaataaggagcatattgagctctcatgtcgtaagccagtggagaagtccagggctagtgtgggggctccggcgggggctgtggcccgcatccgcatggagcctccccatggttcacaggtctcagtcttcggagccttcggccctgcgagcccgaacggtccacaggggggcgccaaaccctctttcgaacgccatcctctaaagcctaggctccaaccggttccatttcttcaggctcaggattttcactcttctcgaatgggggtgtccctcccccaatcttctgagtcgcaacagcatctccctccctccaggacctcagagccagagctgggcgagaggccctgacctccggggtagggtggaagcgtccctgtgaaggtgctgtcctgcctcccatccccaggcgccgggcctctcccaccctcagcgccctgctcacctccagctgaagatgtcagggcacctctgcttcctccctgccgtttctgcagtaccgccgagtgtgcataaacgggtttaatacaggctttgctgggtgcggggactcccacctgtaatcccagtaccttgagagaccaaggcgggaggatcacttgaggccaggagttcaaaaccagcctgggcaacaaagtgaggcccgtctctggaaaaaaaaaaaaaaaaaagaataaaagaggtccctttttctgggagattgatataggggagtgtgagttagaagggaggcatcgaggatcagtcatttaaagcagcatccaaggatgttcaaggctagagatccacaggtgtattttcagaaactgaatttcctggcggggcacagtgactcatgcctgtaatcccagcactttgggaggccaaggtgagtggatcacttgaggtcaggagttcaagactagcctggccaacatgctgaaactgtttttagaaaaaaaaaaattggccaggcatggtggtgggcgcctgtaatcccagctattcgggaggctgaggcaggagaatcacttgaacctggaaggcagaggttgcagtcaaccgagatcacgctactgcactccagcctgggtgacagagactgtctccaaaaacaaacaaacacacaaacaaaacacaaaaaaaccccaaaacccaaaacaagccaggcgtggtagctcgcacctgtaatctcagccctttgggaggccagggcgggtggattacctgaggtcaggagtttgagaccagcctgaccaacatggggaaaccccgtctctactaaaaatacaaaaattagccgggcatggtggtgcatgcctgtaaccccagctactagggaggctgaggcaggagacttgcttgaacccaggaggcagaggatgcagtgagctgagatcgtgccattgcattccagactgagcaacaagagcaaaactccaccttaaaagaaaaaaaaaaaaagaaaaaacaaacaaaactcctgaatttccctgtggataccttttctctggcagactttttcaatgagggctaagttgtctccaatactatatggcctgtagaccgctcagctttcattccagtgaaaacattccagaaaaatctctgaatcaatcccaggtgtttctccaatcagctcaggatgattgtgtgttacctgctgcccagctagtgacacctctccaggcctctgacttagctaggtctccaccatgtgactccaccgtagactccccgccttcttcttttgcaaagccttggacacccaaacacctaccaaaagtgggttagtgtgccaggacacctccaagtgtaagtggggctctccagcacacctggatgtggaggtgtgatgcagagtggtggctgctcgtgacactcatttcacccctttctgtgcaggtgccagaagcccaggaagcacacatcaaggctcgcttgccagcggggtgctgccaataaaatgtagtcacgtggaatttgggatgtggaaaggaggtagaagtcatcctttcctcccccatagcagcaggtgtgcaggctctggtggtcagctggactccatactcccccaccagtcaccagcctggggaccgtggggctgcaaggacctcagcagcagtttcccaagtttcctgacttcttccatcctctggaaatcagctgtggtaaagtagcctgaaag

SEQ ID NO: 18778 - DNA, 2300 bp, Homo sapien
ctgaagtcttcaatggtgaagggtcattatgtctgcaactgactctcaaatggttttgtccagaaaatgtatagacatacacacacggaaagcaaatgtggcaaagtattagcaactattgattccagatgaaagttatacaggtgttcattataccatttgaaaatgtttcccagccatcctaaggcttaaaggaaaaaaagaaaatgtttaaaataaaaagttgggggcagaaaaagaataacaaaaattttgggctcatgcctgtaatcccagcactttgggaggccaaagagagagggttgcttgtgcccaggagttcgagaccagcctggacaacatggtgaaaccccatttctacaaaatatacaaaaattagccaggtgtggtggcacacacctgtagttctagctactcaggaggctgaggtgggaggatcacttgagcacaggagacagaggctgcagtgagccaagattgcaccactgcactcagcctgtgtaacagagtgagacctggcctcaaaataaacaaaagaaacacctttgtggcagaggtaaagttgctatataacaaaatgctgggttacggttccgggtccattccatatgaagatcagaggcttccactggacccaaaggaataatactagtcacttgtgattgttcctttataggtttgaaagatgtgtcaggccaacttattggatgcagttttaatctaaaactctatacattgtacccccaactcatagacttcttgtatccatgaaaccctcttctgtttccacagtcttaatatggccccaataaagccatccttttggaggactcagaaaaggccccccacaacctctgcaacacaataattatagttaactcttattgagcactcactgtgcaccaggcatttttcaggtattgattcatttgatcctcaaaattcattagaggtaggtactattataatgacaaggccaaggaacagagattaaacaatttgcccaaattcacattattagcagagctgagattgaagcatagtctggctatggaatctgtattcttaatgaccatgctatactgcctaagattaaccttttacttcagttacagggattgtttttatctctctgaaagtgcccccaataagccacaacaataaattaatcagttgtctcggttacctcttttgcccaaatttacgtattgaaaaaaattcaaacaagccagaaagatgaaagaatagtacagaatccaatcaaagatcaggcactgcatgtcatgtcttcatttcctttaatctaaaacatgcctctactttctttgctctttcatgacattggcattttttaagagtcaaagatagttgtcttgtaaattgtcccacaatctggatttgtctgtttcctcatgacgaaattcaagttaagcatttttgggaaaaatactgcataggtgatgtattcttcctgcctcgtaaccgcagatggcctgtaatactaagtttgatcacttgactaaggtgatcttccagatctctccattgtaattattttgctgggtacagtggctcccacttgtaatcccagcactttggaaggccgaggtgggaggattgcctgagcccaggagttctacaccagcctgagcaacatggggaaactctgtcactactgaaaatacaaaagtaaaaaaaaaaaaaaaaaaaaaaattagctgggcatggtggtgcaagcctatactcccagctactcaggaggctgaatttggaggatcccttgagcccaggggggttgaggctgcaatgaggtataattttgccactgtatttcagcctgggtgacaaaataaaaataaaaataaaaaataataattttccccttggtaattaataaataatctgtgggttgttactttgagttcagtgaagatcctgttctcaaatgtcttttcacccaaatgtgcatcaatgataatccttgtctgaatgaatttgtattgcactgacggttgcaaagtgacacttttaaaaattctgtcattccttctacatttactagctggcattatttcattgaagaagaactccccctctttctttttcaatatcactcttcgtggattcttctttatattaaatatgttgtaacttattgttgttattcttttgaatgctcaaattgtccagatttgaccaatgcagtctttgttattttttaactccgcaatccaggttaaactaagctatttttaatgcccagagtaatttataatatttcccactcccaacaggaattg

SEQ ID NO: 18779 - DNA, 2300 bp, Homo sapien
atgggcaagaaaaggcatcaaagaagtgaccctcaaattagccttgttgctgggcggggtggctcagacctgtaatcccagaactttgggagccgaggtgggtggatcacccgaggtcaggaattcaacaccagcctggccaacatagtgaaaccctgtccctactataaatacaaaaaaaaaatctgggcgtggtggtgcagttttttgctccctggaggactttgtgttaagcttccttccttgcagctaaatgttgcagacatttaagcagttagaaactctgcatatgagcaggaatcaaatccaaagttgtagggccagaatggtggctcatgcctgtaatcccagcaccttgggaggccaaggtgggaggatcactggaggtcaggagtttgagaccagcctggccaacatggcaaaacctcatctctactaaaaatacaaaaattagcaggtcatggtggcgggcacctgtgatcctagctatcgggaggctgaggcacgagaatggcttgaacccgggagggggaagttgcagtgagccgagattgtgccactaccctccaacctcccctccaggctggtctcgaactcctgtgacctcaggtgatccgcccacctcagcctcccaaagtgctggggttacaggtgtgagccaccatgcctggccaagatggtgtttatgttaagctattgtgcaaaaaaaaacttttgtaaagaaaatatatcgctgtatcttaattccatatactttcctgactactcttctaccataattgcaaaaattctatgatttctctgtataacatacccatcaaatcagagtgggtatattcagtggcctgaaggggactcaaggtgaagattctcctctacatctgactttagaaaagacgttccacctgccttgtggttcagaaatctagtttcacacagttcatttcaagttagagggaggcattcaggatgtgtctggactagagcagcagtttctgcacatgctcccctctgtcctcattaatttgctgatgcataacttaggaaaagtacactaaaggtctgtttttcttttgccctcacaccagagaacaggctcattaggtccctccaccaagaggtttaggtagcatcaatacaaatgttttaaactcaccatctttactaagcactttatacaactgggagtccctcataaaaatctggtggccgggagcggtggctcatgcctgtaattccagcactttgctgaggtgggtggatcacctgaggtcaggagttcaagaccagcctgaccaacatggtgaaacctgtctctactaaaaacacaaaaattagctgggcatggtggcaggcaactgtaatcctaggtactcaggaggctgaggcaggagaatcacttgaaaccaggagacggaggttgcagtgagccgagatggcaccattgcactccagcctgagggacagagtgagactctgtctcaaataataataataatataataataataataataatcatcatcgtcatcatctagccagcttcactacaattatgtaggcaacaccaggaaaacactggaatcacagttgataaaaattaatgaattcactcaaaaacattcagagtgtcatgtccatttgtgccaggtactgtactaagtgctggggctacaaaatccatctcaaagacacaccaagatgaggactttgtccccaggggactttcattcctcaaggaggaagcggatgctgatgggaaaacatatgagagccatgtggggatctgtacggcagggtgacaaggagaggacaaagcaggaatgggggctgggttaagaaagacttgagagacactaacttgcttatcttgagtttctgtgttcatcttaaacaacagaaaaaggcatttgcttcatggtgatgaaaaaatcagagctagctgatattggaaactagcactcatttcatataaacagaatagagctgtacccttcaaactaagtcacagttactttcaaagattggcacaagggtctcaacacaccaagtgtatgttaggggctgggctcttttggagtcaaatcttcctggtaaacaaagctacactgcagtcatatttggcatatgtgacatataggcccactgcatttccttccaaaggcaagatgccaagggaaggtgccagtaattttatgaccaatatgacaccattttgtggtgtttgtaagttgaaacaatatatttccctgcattacacaagtttataaaaaacaaacaaaaaaagaggccccagctgt

SEQ ID NO: 18780 - DNA, 2300 bp, Homo sapien
agcataaactccctgaaagcatggactaggtcttgctcatctgcattgcccaccatgtttaaaactgacacatggaaataaagcaaactcaaatatttgtaaaataaatgaatagctgggggagtgagtagaaggaaaataactattttaaaggaaatgtagttttattatttcatggtctctgtagcactttggcatccacctgagggtctttacacccactttccttaagccttctatatttgaaagaatctgtttgcaaaagagcatcactaatgagcttaataaggattaatgacatacagacctctatggacaaagggtaagaatcaagctttcatagcaatgaacatagtatcttcttgtctctaaacagacagaaatacagggatccctttctggtaacagggctggggcgatcgttattttgtaattagtgaagagttaggggcatttctgatgtgcttcttagtgtaaacatttctagctctaccagttaaccatcattttaaacatctgttttaatataacaattcctgaaatgaaatccttaataccagtctattctcttggtagcttaatattctttataatattattgatataattcagctatttttaatatttaaatgttaatttaattccgattaaattaccaaaaaattctggattaatgatgttcaaatgaatgcaggtggtctccattttcttctcctttaggcaaccatctgaagttaactttagttcctttcatcctactaaaccaactttttgaaattttttttggtgaaggtcagacagtaaatattttaggttttatgggccacatatgatctctcgcatatttctttgtttcttttctttttctttcacagtccctttaaaaatgcaaaacccattcttaacttaatgggctatttaaaaatagaccataaattagattggatctattggttgtagactgaatagaaaaagaatgatatgtgaacccttataaaacaaggttcatatgggtgtcagtcactgctcagattttcttaccatgtgaaatgtttttgtctgtattttgtctatacaacttaaaaactgaaaatgcacaggaggtagctagtgctagagatgggctgagaccctatacaaacttacagaattgcagaattttattgctcaaagaaatctgagagattatctaatttgaaccccttattcattttacagataatatgactaaaaactcataaatataattaactaacttacaaatactggagggatagcaggccttcaaatgaatccttgtgtaattcagtcaagttattttctctgagaattctggaaaatgaagaagttatttctagattaaaatgcaaactacaactatttgctacacagaaccatctcctgcatgtggaggaaagctgggtcatggtcacttcaagatggtgggatctgctctgctttcattcaaaccttttcttatattttcctttttgtgtccatctctctccaccaccaccacaaacacacacacacacactcaagcacaccccttgaagagtgggtttcttcccaccaaattctattatttcatgcctcctctctagatcacaaaatcccttttagaatccaactctgggtggcaccaagatcagcagaacctccatttcctcctctcttttcccaaaccttattatgaaagccccacatggaaccatgtcagggctgcaagtgaagccattcaacctttttccccccatcaaaaaaattggagaactataatgtgcataaagtgcacataacataaatgttgtttatttaatttaatttaatttttgagacagggtctcactctgttcccagactggtctcaaactcctggctcaagtgatcctcctgtgtctgcttcccaaagtgctgtgactgcagacatgagccacctcacctggccaaaatattcagtttaataattatgaagcagatacccatgtaaacatcgttacaaaagatcattgctagcatgccagaagccccagtgtgcccctttccaatcatatccctctctctaaccctaataggtaaccactatcctgacctttgtaataattttcttgtttttaaaatgtagttctggcctggcgtggtggctcatgcctgtaatcccagcactctggaaagccaaggtgggtgaatcacccacggtcatgagtttgagaccagcctggccaacatggtgaaaccctgtctctactaaaaatataaaaattagctgggtgtgatggagggcacctgtaattccagct

SEQ ID NO: 18781 - DNA, 2300 bp, Homo sapien
cttttatttgttggctttgaagtgcaactgacctatttatttacatataaaggatataaactacaaatattttcccactctgtacagaatgtggaatggaaacagtgcatggcacaccttaagtgttaaataaacatttcctgagtgaattgaatggatacatcacactatatatacactagtctgtaatttggattttttgttcaagcacttgtcattggcaatttcctccaaataattaaaaaatgaaaaacaccaatcccacattattttcttaaaatggaagtacattttttggatattccaaaatgtattccagtggttctcagccggaagtggttctgacacctcctagtgggaatgtatggggagcgggcaaggttacctttttggttgtaaaaatgatgaggctggtactagcctttggtatccgggcccagagatgctaaacttcttcctacagtgtgtaaactggcttgtccaaaaggccaaagcgcttctgttgagaaacactgatgaccaatctcctctatgtggtcctgtgagactgtgaaacacgtatttgatcttcctggttcctggcatacaattcctaaaaccctcagaatctgcaaaataagtcttttttttatgctaatgattgactgattaggctttcctagacagcctcaggattggggctggtggtcagggctttcagtgccactctcaacctctgagaaagagagagaggctgaaggttaagctgaccaccaacggccaacggtgtaatcattaatgactctgtaatgaagcttccataaaaacccaaattgaggccgggcacagtggctcacgcttgtaatcccagcactttggaagactgaggtgggtggattacttgaggtcaggagttggaggccagcctgaccaacatggtgaaacaccgtctgcactaaaagtacaaaaaattatccaggcatggtggcacacgcctgtaatctcagcaactcgggaggctgagtcatgagaatcgcttgaacctaggaggcaggctcaatgtttatcttgtaactgactatgttactgaattataattttttttttgagacctagtctcattctgtcacccaggctggagtgcagtggcgttatcttagttcattgcaacctctgcctcccaggttcaagcgattctcgggcctcagcatcccgagtagctgggattacaggcatgcaccaccacgtccggctaatttgtttgcaattgtagaaaagacagggtttcaccatgttgcccagactggtttgaactcctggcctcaagtgatctgcccgcctcggcctccaaagtactgggattagaggtgtgagccactcagtccagacaacatttatttctttattcatttcaccagttggcatggtttccagacttttcttgatttattttattttattttttgagaaggagtctcactcttgcagcccaggctggagtacaatggcgcaatcttggctcactgcaacctccacctcaggggttcaagcgattcttctgcctcagcctcctcagtagctaggattacaggcacccgccaccatgcccaggtaatttttgtatttttagtagaatttaggagtttcctaaattctgggggcttgtctccctgttcccccaccccgactaatttccctcggtcgctggcgctgccccgtcccttaggtcgctcgggccgccccactccgagactttttttttctttcgctggctctttcagcttcagtttccctagggggcgggaggggaatatttgggggctctcctgccttcctctccgagccgcggaaggggagacgcagggaggaggtccggccggctttgggctccagccaggggtccgcggagactatggtctccgaaggccttagccgcggggcatttcgcgagctgcgcgtctctctcaacggcgccaccgcgcccggagtccagccgcgccgcgctgcgcccagccccggcgccccaggctctccgcccccgactcaatgctcccgcgctccccctagcggccgccgcgccacctcgccccgtcccaggctcgtaggctgctcagctcacgtgaccgcgctccggtaacggaagaaacaagatggcggctgaaggcgatccgcagtgaggccccagccattcggattgagccttctccctccaaccgcttccgcaggccgggcccctcctgccctgcccctctggcctccccacccggccccggccgcccccactgcgcccattgcgcccgccccttcccggccgctttccc

SEQ ID NO: 18782 - DNA, 2300 bp, Homo sapien
aaatccacattgaatgtagctctcttgaaaaaggagaggacataacaggtgaacaactgcaaattactagattattctggaatgcatgtgtcaagaaagccctaccactgcatatgtgcccagctaggaattcaaacctattagtaaggtggtctgaattcccaaagtgggggttaaggaggacagatcctaaaaatgagctggagaagagacgtaaataacctgtcattacgtatacacttaaagtcatccatactgttggcaaaagttagcgtagcaagaatacctgagtgacgtccctcatccacattcatacttagactgttgtagtccacctacctggtgcgaaagcaatgtgtgtgtctgtgtgtaaatgttctcctcttagaagcacgccagtcacattggattaggacgcaccctactgaccttatttaaccttaattgtgtacttctctaaagacgttgtctccaaatatggatactgtaagatactgagggttaggacttcaacatgtgaatttggtgggggtgggtgggcacaatttagctcataaaactcactaaggtttaattaggtaattagggcatggactattaagcattctactgttaatttagtttttatgtttggaaaacattttgaaacataatgatttttatttataatttcattatttatattttcattatgtttaggattgcttggaggtaaatgaagaaagaagagttccgcattagtgaggcagggatgtcagtatataaggaattggaaagacatcaatgataatggcaaaagctgcttataaattaaattaagagcttaattaaactgaggaaaaaagcatattgccaaattacatgcagttgttttgtaacagcatttgtccacttgctatgccctgagatttccaaggcacattcctctactaagcgtattataagatgattaaatatgcatagtacaagtatgttatggaaggctatgtcacctgatatagtgggaccacaatagtatgtgtaagtgagatttggaaaatttgataggccagcaagggcaaagaagtgttgaatttgcaagtttgtgcacatattctgaaaatccaggcagctgtttctcattttgaattgttcctttggctagggcataagggtgagacacaatgcacatttgaatgtgtcactttgtaaattaccactgcaatattatcagtgtaagttgaaaaactggtacttacatgtactaatattatctaccatgaaaaaacaattaaaattttaaaatattatgtaaattaaataaagttcaaataccactagccagaaaaaatatttggatattatagtctggggtcagaagaggaaaaacttatgtaaagtatcaaaattaatttttatttcaatttaaatgcagcatcatataacatggtttcataactgaaattatatttgtcagaatttgacatttttattaaagaattgagggaaaactgatgattataatattgacatgcaatgtaaataaaccttttttcattgttataggaatgaattgctcagaaataattggccgatgtcaaccacatatctgtttccgtggaaaatgcagcaacattacttcaaatagtttcatttgtgaatgtgatgaacaattttcagataaaaaaatacatatatatacatatatataccattcgtcctggattttttaaccaagtactattatttatagttgcattaaaataaatagggatgggtttgataaatcaccacttggtgctttaaattctgccatcatcttttctaggagtgtgaactatagagatatacataagcagaaaattattttttaacatgaggataatatggtaatgtaaccagtgataacctacctctctttttcaatgctttccagatgcaaattgtatcgtatcaattattcgagggcagcttgtaggactttgaagacccaagcagccaaaaactagctaattcctccttatttcagttggtatgaagagaaggttactaataatactgctcttccagccaaggcttcctggctgccagtgagcttggtcagtaggaaccacaggaaattatgagttatgtttatgttacttaggagaattgaggctaccagtcttgtcacagggtttatagataattgccttgcgtgccaccatgcctggataatttttgtatttttaatagagagagggttccaccatgttggccaggctggtctcaaactcctgacctcaggtgatccgcccgcctcagcctccaaaagtgctggg

SEQ ID NO: 18783 - DNA, 2300 bp, Homo sapien
cttccttctggccaggcccagacatgtctgtccttgtgagataaaagcttccatgggagccttccttcctaatcaaggtaggtagaccactggaaggtacatctggttttatattttgtcctgtagaagtcagatttcagcccagttgtgtaggagtgaggatgagcttatgctcttatcagagctttgagtacagagacatttgatctggaatttcagccagcctcttcaaccccagaattcagaggttcaatcagaacagacattagcttaagttttcccatcagttgtctatcattaaactggcaaaatctagataattagaaaatatgacagagatgatccagacagagatgttcaggtttttccttgtgtaattcaaaaagtctcgtggtggaacatctgacccttttcaagaggaaggatgaaaactctacataggaacacgatgtgaatggaagaaacctgtcattgtgagtctggcttttgattagtcatctgatgtcttccctaatgtgatgtgactaagccgtagcttctcagcctgcagttaaattgcagaaatgatagggcttacattagttttgtttttatttgatgttgaagatctttgagtcacactagaaacgaggagtatttttcatgtggcactaatgagttaattcataatatgattttttgagacaaagtctctgttgcccaggctggagtgcagtggcacgatcacagcccactgcagcctcgacctcctgggctcagatgatcctcccaccttagcctcccaagtagctgggactacaagtgcacaccaccatgcccggctaatttttttgtagatatggggttttgccatgatgcccaggctgatctcaaactcctaggctcaagtaatccttctgccttggcttcccaaagtgctgggattataagcatgagccaccatgccaggccaatattattccccaaaagaaggaaattgggtgtgaggtcctgctcctatggtcaccatgagatttttttgtttgttttggactcttgcccaggctggagtgcagtggcacgatcatggctcactgcaacctcagcctccctggtagctaggaccacaggtgtgcaccactatgcccagggaatttttaagttttttgtagagacagggtctcaccatgttgcccaagctgttctcaaactcctggcctcaagcagtcctcctatcccaaagtgctgaaattacaggcatgagccaccacgcctggccaccactagtttttgtaatgggagcaggttccatatgagatggaggaatggatttcatgattgtctttgtaatttcttaggtccccaagaaattgattggacatgaggaaaccactctaagtgtgaccactctaaagcattagcagtcagtcatttcactctagggagaaatcagagctgtatatggagaataggtaaagtccccaatatggatatgtatttttatatttgactgcttgtatttttttgttagatgcaaatagtacggtattccgaacagacactaaaaatagctgtcatctcaaagaatccagtgcttgtgtcacagtatgagaaagtagatgctggggaacagcgtttaatgaatgaagcattccagccagccagtgatctctttggaccttgcattctccatcagattggatcacctcccaccctgaggccccccaagactttgaacagttcttcagtcatccttacagaaagataccctctccagacaaacgcagtatttatatacggtccattggtaaatactggtaatgtgctagttttggttcggttttgcaatggttctgttgtcaggaatagtccgggctattggtctgattcagatgggccattttaggatcatttttgatattcattgcaatggtacaagttttgtagccaaacagacctagaacatttttttttaattcatatcaacaccgatgaatgttaaaggtgtattgaaaatttagagttggttttgtttctaatttgaatcctcttactcatagactgggtaaacactgaataatcgtcttaaagtctgtttttaaatgttcttccatattataggatctctatgaagcaccagaattatcagtgaagaatatattaaatggctcacgggctactgtaaagcatatttctatcgcttgagagtaaaactgctagaaccagttcctgtttctacaacaaggtgttcctttagagtcaatgagaacacacaaaacctacaaattcatgcaggtgaattacacaactttgcaatttga

SEQ ID NO: 18784 - DNA, 2300 bp, Homo sapien
agagtgagacttcgtgtcaaataataacaataaaagatgtgctgtaattgtgtccgttttacaaactagtgaagaaatgaaaaagaggtcaagtaactggcacaggtcccacgctagtgagggttttgggattcaagcacagaccaccttcgcccctatgctacaccacctcaggctgtcgggagataggcgcccagtcaaaaggcacatagaagaaagcctacgacttctcaagcattgaagcaggagtggcgcatcggtatgctcaacttcaaactttgagaacagtcatggtaggaatgcattttattcaagaatgggttcaggtgagggtggatatgggcactgggttcaaaagacaaatttggagatttcatgatccagaagggtgaacaaataaggatgggctgaggagatcctcgaagttgaaaggttcaaacacacagagttaatgtcctctaaggagagccaacaaggggttacaagtgctgaagtcatcaagaaaatgtgcctgtctttcctggagactgggaaggagaattaggatgaggaaaatccagaggatggtaaaatgacttcaaaagaactgaggccggacgcggtggctcacgcctgtaattccagcactttgggagggaaaggcgggcggatcacctgaggtcaggagttcgagaccagcctggccaaaatggtgaaaccccgtctctattaaaaatacaaaaattagccggacgtgatagtgggcacctgtagtcccagctactgggtagggtgaggcaggagaatcgcttgaacccaggaggcaaacgttgcagtgagccgagattgggccactgcactctagcctgggcgacagagagactccgtcttaaacaaacaaacaaaaagcaataaaaagaaagagaatggcgaggcccagagagattgaacgtcccacccgaggccacagaactagctcagccctaatgctggccccgcggtgcctttccgacctcactgcctctcctggcatccgggtctcggcctcggagcgccagggacgccacgaggacacgccccacacttgcgcgtctgggttccagtccccgccgcccccaacaaataaagaagggaaagtcctttgggtgactgccccagggagcgccgcggctgtacgacaacctgcggcggccgccgactcatttgggggctacgctggttgcattcgtcacgccgggacgcctctcaaacccgcggcctgccgagcacgttcccacacgggcgaccctggtgacgcgggcgcgtctgtggctctggagaaccaggccgcggagccccggcgagggcagacggggaactggcgactgcgggggcggacggctggggcttgtagtcccctcgtgaccctctactcaggaaaaggcgagccgcggccgccgaactccagctctggcgcgctcaggggcgtggcgcgggcgggtcgtgagtggggcggggcccagagagcgtgtgcgatggagcggcgcgtcgcgcggcgcgaaggggcgtggcgccagtgggcgtggcgtagtgcgaagagacgcggtgcgcacgcgcgtgagggatgtcgcgggtgagtggtgtcgaggcctgttgggtcagggcggttcgcaggtgctgtcagagctgggcggggcagccgggtcgtagaggcgggcgccagtcgcggtcggtggagagggatgaggatgtaggagggacggacgtggcggaagccgcggggactgcgggggcggagtgcctctggggagccagggaggcctttccagaggctcctgggggaagaagaggcgaagcgagagtccccggggaagccctactccacccccagccggagcctgggttgtgcctgcacggaccagagcccacagtgcgagttgctgtaggcaaccagctagggtggccaacttctcccggttggcccgagatgttctggttttgggaccacagcgtcccaggcctccagcccaccacagtgaccatattgtgcgccccctgcccatcttctcccgcagcttccctagattaggcttgggaggcaaggggaggcctcctgacttttctcactgccttcgttaatataaagatgaaggcacactccacaacttccttctggccaggcccagacatgtctgtccttgtgagataaaagcttccatgggagccttccttcctaatcaaggtaggtagaccactggaaggtacatctggttttatattttgtcctgtagaagtcagatttcagcccagttgtgtaggagtgaggatgagcttatgctctt

SEQ ID NO: 18785 - DNA, 2300 bp, Homo sapien
tctcgcagttgagtaagggtgacatgtaagaaataggttccaatcattgtgacaaggacaactgcagtattattacgtacacacaaggcaatgaacaggcagaagagaagttttgtcatgaggcaggatgaggctatagaagaggtgacaactaagctaaagaagccactcaggatgtcagaagacagccgttcagtcaaaaacaggcacagtatccaaaggaactcatttgatccctaaaattctgctaagatgtgctgtaggcggggcgcggtggctcatgcctgtaatccctgcactttcggaggccgagatagatggatcacctgaggtcaggagtttgagaccagcctggccagcatggtgaaaccccgtctctactaaaaatacaaaaattagccgggcgtggtggtgcgtgcctgtaatcccagctactcgggagactgaggcacgagaatcgcttgaacccaggaggcagaggttgcagtgagccaagatcacgccactgcactccagcatgggtgacagagtgagacttcgtgtcaaataataacaataaaagatgtgctgtaattgtgtccgttttacaaactagtgaagaaatgaaaaagaggtcaagtaactggcacaggtcccacgctagtgagggttttgggattcaagcacagaccaccttcgcccctatgctacaccacctcaggctgtcgggagataggcgcccagtcaaaaggcacatagaagaaagcctacgacttctcaagcattgaagcaggagtggcgcatcggtatgctcaacttcaaactttgagaacagtcatggtaggaatgcattttattcaagaatgggttcaggtgagggtggatatgggcactgggttcaaaagacaaatttggagatttcatgatccagaagggtgaacaaataaggatgggctgaggagatcctcgaagttgaaaggttcaaacacacagagttaatgtcctctaaggagagccaacaaggggttacaagtgctgaagtcatcaagaaaatgtgcctgtctttcctggagactgggaaggagaattaggatgaggaaaatccagaggatggtaaaatgacttcaaaagaactgaggccggacgcggtggctcacgcctgtaattccagcactttgggagggaaaggcgggcggatcacctgaggtcaggagttcgagaccagcctggccaaaatggtgaaaccccgtctctattaaaaatacaaaaattagccggacgtgatagtgggcacctgtagtcccagctactgggtagggtgaggcaggagaatcgcttgaacccaggaggcaaacgttgcagtgagccgagattgggccactgcactctagcctgggcgacagagagactccgtcttaaacaaacaaacaaaaagcaataaaaagaaagagaatggcgaggcccagagagattgaacgtcccacccgaggccacagaactagctcagccctaatgctggccccgcggtgcctttccgacctcactgcctctcctggcatccgggtctcggcctcggagcgccagggacgccacgaggacacgccccacacttgcgcgtctgggttccagtccccgccgcccccaacaaataaagaagggaaagtcctttgggtgactgccccagggagcgccgcggctgtacgacaacctgcggcggccgccgactcatttgggggctacgctggttgcattcgtcacgccgggacgcctctcaaacccgcggcctgccgagcacgttcccacacgggcgaccctggtgacgcgggcgcgtctgtggctctggagaaccaggccgcggagccccggcgagggcagacggggaactggcgactgcgggggcggacggctggggcttgtagtcccctcgtgaccctctactcaggaaaaggcgagccgcggccgccgaactccagctctggcgcgctcaggggcgtggcgcgggcgggtcgtgagtggggcggggcccagagagcgtgtgcgatggagcggcgcgtcgcgcggcgcgaaggggcgtggcgccagtgggcgtggcgtagtgcgaagagacgcggtgcgcacgcgcgtgagggatgtcgcgggtgagtggtgtcgaggcctgttgggtcagggcggttcgcaggtgctgtcagagctgggcggggcagccgggtcgtagaggcgggcgccagtcgcggtcggtggagagggatgaggatgtaggagggacggacgtggcggaagccgcggggactgcgggggcggagtgcctctggggagccagg

SEQ ID NO: 18786 - DNA, 2300 bp, Homo sapien
cacttctgaaaaaagatgttaactacctaacttacaagtttctctcctctttgttggagttcagattagcacctggggtcaatgcagaaacagtgctcggggacaggttctatgccccaatcctgggagaggcgagtccttgcatggttagagaacagggcctcccaaacactagatgagatgatggaaaaattctccatccagggcaggcttttaccatatattttgcctgacagcactgctcagtgattctgactcttatcaatccacagatattggaggtgagcctactctacttgtatattgtaggttgtccaccctctgggcttgccagagccacaggagataatcctactacaggcattgtttactgcagccaatctactgagtcgaggcttctcggtcattaacccaaccccagggagtaactgattagtaccgattttaaaatttaaacctgttcgggagtttcttggaatgctgacctcttacctccgctcccttatacatacgaagtttctgagccacaggagcccaaagctacgttgcattgcccaaaacagggacagaccaaagtggctttttccacttgaaactaaatactaagaatgaagaggtcggctctcgggggtcccggttaagcagtttctctgccaacccacagctgtcacttgtggcttgtctcctggcctcctttcaggtgtcctggcctgaatctgctgttaggacagaaaaaaagtccctggacgggtcatatcctctgtaatctggcaggaaagctaaaatttgcgtgctcccattcctcgttgtgtttgtgtatctgcttccttgttgggaagagcctacatcacagtgtccggtgtaggggattttcaccatgacctcaccctcctgctgccactcgctaattccggcgcggccaagcgtccctgaagtcacatcacagcccaggtggaatgcacgagtgagccattaaatgcccctggtagcacgtctcaagtgaacatcaactccagttctttcccctcacagagagccctggtaggggtctgaaaatgccagaaagagctggaagtgggggtggacgacgtctggttaccgttctgggattcggagactagaaggtcaagggagtcactttaagaaaacacaccaggcctgggcctggtggctctgtctggaatccccgcactgtgggaggccgaggctagaggatcgcttgagctcaggagttcgagaccagcctgggcaacataggggggagcccctgtatctaaaaataaatacaaaaaatttagccgggtatgatggcacacgcctgtactcccagctactcgggaggctgaggcggaaggatggcttgaacctgggaggcggaggttgcagtgagtcgagatcgagccaatgcactccagcctgggcgacagggtgagactccgtctcaaaagagaaaaaataaaatgaaataaagaaaatgcaccaaaggcctgccaggctcacgccggctgttctgttcgaataactttcgagtccgtggcctcgaaatgggtcgggtgggcggtgacagcgggcagcgggcgcgcaacgcgggagaaagggaggctaagtgggagcccaaagaaccgcgtccgggacctggtctccggcctcccggccttggggaaggagcccttctgcccacaagtgggctcaggccatgaaagggaaacagaaagtcgggctccccagcctggcccacgtgaccgcggttcctcagccctccccgcgcgcccggccgcggctgcgggcgcgggcacccgagcgacacatcgagctcgtgactcgccgcccagggcgggaggcggagaagcggccgcggcgtgcgagcgcgcctccgggaggcagcgggagcgcgcacgctccggggccaccgcccctccggggccgggcccgccctccttccctccctccctcccccgctgtcctggcccgccctgcccggcccgccctgcgagtcagttcgctggttccctccctccctgggcgcgctcgggccgccgccgcgctccccgccctcgagcctcggtgccggagccgcccgccgccggaggaggaggtggagggagccggaggggcccgccgaggcggcggcggcggcggcaagatggcggacttcctgccgtcgcggtccgtgctgtccgtgtgcttccccggctgcctgctgacgagtggcgaggccgagcagcaacgcaagtccaaggagatcgacaaatgcctgtctcgggaaaagacctatgtgaagcggctggtgaagatcctgc

SEQ ID NO: 18787 - DNA, 2300 bp, Homo sapien
ttcatgagaaaaaaaatcaagatattccagcattttctttggatctcagctcacaccaggagcatacttctcagtggttcaatttgcttggcaggatctctggtcttctgcttggatggatctctgcagggtccagcgtcctctaaattggaggctctgaatcagggattcctgaaaaggcacaagagaggcccaagcatgaacctcttgaaattgtttgcaaacttcagtcagtgttgtgtacatgtgcatgtgtgtgtgttcctgagtgtccatagctttcatcagattcttacaggtaaatatcacccgagagaatggataagaaccactgcttttttttttttttgagacagagtctcactctgtcacccaggctggaatgcagtggctcagtcttggctcactgcagcctctgggttcaagtgattcttgtgcctcagcctcctgagtagctgggattacaggttgctccaccatgctgattgatttctgtatttttaatagagatagggttttgccatgttggccaggctggtcttgaactcctgacttcaagtgattcacccgcttgggcctcccaaagtgctggaattataggcgtgagccatcacacccagccaagaaccactgctttaaagggacattggttgactgtgccttcctaaggtaaaggccttcttgttttcttccaacttaaacattttatctgctacactcaataaccatcgagtatgtttaagagaaagtgctttatataacaaagcagaaaggctcttgataataacttagaggcttcatccttgcatttttctcaagatgaaaacgctaacataatgagctgtcaaggtaggttcatcaattgtaacaaatgggccactccagtggaggatgttgatcatgggggacgctgtgcgtgcgtggggagaggggatatatgacgtgtccctataccttccgctcaattgtgctgtgaacctaaaactgctctaagaaataaagtctattaaaacaagcaaaccagccagctgcagtggctcactcctgtaattccagcactttgggaggccgaggtgggtagatcgattgagcccaggagtttgtgaaactccctctccacaaacaatttttgtaaaaattagcggggtgtggtggcacgtgcctgtagccccagctactggggaggctgaggtgggaggattgtttgagcctgggaggttgtagctgcaatgagccatgattacgccactgcactccagcctgggtgacagagcaagaccctgtctcaaaaaaaaagttaaacaacaacaaacccaacaaccaactaaccgaaacactaagaatcagagaagtaaaatataattcgcttcatccagacagctagcccggtgaggactacaaccttcctctcttccttcttcacttctttgctctctctttttaaacccacatcttagcaattcctctgctattgggtcattaaatcgccacctctaatttttttttctaagcatttattgagggccaagcactgtgttacacatctcctcattaaaatggtatagcaaccttttctggtcgatattatgatcccatttttcaatttttacttttgagtgaaggacattgattcttagagattgtaaggaacttgcccaaggctgccggctggttagtggcagagctgggatgggaaagtccgtattttccaccgcgctgtattagtgagggctctttgtgtcacttctgtgcataactccgccccaagttaaaaggctcgctgctctcgacaggtcctcctcctcctcccgctaggtcctcctcctcctcccgccaggtcctcctcctccttctcctcccggggccctgccctgcgggtctcacctgctgctccgcggggtcccggcgggggccggatagcgccccctggcggcaggtgggcgcccgcgcagcgcatgctaatgagcccgcggcgccgctcgcggattggctggcgcggattccagctgctttccaagtcagcggcgcctagtgagagtcaggggggcccggcccgcgccctccccgcccagccgcctccccgtcgacgcccagggctggggcgagccaggctgcctttcgaacttggggggcttctcctcttgtctcccactggtgctctggctgtgaatccatccaggggccaggatgacaatccgacaccaaggccagcagtacaggccgaggatggcatttctccaaaaggtaaccctggcccctcacctggaccctgggaggagggcgggggaccgcatctgcga

SEQ ID NO: 18788 - DNA, 2300 bp, Homo sapien
aaaaagtgaacaggatcagcgattttgtgtttctcaacaatcgctcttcagctttgcaaagggaagagctgaatttgaatcctggcccatccaattactgaccaggaggtgttgagaagtttacccacaacctctcagaagctttgtttcctcagctaaaaattagtataataaaatctccttaccttaagctttgtaaagactcaaagaagtataaattgctttgcagtagttgctaggcagttatcattatgtaaaagtacagctccccctttgagcagagggcataaaccagtagatgctattctgaataacccactccagcaaggctccaacagaaggaagtaattataaagtattagatttgaatgtaagtccactctggccccagggtccttttctacctgaaatgtgcatcttctaaaacagtgccttaggttggaagagaatgggatcaaataagtatgactgccaatgcatttggatcatttggggagtgctttcaattttttagtggaaaaaaatgctattaagcttagaaaatgtccccattcttctaggcccccaagcatgctgaagtcatcatttattacacatttactgagcatctactctgcatcggacattgtgctagggaagatagacctggtcccctgccattaatggtgccttcatgttgattcatacattaaacaaagagtcacacaaataaggataaaattcaaatggcgatcagtgctatgaaggaggaagtcagggtgtataagagcctaaaacttagagaactacgtgagccttacctttctgagataactcttcctaatcccctatgcaggaaaaagatttcttgtgaaaagcaatgatagaagagcaatccggggaagcaaaatgaaacccagcctgagttagaaaggagagaccagtacatgacattctagactggactctcctttactccttttcaatgggctcatgggccagtgtttattttgctgactgcctcaaaggaagtagtgtcctcctcagacttaaccactcttttccaagtgaagacttgggtgggttaagcagcatggatattaacaaggcaggaattaagagggtccgcgtgaggccgggtgcggtggctcacgcctgtaatcccagcactttcggaggccaaggcgggcggatcacgaggtcaagagattgaagtgatcctggccaacatggtaaaaccccgtctctactaaaaatacaaaaattagctgggcgtggtggtgtgtgcctgtagtcccagctacttgggagactgaagcaggagaatcacttgaaccctggaggaggaggttgcagtaaactgagatcacaccatgcactgcagcctggcaacagagagagactctgtctcaacaacaacagcaataacaacaacaacagcaacaaaaagaggctcctcttgaagtataagagtcagtaccagccagcccctggacacaaccaaacctagaagaactgaggctgggatcaccaccttgcccagtctccaggagttacatggagcagaaaagtggtgcagaggaagcacggcccactgcaattgcagatctatgtattttagccagagatagatctgaatggtttccaggagcttctaagagcctgaacatgaagcccctcttggaactgtcctttctttctctgccttaactcaaaaagttgagaggggacaccctgaagcttatccccagtatgaccctgctccaacagcttcagcaaggggatggggcctgattccacagggcagctcaactcggggactcagcttgcagtgcatgctggcctcaagcctttccattatgtgctttatttttggtaacattggtttagttttcaacttatattattggtcaaattgttatgactacttggggaatgcatctcaccattgcttcagagctctcccctgtaacaaaagaaaccaacacccaagctctgtgctagtttttctatctcttctctctttctctctctcttttttcttttttgagacaaggtcttgctctgttacccaggctagaatgcagtggcatgatcatagcttactgcagtctcaatctcctgggatcaggcaaccctctcacctcagcctcccaagtagctgggactacaggtgcacgctaccatgcctggctaatttttttgtacttttagtaaagacggggttttgtcatgttgctcgggctagcctcaaactcctgggctcaagcgatcctccctcctcggcctcccaaagtgctgggattacaggcttgagccac

SEQ ID NO: 18789 - DNA, 2300 bp, Homo sapien
acacaaccaaacctagaagaactgaggctgggatcaccaccttgcccagtctccaggagttacatggagcagaaaagtggtgcagaggaagcacggcccactgcaattgcagatctatgtattttagccagagatagatctgaatggtttccaggagcttctaagagcctgaacatgaagcccctcttggaactgtcctttctttctctgccttaactcaaaaagttgagaggggacaccctgaagcttatccccagtatgaccctgctccaacagcttcagcaaggggatggggcctgattccacagggcagctcaactcggggactcagcttgcagtgcatgctggcctcaagcctttccattatgtgctttatttttggtaacattggtttagttttcaacttatattattggtcaaattgttatgactacttggggaatgcatctcaccattgcttcagagctctcccctgtaacaaaagaaaccaacacccaagctctgtgctagtttttctatctcttctctctttctctctctcttttttcttttttgagacaaggtcttgctctgttacccaggctagaatgcagtggcatgatcatagcttactgcagtctcaatctcctgggatcaggcaaccctctcacctcagcctcccaagtagctgggactacaggtgcacgctaccatgcctggctaatttttttgtacttttagtaaagacggggttttgtcatgttgctcgggctagcctcaaactcctgggctcaagcgatcctccctcctcggcctcccaaagtgctgggattacaggcttgagccaccgcacctggccttccccatttttctcttaatccatatctcagacaggaatctgtatctctcactctacagatcattctgtaggcactatgctaaactgacaccagtttcaaatttagtccttaattgatcttggcctttaggtgagcaaagttacagtggtaaattacgctccttcgcttacaaaatctcttgcttggtatttattccccaggggttacatagaatagagtggaggcagtagacatggagaaatcctatcttttaagaaagaaaaaaatgggcatttttctcatggggaaggatttttatttttcaaatgggtgtttgaactgtaatgatttcatgacatctgcctaacggttttgtttctttgtcttacagaaacaaacagtcgttgctgtcaaaaaagaggtaattagtcttacacttccagtgaagaatggttttaaatcttctaacaggttatatgtactttgttttaccctctgcgcttggtaatgaaatgaaaaccacgtgcaatgttcaaacaattatttccaaattcacggacagcacagagtgacgaagcatcttctgtaagctctggctggggctggggctgaggctggcactcagggtctgaaaaacccctcgaaggcacagagctgaggggtggccagagaggactgtggaaccaatgctgcaggctgcagagactctacatccccaacgtggcccctgcacctatcattacagggccagaatctacccaaggtggcaactgcctattttggcaaatcttatgtctggggcccaagacagagtcctgggaaccatggggcattgagctggggtgtacggttagctatctgaacgtggaggaaggtggttgaggaggggataacttgctttggccaatgctgcagaatcaggaagtttaaggatgtcacctgtggtggggaccactctctgcttctgtctgccagagacatgtgagggaaaagccaagcgtttgtccccgtgtctcagttgaatgctccttagaacttttttttttttctgctgatgctttttcccagactaatacataatggctgaaggaggccactgatttgaagtctgtggtcatctgtccactgtgggcctgacccactggtactgagggggctggctctgggcatggaacgggatgtggctctgggtaaatggcttctgggtttggaggctgtgtgtagtgacactgaagggtgggagggggttgaataccttctaacaactgtgtctcttccagatcatgtattaccaacaggccttgatgaggtccacagtgaagtcttctgtgtccctgggagggtatgtccctgatttgttgatcttgctaaagtctgatgaacaggtagacaagaggagaacttctgcaaactcgacaagtcctgggctgacagactgaagattcagcagaactgtgagggacaaaaccagtctcttggggg

SEQ ID NO: 18790 - DNA, 2300 bp, Homo sapien
ttgcatttgggccgggggaccgggccggaggggctcggaggacatgagagcctggcttcggcggccttcgtcttccaggtaacggggccgctccacctcccaccgcccgggtagcgcggtgccaacggcagccccacttctccgtgggccgcgccgcccagccccgcggctcgaggctctggtcgggttcagcgtgcacccatcccagatccggggtccctggcttctcgcccggggttgcaccccgttcagcccctacccttcttagtttgatcttttccgtgctagggaaagcagcttgtttattggttagataagacttttttctttggaaaaaagacaggcttgaaatcagtagagtttgggattcttggcacaggcagtagtggcgtgagacggctggtgatccagttttgtaggtttcgcggatccgggaggtgggttgggggcacgggggcgacggttccgaggcttctcagctctctctcaaagtttgaagatgaaagtctcccctgagtgagttggtttctggtttggggggaggtcagggaagacagaggtgttgactgagctggattcttggtgggggtagggggcgcgtagcgaacactcaaatctgagttggggagggggtgtttgcgtgctgaatctgggagtccgggagcccaatccgcctatgctgggcgggcttctcttgggccaggatcttctgaatttttaaggagtgggaagagggagcgcagagggagggggtgggtggggagaatgggaaccagatgccggggaagggcacgtttggagctcgagttatctgtgcagggccgagtggggaaatataccgaaattggtttcacctgcacacagcctagcggctgggagtgcgcctttttggagttgatggtatcgggggaggggaagggagggaaggcgaggcgcgggctgagctgccctgcgtgcgccctggccgagtgggtttttggaaggttgtgtcttacacctccagtgtccccctgccgtccccagctcttgccttcctctcaccttccccgcctctttcccaacagctccctcccacccccaaccccgaaaagtgtgcagggagctcagatttcgcttttgaaaagcagcgcctgatactttagatgagcacctcgcagatagctgggttgcttgatttgaatttgaggagttgaaaagcctgtttactttcttgctttgatgttgggtagatctggttttgattagatcaatacccttttctctctccccacctccccccttccttttctttccagagaggaggttcagatgagcccctgctgacttgagagagacagagagaccacgccgattgctgagaggaactggaagaagaaaaattcccagactcagtgggaagagctccctcaccatgagtagcgctatgttggtgacttgcctcccggaccccagcagcagcttccgtgaggatgccccgcggcccccagtgccaggggaagaaggggagaccccaccgtgtcagccaggggtgggcaagggccaggtcaccaaacccatgcctgtctcttccaacaccaggcggaacgaagatgggttgggggagccggaggggcgggcatctccggattcccctctgacccggtggaccaagtccttacactccttattgggcgatcaagacggtgcttacctgttccgaactttcctggagagggagaaatgcgtggataccttagacttctggtttgcctgcaatggattcaggcagatgaacctgaaggataccaaaactttacgagtagccaaagcgatctacaaaaggtacattgagaacaacagcattgtctccaagcagctgaagcctgccaccaagacctacataagagatggcatcaagaagcagcagattgattccatcatgtttgaccaggcgcagaccgagatccagtcggtgatggaggaaaatgcctaccagatgtttttgacttctgatatatacctcgaatatgtgaggagtgggggagaaaacacagcttacatgagtaatgggggactcgggagcctaaaggtcgtgtgtggctatctccccaccttgaatgaagaagaggagtggacttgtgccgacttcaagtgcaaactttcgccaaccgtggttggcttgtccagcaaaactctgagggccacggcgagtgtgaggtccacggaaactgttgacagtggatacaggtaagactttgacgggggcgggtgggctgatgctgtggactttgcagatgttttaagtatggtggatgggtgga

SEQ ID NO: 18791 - DNA, 2300 bp, Homo sapien
ggagtgggaaaaaagatattcctatcggtttaatatgtaacatatggcagaagaggggactttggaagagtaacgggtatgcagttgtttgggagagatggccaatgtgtgccgctacgagggtcttatggccagcaggttaggaagctggacctaggtcttcagggcactgaggtatgcctcctaactggtgttagcactcaggcctatactggcggattcacaccccactttcacacatgcacaaacgcaattcatccaccaactgcagtcctatatttacccgaactcagatgcacgtgcacaagcgcgcacaggcatgcacacgcctccagcggctgggcccgagtccgccctatgacagcgggccagccaaccccagggccggaactccctttataaagtcctccaagcccaaattcccagggaaacttgaatagaggtagaaaagcgtttgatgatagaaaaaaaaaaatctgcttgcttgcagttcttgcgatggccataatgctaccagaaactgttgcattccagagccggggagagcgagggcaggcagggggaggaggcgggagcaaagaggccggagaacttaaaagaagaaatcagaactcgggctgagaatgccctcggggccgcggggggctggcagggggcggaggagaggccggggaagggttaacgcgggagcggagcgtgcggcgggggcgggccggggcggggcggggcgggcgcggggcgctgtccctttaaggcgggcggcgcgggccggccgagcgcggctgtgattggcgcggcgggatcactggctccgcgagcctggcccgggggagtcggctggagccggctgcgctttgataaggtcctggcaactcagtaacagcccgagagccgggaaataaaaataacccctcagagcgatggatttcggggccgcccggcggccgaggcgcccgccgaaggccctgctgtaaaaggtgggggtggaagctcggccccagcggagccgcttcaaagaaagcccccctcttacagggggcgaggtcgcgccgagccgcggcgtgggcgcggggggcgggagggggcccggccaggcggaggccgggcctggaggggggcgcgggcggggcggccctgcggagcggtggcggggctgcggggggcggcccggggcgcggccggcgcgtacctccctttcaggaccgtgcgctcggctcgcgcctttgaagtgcacagttaaatccacagcgcagtttttgttggaagcgcccggaggacatttggtgcgccgagtgactgctggaaacaggacctgcgttgaaagccgggccgggcgggggcggaggcccgctcggatcttttgcataaaaggggcggcggggcgcgccgttccccctccccggccggtggctttcgctctgaacccgggattgttgtttcccgcaccccctcccccgccgcacgactccccatgttccccgacgccgcggccggcccgggggggcccggggctgccgccgcgagccgagccgggggccggggccgggcccctgccaggggcgcctgcgaggtctcgccgccgagcgcgcgcggggatcaatggtgagtgccgaggccgaggcggccgggcggaccgcgcgctttgatgtgcggggcggccctttgaagttggcaggccggctatttcggggcgcgctaggggccggcgcggaggggagcggcggacccggcgcccagcgttccggggggcttggccgggcagccttgcgcgccctgcgccggagccccctccccagcgcggtgaccgggttggcggggggcccagagaggagacttatccgagtggcggcagtggcgggggcggagagggggcagataccccccgggggtcgcgtcgctgtcgcggttatggatgtgagtcggcgtgtgagtgcgcgcgggagtgcctttgggaggtgggatgaaagggtagcggcgccccccgcttgccctcccccgccccccgcctctcctccgccccatcctctcctcctacttctcttccccctccccttttcccctccctgccgcgggtccgcgctaaggggcccacagcgctggcggaggctcagtctgcgcgcaggaccggcccaagtccggggcgcccgtgtccctcgcgtccctcctcccggcccgggcccctcgcccgtggccgccccggccccttttgcggagaggcagagactccgcgcgtcgccatttctggactaggctgctgctttctgtgctttttctgcgggcgcctctgcaaacggcggcgc

SEQ ID NO: 18792 - DNA, 2300 bp, Homo sapien
cagggccacatttcagggctggtactgctgtctttatgccaacctggctgcctggggtcgagagcctggagctgcagaccatgggcaccgaaaggcaggttttggggaggagcggccacctgtcatggcacccacgagccagagtccagagtcttagactagaaagtctaagagctttctagtcccttgtcacagtcccttaggctgagggcaggtggcgcacagtcctgccacctgcccctttccagcagatcatgggtggtggatcttcctcctctttttttcttttcttttttttttttgagatggagtcttgctctgtcgcccaggctcactgcaaccttaacctcctgtgtttaaatgattctcctgcctcagcctcccgagtagctgggactacaggcgccccccaccacgcctggctaatatttgtagttttagtagggacagggtttcactatgttggccaggctggtctcgaatgcctgacctcaggtgatccgcctgccttggcctcccgaagtgctgggattacacgggtgagccaccacacccagcctcttccttctctttttctatggatacctagatagagccacaattcttgcatgttttaaagttctgaaggcctaatgacaggccatctcgcatttaaaagggctcgtcatccattaagttggagagtaagagccttgcacagctctgaggccaggactctgcctttcacttcttggatctctttggttcacacctttatgtgtgtgtgtgtgtgtgttttttttttttttttttgagggagtctcgctttgtcacccagcctggcgtgcagtggtgccatcttggctcactgcaacccccccacccccgtctcctaggttcaagcgattctcctgcctcagcctcccgagtagctgggactacaggcacgtgccaccacacccggctgatttttgtatttttagtagagacggggtttcgccatattaggcaggctggtctcgaactcctgacctcagatgatcctccagcatgggcctcccaaaatgctgggattacaggcatgagccaccgtccccggccctttgttttttaaaaggaagaaaagttaattattcgctcataacataaggaatcattctatagcagcagcagaataaatacacaatgctctgggtttgtgacatattttctcattttaacggagaagagaaggttgtgtgtgccttataaacgtttttgggcaaatgtgggagaaattcaaaggtgacaatggggtgaggagttttcgatacattaaaacggcatgcatgccttgtcgtttggagtgggaaaaaagatattcctatcggtttaatatgtaacatatggcagaagaggggactttggaagagtaacgggtatgcagttgtttgggagagatggccaatgtgtgccgctacgagggtcttatggccagcaggttaggaagctggacctaggtcttcagggcactgaggtatgcctcctaactggtgttagcactcaggcctatactggcggattcacaccccactttcacacatgcacaaacgcaattcatccaccaactgcagtcctatatttacccgaactcagatgcacgtgcacaagcgcgcacaggcatgcacacgcctccagcggctgggcccgagtccgccctatgacagcgggccagccaaccccagggccggaactccctttataaagtcctccaagcccaaattcccagggaaacttgaatagaggtagaaaagcgtttgatgatagaaaaaaaaaaatctgcttgcttgcagttcttgcgatggccataatgctaccagaaactgttgcattccagagccggggagagcgagggcaggcagggggaggaggcgggagcaaagaggccggagaacttaaaagaagaaatcagaactcgggctgagaatgccctcggggccgcggggggctggcagggggcggaggagaggccggggaagggttaacgcgggagcggagcgtgcggcgggggcgggccggggcggggcggggcgggcgcggggcgctgtccctttaaggcgggcggcgcgggccggccgagcgcggctgtgattggcgcggcgggatcactggctccgcgagcctggcccgggggagtcggctggagccggctgcgctttgataaggtcctggcaactcagtaacagcccgagagccgggaaataaaaataacccctcagagcgatggatttcggggccgcccggcggccgaggcgcccgccgaaggccctgctgtaaaaggt

SEQ ID NO: 18793 - DNA, 2300 bp, Homo sapien
aagttgctgtaagagggaaccccataatgcagtggagaaatgaaataagaaagtttatttctgttttgcgtaagaatccagatgtattaggatggcccagggctaggatcaaatggttctctttcatgaggtcacttaggaacctaggctgactagtgagattcctcagtcatcctcaacatactgtctccatctctgctttaaaggctgctcttctgatggacaccatttcttaaccagcaggaagagaggaaaaagatgaggaagacaaatatttccttttagggaattgccatggaagttgtgcatatcattctgacattttactggagaaaacagtcccaggggcacacctggggaagcagggacctatttgcatgcactgtgctaaaagttgcagggagactattttgaaaagaaatgaagaacaggtactggggaacagttaacagactaatggcacacacccattgctttcagcattttgtgcttaatttttgtacaatggccctaggcacttaggatatagcagtgagcaaaatggcatatattcctgtcccctcagagctcattctagtaggagagatacattgttagccatgaacatgctgcataagtaacttatatagaatttttttaagtgtcaaagtgctattgaaaaggaaatgatagagaagattcagggagactctcgagtaccagggctggtaccatttatatagtgtggccaaagctggcttcatcaagaaggtaacattcaaacaaatttgaaggagtcgagtgaggcatgttgatattcggaggaagaaattgctgatagaaggaagagctagtgcagagaccctaatgcaagagcatggctggcattgctagaggacttaaggaagccagtgtgacgagaacatagtggacatgggggagttggaaaagacattagaggcattccaaggcctggtcatgtagggcctttgaggctgttccaatgactttgactttaactctgagtaatgagagagtaagagggtattatgccatgaagggacatgatctgacttaggctttaaaagatcattctagctgcatgagaacaaaggtgggaaaccaatgagaaggcaactttggtaatccagatgagaggaaatgatggtggcttagaccagagtggtagctggggaggtgatcatattctggatatatttttaaaatatactttaagtaagagtaaatatgattttctgatggatttgataggggtcatgagagccagaaagtaagccatagataagcttcgtgtgttagtcagggttctctagagggacagaactaataggatagatgtatatatgaaggggagtttattaaggagtattgactcacaaggtgaagtcccacaatgggcctgtggcaagctgaggagcagggaagccagtccaagtcctaaaacctcaaaagtagggaagccaacagtgcagccttcagtctgtggctgaagacctgagagcccctggcaagccagtggtttaagtccaagactctaaaagctgaagaacttggagtctgatgttcaagggcaggaagcatccagcatggcagaaagatgaaggccagaagactcagcaggtctgctctttccaccttcttctgcctgctttattctgtccatgcaggcagctgattagatggtgcccacccagattgagggttggtctgcctctcccagtccactgactcaaatgttaatctcctttgccaacaccctcacagacacacccagggacaatactttgcatccttcattccagtcaagttgacactcagtattaatcatcatagttacacacaggaaaacatggaaaaaatatgctagttcatttctctgtgagatgggatatgtgaattttgaattgtatttttctgtatttcgaaatgttctctattatgcactttgtaagctgaacagtgatgcacagaagtcaacctttcgtcatactgttgccttgtccctaagtcctagggcatctttagcctgcttcctattttctgcccctgggagaccagaatcacaaagaaggtgtgctggccctttagccctggcatcacattagctgacatcaggaactgagccaggcagtgtggttgtgatgtcactatctcacctcacccccacctaagagattgtggtggggaatctcagacactctaaccctctgggcccaagtcacctttctatcaggggagggaggctgtgctctcactggcttcttgttagaagttctgcctgccctacagcctgcactgag

SEQ ID NO: 18794 - DNA, 2300 bp, Homo sapien
gaataggccaaatgaagtttaggcagtactaatattctcattgcgtgaagtgaggaattaaaagatgctacataatttctggaaaaatgaaagtttagttattctattgaaagttatagaaataaccaataagagaattaaaaattgtgacacaactgtattttgaagtgaaaaagagtaaatggtgtaagtaaactaaatattttttatagcagaaaatcaatggattgtgaataaattaatttatgaagtacgtaaaggtattaaggtcacgatcatcagagttgaaaacagataactgaaagaataaaatgtgtctgcctctggggagtgacttgcagatgggtagtcataagtcataatgtaatggttttattaagggcatttctatactacttggtttgattatgtgtatttttaaattaaaacaaacattcagtggaaaaagtttgtaaagaaaacttttggcaatgcattggtctaactgttctttttctatttgtgtcaactttcctgatatgttccaaagaattatattctgtggtttggacaaatttctgactaaataattcatcatcaattttttttcagagaaatttggagatatttaaaagacattttaggtctctatctgatgttttggaatacagctatcttgccttctgtaaaacattttttgataccatcatttactatgttcttatgagaatggtcagtaagatatatctactgtcagtggaacaaaggtatatacattttagggttaagaagacaaggataagtatcatttaggtaattactgtcatgaacagttaaggtagcatagggaaaccatagatactttaacaaagattgacacatttttgattacgatgtaaagaataatttacaggcatagttttgtcaatatagagaatacattagataatccttgtaatatagttgtctacaatgtgggtagtaagttgaagatatcaaatctaatagaaggattaggaagcatgctgtaagaaatagaaactgcatggaaaaccaaaatattagtggcaatcaatcaaagacagattgagtcaaaattttcataataaatcttgaacatcctgttgaaatgtaattttatgatgcaataaaattttaagagagaagcaaaattacaggctttaataaaatgacattatttcagagagaaaatttgccaatacatgggaagtaccttcatctggatgaaaccaacatgtgctttttcccactaatgttactttggatttcttttgtattgacatgttagctgaatcagtgttattggtccagctggcaattgttgataaagtaaaacaaaattaataatggtcgttaaagattttgttaaaaatttaagaaagtgccctcgtcactggaatctaagcctctgtaaataatttctatgatatctagagcaataagcttttgttaactaaaagacagtgctgtctaaaagtacaaaaaagtgaaatcagaaggtatgggtgtcaactctgattcctacttgcaagatttgtgaactaaagcagataccttaatcccatctttttgagcacccatttttatcattttcaatggaaatgacaatacctacatatttataaagatttcaaataactctgtgaagctacctgtaaaattttaagcaaataaaatatctgtacacatatgcatacatataatggttttctgaaatgtagaattgaaatgcagagtattatttaactgatgtggtttgtattaagcagagcattttaatcaacagcatctactttattatatacactcaattgtaatcacacaggactgggaaaaattctttccttatgacatgaaattggtatatgctatatacccatattcaaggcatcttttactggacaaagaacaaaaaccaaacaaaaacactttatataattttcttctaataaaagtaatatgtagtttctgatttcttggatcacattcttagttaagttcctgcctccttattggctagttctttgctttggaactacatggaataaaggttaggtcataaatatagtctgtatccatggcaacatgcatttctctttcaacattttgcaggtagttattttcctgctagaacttacttaggtgtgctgggggataaatggatatttatttactagaataaatctagtaatctcagtactgcagggggtggcaaagggaggagaatagaagctggatagctaaggtaagcattaatagggaccattaaattattaggagagtcagatgatgggtcagaa

SEQ ID NO: 18795 - DNA, 2300 bp, Homo sapien
cgctgggagtagttagaatggaaccgaagaaaagaagaagtttttaagagtgaatcatgatttagtgaatgagaagatctaggcaatgaataagagaaaaggagaagggaaggttttcatttaggattttctgtatggaacttactggctctcccccagatcaaacctgagtatatctgagtgaatgataatggctttgacaaattaggacagccattacatagataagttaaccaattaaataaatatttgtaggttcatttccacccttaaatgttggtaaaagcaattataaattcgtttaggttttttctccaaatattaccagtgtctagaaaaatattttaaatttatttccaggtcttcttctttaccctgattcaaaataggtaattcaaacatgcctaaggtttaaaaatgatgaggttttaaaaataatgtttctaaaggcattttgaattgcaatcagatcttagtttaattttggaagtgtaaagtaaaatatattgtagatggtaaagacccacattaggttaacttggattcatctcctctccttatttgttgtgtagttgagatataagagtgaaaacaatttttagggaaatgtttacaaaaattttgctgtctcgaagtaaatgaataaaaacatatttagtaagctatgataagattatatccaattaaaaatagagctgaatttattttactatccagaagagatgaatatattaaacacattttcacttaaatcagtgactgtttaaataattttagtaaagaagatagagaaatgatttataaggcaaatattttatataatttaaaacctatttcattttagtaacataaacttcaaaaatgatttaaaagtatctagcagcaacaatatattgaaaggaggggttcctttatttattcattcagtacacgtctttttgagcacttgcctgtgtggcactgttatgccctgtggataaaaagttgaaatctctttcttctccgtgaacatagtctcattaaagaggaaacaggcaagtaaatcactataatgttaataaatgatttaattgagaaatactcaaggtttcatgggaataaagaggaatttctttctgtccctgcaaggggagaaatctggttgagtgaatcatgatttagtgattctttatgactggttcataaagaaggtgtgatttttcagttgagagtctaaggatgagtaggagtttttcaataagggagggaagggcattctatgtagatagatgatcatatttaggcagtgatataagaaagaatatgaactcaggaatctgcatataggttggtgtgtttataatagtggtttaaaacatgcaagtgggaagagatatggccagaaccatgaggaactcttgtccatgtcagaggctttgacctatacttatcttttagatgagaagagctgtagaacgtttgtaagcctgggcataactaccagatttgcaccagtgaaaggcctctttacttatttaaatttttaaaatttcagtagcttttaggttacaagtggttttggttacatggattcattgtacagtggtgaagtctgagactttggtgtacccatcacccaagtaatgtacattgtatccaatatgtagtttttagcccacacccccttttccaccccctgcttctcaatctccaaagtccattataccattctgtgttcctttgcatacccatagctcagcttccacttataagtaaaaacatatggtatttggttttccattcctgagttacttcacttagaataatggtgaaagatttcctcaaagcaacagaggactccttggaggggaatgatgcttgagaccaatacactgttacaattgtctagggagccagtaatgatgaatttaaccaaggctgtctgtggtggtagaaatcgagaaaaagagcaaggaataaaagatattttagaagaaagcattgagaagacttggtgaaaaattgaattacctactaactggtgcactaaattttatatcatcaaactctatgtacctagaattggtttaactatgttttcaaaatttttgacagttcagacactgatacgtgactgtcaagttatcagagagactaaagaagaccagattgcagagctgaaaaagatatgtgaacaaagtacggaatctctaaataatgactgggaaaaaaaggtaagctacataaaatactaatggaaaacataaaagtttatgcttccaagtaacatatttaattataaaagtaatagatttcacaga

SEQ ID NO: 18796 - DNA, 2300 bp, Homo sapien
cttgtgctattattgcaacttttctttaagtttaatattatgccaaggcaaaaagttataaccagaagaatagaatttagataaatatctttggttgtaagaacagagatccatcaagctacataaaataaaaagatacacaaaaatccttttgagttcaactaaccctagtgtcattgagattgttggagcctgagtttgcttccctcgtatttcagatgctatgtgatttctaatctttgtgtatttgctctacttttttctatatactggattggcctgctttctcttggttgctgcactttagaacttgggtttgctccccaaaatagctaacttggtgtgttagttcagattcttgagagagaatctgaatgattttttgctagctaatggattgcttaagcatatctcaggtatttattcctaacttggtcaataaataatgaggtagggccggtgagaggtgttgggttggggttatggtagcacactcacatggtatttagggcttaccctcaaaagctgagggtatgacaagttctctagaaggtgttatgggaagatctggcaatgaatcatgtctcttagacctggccagctttgtcatactgttttttggctttagttcccttttaatagaccccaaaaatgcttctgtgaaggatctttacatggaattagattgtctagcctcctttctgcaaaaacgaagaagaaatattgtgtgatttagaggcaagggaattgaattttttttttgcatagcaaatggttaactgtctctttctccaccattcataacatttaagtcatgaatttgtattatgttaacttttgtttgtgaaacataaaatctcagtttgatatgttaatatgatatatatgtttatcttgctaaatttattttgtatttgaaaaagtaattgaaaatataaagtgtatttcaaaaattttcaagaaaatattttgaaggtacattaataatattaaaatgtttttcctaaatgtggttgactgatatttttgcatacttactttgtgccacacattgtcctgggtatggtcatttaaattattttattgaatatgattttcacaatccactgaggtaaggatacttttccttaattagcagaagaggaactagagtgtcaaagggtcacttgctcaaagtcacaacagtgcatatatggtgggattggaattagagttggaaaagaggtctgccagactccaatgtataacacttaactctcttaaattgtgaggaatcatgtgaccaaatactttcacatttgagataatcaattttatgttgctcttcttgaaacctgtcactattgctcttttaattctaggatacccttcttatattaagaagattggttacatttttggctttgctcagagcaccgttgcatgtggtgttggtttggagaggatagaagttaaggaatgcttggaaggagataaagtcactcccttgagggagcgggggtctatgattccgggagagagaactgaaaaactgtcgaaagatatgcactaatcagtaatttgccatttttatggatattcattctcaagtcatatttacatatgtaggttaattagagtattttaaaatgagcaagtagatcaaagaaaaaaaaataaaaggttggaagagacttactgaaatgaaaaataatgaagagtaaaatactgtgtggatttaaatgtaaaagcaaaatatcactttaaaatgcctttctcttttgtgcgggagagaatggggagagtagtgaatctgtacttcatattgtcagttttgcctaccaggtgaaatttattttaaagacttttaactagtttgaaagtaattagaggactgaaataaacatattggtatatgtaatgtgattgctagaatctgtgactacaaggtaaaggtggaaaatgataactgtcttttttatagggaattattttagtttaattgtgtattttttgccaaagggaaagtaaattaataacacccttgaaatatttttcttgaagctggacatgaaaacaaaaatgatggaagctaaatttcatgaagaaaagcttaaactgcaacagaaacatgatgctgatgttcagaaggtaggatatatatctcgtgttttaattatattgaacactaaaaatattctaggttttatgatgatccatccagttatccatccattcttccaaccatccatccacttatttatgtactttatgacattctgttataagtggaatatgctaaactaatatcccagcaaaag

SEQ ID NO: 18797 - DNA, 2300 bp, Homo sapien
aggaggttccttggttctcaggtaaggagtttccaagtgaaacttgcctaccagtcgtctaaacatgacatgtaggcttgagttctaaggtgaacacagctcaggctcaagctggtatccctttcatgttatatacatataacataaataataaaactctctatgcatatcttaatatttttatttgcatgtgtgtgtatatatgaatgaaaaatatataaatgaaaatgatatatataaatgaaaaaaatgacaatcagcttgttcttaaaagcgggaagggagatctactcatcttattttcacctaagtagaggaaatatttaaagacatttttcattttcagttatatttttctgctatagttatttcctctgagatgagcttgagcttgttacattttttctttgatttatcttctatttatttatcttctatttttcttttcatgtttatttagacaccatttgtcaaattcatttcatattctttcagcaatgcagtttatgattctaaaaattgcatatatttattatgcacaacattgtgaaatgactaagtcaagctaattaacataagcgttgcttcacatacttattaattttgtgatgagaacacttaagatgtactcttttagcaattttcaagaacacaatacattatcatttactatggtcaccacgttgtaaaatagatcgcttagacttattcctccaatctaacttaaattttgtttcctttgaccaatgtcctcctcctcctgaggctggagtagggtagtttatctttttttttttttttgagtctcgctctgtcgcccaggctagagtgcagtagcgcaatctcggctcactgcaacctttgcttcccgggttcaagcaattctcctgcctcagcctcccgagtaactgggattacagccgtgtgccaccacgcctggctaattttttgtatttttaggagagacagggtttcaccgtgttagcccggatggtctcgatctcctgacctcctgatccgcccaccttggcctcccaaagtactgggattacagacgtgagccaccccgcccggccagtttatctatcttgaatgtattaactgactggttaaattcctgcaattgcatgcttgattttgcatccttgattctcagtactaattatctggattatatatcattccctagttataaacatgttcaagtatgcttttgaaaactaaacattcttaaaagcattctgtaccctttattttccttagcatgatttgtctttgagacaaggaagagctagctgttggtgtttacttccagtgagataggttttaaaaagaaccttttgaagaatttgacttgggttttgatatatcagagagtgaggaaattttcacttgagacccattcaactctgatgtctgtccacataacggatcaccccttttgtgaacatcctccagccgccccattttctgtgcccttattttttcgccacggcccctaaggtgatcataagcgactctgcgcgggatgcgggagggcagcagcattcaaactgtggtcgggttatcccggaagcttcgactggggacccgccaaggggcccacaagctggggtgcgagtctggcggttgctgggccagcaggagcgtcgccatggcaacggggccgcgcgcacgccgccacctgtgggtggagaaatgcccgcgcggaagtctccgcccccagcctggggcgccggtggtcgccgccgccgggaacgtcgccatggcaaccgcaccgcaggctagaggggtggagtagggggcggggaaatgcgagcgcgaaagtccccgcccccgggctgctgggcggcggcgacccagcggcccgcaaggatttgaaaccgtttggcaggggcggcggtggcggcggcgttggcggcagcggccgagcggaaagcttgcgtgtggtggtgccaggttctcgtttttttctgaatttccttcccccgcccctcccaccaggttcttgagtggaattttgcgccggtggctgccgccccgcccttgcgggcccgttcgggaaggggcgtcgccctcaggccctgggcccgttctccgggcctggggggcgcgcgcccctggggtcccggcgctgcccgctgtggtgtccccggcaggcagagcgcgatccaggccgggacgacttgggaaagttctaagtaaagtttgatcagccggtttgatcggtctgacgtggtccaagagtctgacccaagggtttgcgactgggagaggaaatctgtgtcctggacaaggta

SEQ ID NO: 18798 - DNA, 2300 bp, Homo sapien
cttggctcactgcaacctccacctcctgggttcaagcggttctcctgcctcagcctcctgagtagctgggatcacaggcgtctgccaccacacctgctaatttttgtatttttagtagagacggggtttcaccatattggccaggctggtcttgaactcctgacctcatgatccacctgcctcagcctcccgaagtgctgggattacaggcatgagccaccatgctcagccaggatgacttaatttctaggaggttccttggttctcaggtaaggagtttccaagtgaaacttgcctaccagtcgtctaaacatgacatgtaggcttgagttctaaggtgaacacagctcaggctcaagctggtatccctttcatgttatatacatataacataaataataaaactctctatgcatatcttaatatttttatttgcatgtgtgtgtatatatgaatgaaaaatatataaatgaaaatgatatatataaatgaaaaaaatgacaatcagcttgttcttaaaagcgggaagggagatctactcatcttattttcacctaagtagaggaaatatttaaagacatttttcattttcagttatatttttctgctatagttatttcctctgagatgagcttgagcttgttacattttttctttgatttatcttctatttatttatcttctatttttcttttcatgtttatttagacaccatttgtcaaattcatttcatattctttcagcaatgcagtttatgattctaaaaattgcatatatttattatgcacaacattgtgaaatgactaagtcaagctaattaacataagcgttgcttcacatacttattaattttgtgatgagaacacttaagatgtactcttttagcaattttcaagaacacaatacattatcatttactatggtcaccacgttgtaaaatagatcgcttagacttattcctccaatctaacttaaattttgtttcctttgaccaatgtcctcctcctcctgaggctggagtagggtagtttatctttttttttttttttgagtctcgctctgtcgcccaggctagagtgcagtagcgcaatctcggctcactgcaacctttgcttcccgggttcaagcaattctcctgcctcagcctcccgagtaactgggattacagccgtgtgccaccacgcctggctaattttttgtatttttaggagagacagggtttcaccgtgttagcccggatggtctcgatctcctgacctcctgatccgcccaccttggcctcccaaagtactgggattacagacgtgagccaccccgcccggccagtttatctatcttgaatgtattaactgactggttaaattcctgcaattgcatgcttgattttgcatccttgattctcagtactaattatctggattatatatcattccctagttataaacatgttcaagtatgcttttgaaaactaaacattcttaaaagcattctgtaccctttattttccttagcatgatttgtctttgagacaaggaagagctagctgttggtgtttacttccagtgagataggttttaaaaagaaccttttgaagaatttgacttgggttttgatatatcagagagtgaggaaattttcacttgagacccattcaactctgatgtctgtccacataacggatcaccccttttgtgaacatcctccagccgccccattttctgtgcccttattttttcgccacggcccctaaggtgatcataagcgactctgcgcgggatgcgggagggcagcagcattcaaactgtggtcgggttatcccggaagcttcgactggggacccgccaaggggcccacaagctggggtgcgagtctggcggttgctgggccagcaggagcgtcgccatggcaacggggccgcgcgcacgccgccacctgtgggtggagaaatgcccgcgcggaagtctccgcccccagcctggggcgccggtggtcgccgccgccgggaacgtcgccatggcaaccgcaccgcaggctagaggggtggagtagggggcggggaaatgcgagcgcgaaagtccccgcccccgggctgctgggcggcggcgacccagcggcccgcaaggatttgaaaccgtttggcaggggcggcggtggcggcggcgttggcggcagcggccgagcggaaagcttgcgtgtggtggtgccaggttctcgtttttttctgaatttccttcccccgcccctcccaccaggttcttgagtggaattttgcgccggtggctgccgccccgcccttgcgg

SEQ ID NO: 18799 - DNA, 2300 bp, Homo sapien
ttacacagataagcatgactttccccttgaggccttccttgtgacttttagactgagttaggatgaaaagaaggaggaagggaggaagagaggaagggaggaaaggagaaagagaggaagggagggaggaaggaaggaaggaagggaagaaaggagggagggaggaagggagggaaaaagggaggggagaagggagggaaggaaggagaagggagggagggaaggaagaagggagggagggaagaaggaggaaaggagtgcatagttttccaattgaagtataatcaagtaaacacacagatcttaaatatttggcttgatggcttttgaaaattgcatgtagccaagtaacaaccacctaaaatagaatataaactatttcgacacccctaccccaagtttcctaatgcaagggagcccagccaccaggaaacatcattaaaaacccttctccttgtcctctctcaatatcaggcactcagtttgtagctgttgctgaaaatattctcgtctcaattttaaccttttctcaaattttctttaactgatgcccgacctctttggtttctctctccttttccccttctacttcagatcttactatacagaacgacttggctcctcctgacttcattagttttctttcttcttcattcatcaaggagattctccacaataaagcggaacctgggaattatccagagaacaagaatctccttccccttagaaggacaaatagggaaggaccactgttatttcacattagtggcagcacactcttcttatcatggaacacaatgttcattaggatcgtaatttaagaatcatctgcctgacagatggagatttctcaagctgatgtgtctcagggaattttagacctctggatataaaccaagatcacccaaatgagagcaagcggaggttatttattcagagcttgctataggaagggaggcagccattaacagttgtgtttggcagagactcaaagtcaaagtcagacagaggagtgggaaagctttataatagaaaaaaggaaaggcttcaggtgtgctccaacggattgttggtatggggaggatggaaggaaactaactagaagtgaggtgtccatgtgattggttagagaaatatgtttggatttctctggttggccttaagttgggccaactgctatagaggttgtaggtttggctttctagacctgttgctacagatgtgtgggtcagagttctgttttcacatatggcctggctattgtccatttatatatccttttttttttttttagagcaaatgatgtagaagagaactagggaatcaaagacaaccccccttccgaaccctctcaagcaacaacatcagcactggcccattatcttatcctactcaagtttttttttcttcttcgagtcccaagttgttaatttcaaatcaattttcaaattcctgaaacagatctagaaacctgtctagacagatccaagacatattaagaatggatgaggaggactttgtattgatctgacgtaagagaagatagagaattcaaggatagctctaaggtcctaactggagctataggagcttgcaagagaggatgttgagctcagtttgtagggaattaaagttgtaagtgcctcctggaagacattctttgtaattatacatctgaaaactggaacatcattttagagaggtggagactgagaacagagagtaggtgtttgtccaaagtttatatgccaaggctgtgagtgaaacaggagcttcgatcttttggtgttccatctacaacatacacaaaacaaaagatggagaatgagaagtccaggcaaccccggaaacaacaagtttctgtcaaaagcaataatgaactgttttgtgccattaacaaaaacgttatgaagacagaaaccatctcccaaagatttcataacagagccacataagtggaaagtaaatgattaaagaatgtgggtctcagagttccattcaaatcatgatactttatcttctatttacaaagataaaagtacaccagaaaatggttaatgtttaagcgctttcatatttggctctgtctttttagcagacgaaaaccactttggtagtgccagtgtgactcatccacaatgatttctccagtgctcatcttgttctcgagttttctctgccatgttgctattgcaggacggagtaagtactttttgcttttgaaaaaataattaatatatccaaccccttcgtatatgtcagggatcaataatgataagtaggccgggcgtgcttgctca

SEQ ID NO: 18800 - DNA, 2300 bp, Homo sapien
aatgcaaagccacaacctaaaagaaaacagacacattgttccatctgatctactgacagctaagacagtcactccatggagtacacaggagattcgcaggctgctgccagggctcattctgttcttgtctttcctatgactttactcaggattccattatcagcaacttcaccctccagctctctccatcctcctatgaaagcctcagggacatagaaataagcttgtctttgtaaaatgtgccaggatctccgtcttagataaaagacgactatgagaaaagaaattatttcattccactatgttccatttgatttctgctttcaagcaataaaccaccatggcttgagatgcttctagtgtttcatggagaattgggactatttccccaacatgccctgctcttcattcctctttgcttcttccctttttgactccttggacccgaggggcgaccatgagtggcgaaatttctgaccagctagaataccaggcaggtgcaggctcttgaagcaccaagactggctcaagagattgtaaatggatcagtcaagtgcatgcaccactgacggccagtcaggagagcttccatttgttaaaaatataaaggacattcctatcatcaagcatcacaattaggcaatctcaaagaaaacaatattagctctacttggcctatgttacatgctctaagaaagtattttagaaaagttttttttttcaacataaatttattgaaggatcaaacgtgttctctttcttggtctctttagctcgtaaagtcgttttggggatttcgtgaatctggcaaataaaacaaaacaccaatgaaacgctgagaaatgattatttcccttatgtattttagcggcctccaggcagacctgataaatattcagcgagtgattagctggtgcatccccacctgcgtcctttgcatagccatgcccgctactctttcacaggcagttttacttggtaagttacaaacgtactggctgcactctgcacctgacagtattgcagtaattagcttgggatgcaaaatgatttctaaattaaggtcctggacttgtaaaatcaagaaagcctgataatcaacatcgtcgctctggtggccattgaataacgggataaatacctaagacaagtcctttaaccatcccacgtggtgataaatgcccgacgtacaaattaaaagtctctaccacacgcaggtgaaataaggtataggtcaagaagagaaggtaggggaaagggtcaatgcttaattatttaaaaatcgctctcttcctcctgtaggaaggtctaggggctaggtcttttagtgcacacgtgatgaaagtgacattttggccaggtgaaacctcaagctggtacaggcagctaaaacacgggcgtcgtgccctggagacaccgggggtcctgaggatggggaaggggctccctgctgcgggtgctgaggggttaggaggtgagcaccgggcgggaggctccggggcaggggctgcgcgtggagcccactcccggacgcgggctcctctcggcccggcacgggtggcgcaggactccgagcccgtcgacaagagagagagcgggagtgggagaaggaagaccgggagaggaggaggccgggcggcaagagcggaagaagaggaggagaactgaggcggaggagggcgagagggaggagagccgggcgcaggaaggggaggaaagaaaaaggcggcggaggagcgcggacccgccactcccggcctcctcccccgcatccccactcgggccggccctcccccggccgccgccgccgccgccgccgccgccgccgccgccgccgccgcctccccttgcccagtgttcccagcaccgcaaggcactcgctgcctcctccgcactcggtccggtccgctcagcgccgccgccgccgcaccctcgccgcacccccgcgcgcgcccggcccgcgcgcccccgccgctcgtcctcgcggcctcgcgctcggggcatgcgcggtgggcggtgccgctccgggccgcctctgccgccgcgagtaggaagcgcgagcgccgggcaccgggctgtcagtgagcctggggccagcgggcgagccagcggctccggctcccgctcccgctccgcgcagcaccagcccgactctccccggcccccgccgcgccccctcgccgcgacctcggccaccggcccgcgccccgcgcccggggtcgccccgagcccgcacctctcccccgccgcccccgcccacccggccctccgcggccgcagctccccggcggaggcaagag

SEQ ID NO: 18801 - DNA, 2300 bp, Homo sapien
ccccttctctactaaaaatacaaaaaaaaaaaaaaattagccgggcgtgatggtgggcgcctgtagtcccagctacacaggaggctgaggtaggagaatggcgtgaacacagaaggcggagcttgcagtgagccgagatcgcgccactgcactccagcctgggcaacagagtgagactccctcttaaaaaacaaacaaacaaagaaaaacgctgaaaccggctgggagcagtggctcgtgcctataatcccgcactttaggaggctggggctggaagatcacttgaggtcaggagatcgaggccaccctggccaatatggtgaaaccccgtctctactaaaaatacaaaaattagccaggcgtggtgacatgcacctgtaagtcccagctacttaggaggctgaggcaggagaattgcttgagcccgggaggcagaggttgcagtgagctgagatcgcgccactgcactccagcctggtgacagagcaagactccatctcaaaaaaaaaaaaaaggctaaaacaaatgacaaatggatatgactgaatcactgtacctttttgacacaaccttaaatcttggttttactgtttactgtatattatttggtacttctggattcagtagtcggagtaaaaacaagtttctgtattcaaacatatctacagaatgtcaatataaaatatatgcatatatacatttactatacacatacgcgcacacacacaagtaggcagttttctcatagcttttagatctgcttaatccacagacatctgcaagccattcccatctttttcagcaagaactgtccttccttcacacctgcacgtccttccaaatgggggacacagcttcaacagaagacagtaaaacccacgcgcaccaaaaagtttacagaaatgtgtgctgagtgatcctcactgcccatgaagaggtccacgctcaaacatggctaatttggggaaaataaaacagagagtgtgcaacattgctgtgcagatttgtgttttgtattcctagcatgggagttaccatagaaataaaagaggtaagtagtttaagaaaaatcccagttgcatgcatcctggggactgtgaaccaaagaatggcctgagcaactctaggactcttttttgccatgaagagaacgatatttaaattggatttcaacagaggaataactatctctatcaggaaaagtcctgtgtttcaccttccactacctgagaggcagccaaacaaaagaccaaacgtgagcctgggcaatgggcaacaggtagctgtcgctttgcagtgacactggaggcagagggaccctccttacctggggtggtatgcaactgagaaaagagacagcaggagctctctgcaggtacatgtgatgagtgtttgctcaactgaaaatctaagcttagagcaattccagagagagaatgcaagtctctacaagcagaaatggcctgaagccatccttgcagcctaggaatggatgggccacagaggcaacacaggacagtaagaaccaaagatgataatccaggcaaagacaaattcctctgctgcacctggctagggatttcaccagatctttagggaccaaagttcacactagccagacagttttgtggtattagggcacctgtatctgtaattatacctaaattgaacaatacggtaaactgcagtaaactatgctatggatttaataattttcaattaatctttttattgtattaaaaaaaaaaaaggccaggctgggcacggtggctcacacctgtaattccagcactttgggaggccgaggcaaatggatcacttgagctcaggagtttgagaccagcctggccaacatggcaaaacccccatctctaccaaaaatacaaaaattagctgggcgtggtagggggcacctgtagtcccagctgctcaggagactgaggcaggagaatcacttgaacccaggaggcggaggttgcagtgagccgagatcgcgccattgcactccagcctaggtgacagagcgagaccgcccacccacccccaactttttttgagacaaaggccagagttccagaaccttttccaatactgtgacacatggacagggtagatctcagacagacaatccacagtgaggtttctggcacccggggtgtgcagtccacacacaggaacaggatgtttccagcaggaggaggaagcacaaggttacacaggcttcagagtcaggctgccagggatcaaatcccagcacctcctttttcctgtgatggggcttgttcaacttctttgatatc

SEQ ID NO: 18802 - DNA, 2300 bp, Homo sapien
caaactgtcctgctcccctctgcccacgctgttgcatggagaatgatttggctgggtggagagggctgtttggtgtttcatttctccctcctttgtcaaagccaacacaggaaggatcattgtggcttaaagccctgtgctcttcagccttgcaaacatggacatagactcacacatgcctccaggaagccaatatatggctcactctgtagatcaatcaactttcccatgatcaactgctagagcagggccggcgctgtggaatcagggccagcgtgcacccctcaaccccttctcacaaagaggctctaaactctgccactctcctcctacagtcaactcagactctgcagacaaatctggcttctgtccattttcagctgcctcaatacccacctgtgcctcaaatctcaactggaacatgataccatccctggggcagggccctaggactccactggagccctgatattggtggactgcaccgaagcactgctgcacctctttcccaaacatcactaacatccagtttcaaaagttctgactttgcaatattgcaaggtgccagtgaaagatgccgacaggatagcaaacttgcagccaagggtggcttgggtgacacaacctttctgagttgccccaggcctcattctcttctagagatggctctgcctgccccctccagccccactggatgaccccttctgggcccttgtcatatcctgggctttccccatcatagcagttgctacattacaatgccatcaactgtttgcttggcacagcacttctcagattttagtaggcagacaactcaccgggatcctgttaaaatgcagatttcaatttaggatgttggagaggccagagagtctacttttctaaccagctgcatggtgatgcctacatggctggtccatggaccatactttgagtagcgaagatcagttgttttgaactttggctacacattagaatcacctggcagaatttaaaaaataccattgtccaggccccacttgagctcaattgtatcagaatctcttggagcagcaccagggtatcagggatttttagacacttcctaggtgattctagattacagccagagcacagaagccctgagactggctatgggctccacgggggctggcatccatctgccttgctctccactgttttccagctccaagtccagtgcctgaccctggcagatatcagcaggtggggcttgtggttgaccttgcttagacacttagcttctctttttctcgttcattgctggcccctgccgatacagcgtgctgagcaggtaagagtcagcccatttctgattaggtggatttaggaggctgttgcacttggactgtggtatggcttctttacttgtgttgaccaagtgctgcaacttattagagtcacatgaggaggacactttcctccaagaaatcttccctgcctctctactccttcccaaggctgctgccattttcctgtctggagctggcatctctcacagagactatttgagcctcagaatccttttcaacacagagaagctcacccagcagagttgtctcctccattcttcctctctacttcctggacaggtctctaccacagccctcaataggtcgcatttaattgctttgggggtgcctttgttcttctagatgggaaacccttcaatggcaaggatagtgtcatgttcatttttgtatctcccatgtctggcacaatgggttgctgaatgaatgaatgaatgaatgaatgaatgaatgaatggcagtacccagcaaggggactcccagagaggacaagggggtccttgcagtggcatgccaagaacgctctgaattgctgcggggttagggggagggtggcacctctgttgcagtgacctggtgtccagggggttgcctggtggtctttacccatccattgagccaggttggggtttgactttagttactggctcctcatcttcgtcttctcagagccgtgggtactgccacctgctcacccactctccctagccccagagcgcagtccgtgctggtgggagcgtggcgactagttgcacagcaacggtccaggaagatgagtgcctgcgggaggaaggccctgaccctgctgagcagtgtctttgctgtctgtggcttgggcctcctgggtatcgcggtcagcaccgactactggctgtacctggaggagggtgtgattgtgccccagaaccagagcaccgagatcaagatgtccctgcactcaggcctctggcgggtctgcttccttgcaggtaa

SEQ ID NO: 18803 - DNA, 2300 bp, Homo sapien
gcttccatttatgatttaatttgaaacaatgatttgttagaagaggaagaagaagaagaagagatggaggaagatgaagaggaagaggaggaggaggaggggaggaggaggaggaggagagaagaacttgggattcattttcctggagtttctgagaacagaacctagacttaatcctagtggctgttagggttggaggtgggtaaccctgttctgggtcagagcaaaccatctcacaccttctggtccacttagacatacattgggcacctgctgggtgcagaactccagatccggtggcaggtgggttaaagtaaattagagatgatgaccctcgtcctttgtgacttggaaagcagaatagacaccccaagggcagaaggggccaacaatcactgtcacagccagcctggtcctcaggctctgtcaccttgtgatgtttgttttttccctttatgtatatgatctattcctcccaatcagactataattttccaagtggcaagaaacaactctcactcagcaaacatttgctaagcccttaccatgtatgccagtcacaggaaaggctcacaatcttgtgggacagagaacagtgatttcaacacggggagtggggaccagggaaggtgccacaaagaaagttaagcttcgtcttgcaagaatagcagcactccctatacctttttccatatcctggggtccagtgcagccagggatgccaacaacaggaccacctggacatgtcaaagggtgctgcacctcctgatgctgggctctgagaacctcctggagggaggggtttggagctgggtctggaaggaggagtccggaccggctccctggagaagggagtgtgtccaggttgggatcacggccagcagcaaaggcaattaagtgaagccagcaggggttggggtcagaggctgacaataaaggccaggggagggaaagccggttaagctcgagcagagcaaaaggcaaaacgaaataaaggcattgcgaaaggttgggagagaaagggaaaaggctggcgggtggagtgttggaatctaacacaactggagtgtccctggactctagcagtaatagaccctcagaaatgtgagcacagaggaacgccccatcttcaatctcagccttgccaccactctagaaagcagagaccctgtgttctccccaaaggacttctcgctgtcatcgcccttctccctcaaccccaagtcagggtccttccaggccctgcaaggggatctggaggagcaggaaccacctgggttggggtggggcctggcccgggcctggcgtggcttgcagggtctggcagctgtgtcccacatctggggtttcaggaattctgacctgaacacgcactcccacactcaccttcatcaccaggtgaacaggcacagaggggaaaggagggacacacccacccacgccctcctccacaaattaaagaatccgcagggccgtcggaggggaggctggatgtcctgggcgggtaagagaggtggctggagacgcgctttcccttcggtcctcctggggaacacttccctcggcttccttcactccaataatgtgaatgaactctgggagagagagagagcgcgcgcgggcgcggggaggggaggggaagggaggggaggggaggcgaggggaagggaggcgagggggagaaaatcctggctggggagagaggggagctcagaggagcgcacagccgggcgggggccgaggctcgaggggcggcgccgagagaaacggggcgcggacccggagcgcggcggcggcgggggaggcgcggagggcgcagggcggaggcgcgggccgaggggggagggcgagcggagagggaggagcccccggccgccgccgccagcccgcccggcggccgcgcagcccgcactcgtcgccgcgcctcggagtttgagccccagcgctgccggagcgcaggcacgcccggggcgcggggtcggagcgcgcagcgcggcgccgccccccggccctcggccccccaaccccggcgcccccggagcggcgcgcggagggaggagggcgggcgggcgcggcgggccgggccggcgggcggcggactatgaggcgcccaccatggtgcgatgcgaccgcgggctgcagatgctgctgaccacggccggagccttcgccgccttctcgctcatggccatcgccatcggcaccgactactggctgtactccagcgcgcacatctgcaacggcaccaacctgaccatggacgacgggcccccgccccgccgcgcccgcggcgacctcac

SEQ ID NO: 18804 - DNA, 2300 bp, Homo sapien
ccagctactgctttgctgggtgcctggcactcagtaggtctaatcaagctgtacagcacctcctgagatccccaggtgccaggatcctgaagctgggcccccacaaacaacaagagagggctcagaggctgcagccatgtcccagcttctgggaattccccatggagatggtctacccacctggtgacaggcagtttctccacgagctgaagcaggggcggtggcatatgtcaacagtcagtcagtgatcagtcagttgtgatggattagcacccacagggaacacagaggtggggggacagggaggaagggaagcagagatgagaacagtggggagataagctctcaggagattgtaatatgtatgagagactgattttaaaaatatggaagtttggatggaactgcaataagcacaagccagtggctggagatgcgagggttcagctcagccctggggctgttcaccaggtagtcctggctcctcacatctcctctctgggctgcagattcctaatctgtcacaatagatcatgaagtttcttcccagttccaaccattcgttatgactttgggctctgggtcctgaaacctggattcctcattttctcgctgtgtgaccttggacaagtgacttcatgtctctgagcttccatgtccttgtctgtgaaatggcagtaaccgttgtagtccccttgtggattggtgtgaagagtaactgtgacaatggatgaaggcttagcagggtacctggtagatagtaagcactcactgaagatgagccactgttctgattatcatcatcatgaactttctgtgattctaaggctggaggccgaaacatttctgtccacatgggcagagtctctgtaaatcgtgtcaatctgaggccaggattttgaagctcaaggccccacccagctcaggaggctattcctggtcatgcgtcagcctctcggctacacccaaaaagggccaccctgtgagccgagaaggaagagatgacacaacccaggagagatgtagaggctggagcctcggagaccagcctgggggccaggcgggtgcacaggaccgtcggagggtggtcgatcccgggctttctgtgttctctgcacgcccatgagctcctaatgatcccctataaatcaacctattcattcttttttactcacacacttatttttcaaattcaaacataactggaaagtcgttatcacctgctgttaatagaaggcaaaaccaaacagtgccctgaaaaacagaatgaccaagtccagcaggattcctcgtcctcttcgggccgttctcgctttgtttcaaaggacactttacaggcaataatgacactgacctcgaacagagctttgctctggacccagttttggggatggaaagagaattgaaaaggaagtaatgttctcgtggagggatcagagttgggtaaggccagacctgggaaccacctaaaaccttcctatggtttgggggatgccgtggggtttgtggctaaaacgcttgcctaagaggtggactccacaggccctggactgggttcccgggatgtcattagacagaatcctagcccctcagatcccaggatgagaacctactcactgccctgccggtaacaggcttaccccgtgggagcccgggacagccgtgcagcccgcagctcctggtctcctcccctggcctgggctgccctttcccatcagcccagagcaggcagatccccacccccggggccctgctgcccacctctcgccctctcccaactcaggcaccctgagctgctactcacagaggcctcaatctaccatccagagccttctctccttgccaccctgccccgccgcactggggtatttctggctcccagaggggcagaaaaccctgaaacccgagcagaagctgtcctcggtgccacgcctggagatgggcattaatagcagcctccctcaggcccctgacgcgtctgggcagctgctcagcacgtcccgcgtccctcggccccaaggccagcccactctggctcagccaggcacactaaacttagtggccactcccagctcgacaaccactgccaccccccaagctcggcttgtcacctgccctaggagacgcagccgccggaccctgcccagggcacccacgcctcggcgaccaccatgtcccagaccaaaatgctgaaggtccgcgtgaccctcttctgcatcctggcaggcatcgtgctggccatgacagccgtggtaaccgaccactgggctgtgctgagcccccacatggagcaccacaac

SEQ ID NO: 18805 - DNA, 2300 bp, Homo sapien
ttatacagccatctaaataggcataacttatggcaaaattataacaattttttttctttgcagtaaatgatacctcatctaagaggctctaatacctaaagagtttatccttaaaagtaaaagtgactttgtaccataaaataaccccaaagccactctctagggtttttattttcttctttctttgtctttatcttttctaacttagttttggaattacgttagctactttggttccatagaacaagttttcaacttggggtctacagttcctacagtgtgctcattgtctcagtgaagttcttttgttttcaaagattcatggtaacaaaatgtattttactgctacaactaaaatgtatttataataaaatgcctttttaataatttggagatgtgtttattatgtgtgaactataattctctgcttccttctgcccttaaggtcaaaggtctgactgaagttaagcacagccctttgattttattcctaatagtaaatggtaaaacgaatgtaactgagaactcagtgtgaatttgtaaagttctaactctactttccagacatttgtgacttggcttaaatcccctaacttcagcagtaatgcttttaagacttaaacgtgttacctgaaagtttaaagatctccagtggtcagtgagaaaataagcccttttcaaacagtcattcaacaaatatcttacaaatttaagaaaattatcctgaattactcttaacaagtcacttagttgttaatgcggcccagaatttatttgagaactcataaacctagtttgtagtgatatattatgtaggtataatcatgcacttcacagtaatgcgtgccaaacattaattcaacaatccaaaaaaaaaaaaaaatgctggttgtgcagaaaattgccctgagtcaaggtcttgtttttcttggggaaataattctttgcatctgccatgatgtgattttgagaagcattagcaggtcacagaaggctttgtgtgccctggctattttatttttaacatcctattaatgtggcaccataaatctagcttgaatgtactgtgcttcaagtttgtaaatgtaagtagatgggacggtcagcctttcctaaggacaatgtaccatttgtactcattgcggtgaatccattttaagctaggtatctcgctttgagatgatttgatatgacaatcaaatctggacttaagaaataaaaacttctctccatataaatcaaatggatttgggggactccttgagctgttccctgctctagatgaaataaccccaaggctccactgtcactgggaaaatgcagatgtgactgccgcaggtgttagccctatgccatattgatgctatttgaagcatttttctgagaatggtattggtatgaaagttcgtgtgaaaatgtaattgataaaacaatcacttcctttcatcaaaactgcaagatgggaaattcgatgtggagtgcaggtcaagtatgaagagcaaaagctggttagcagaagcagtgctggcatcccagccgtttttaaactggagcatccagatattcctgtggttagctctgaacagccaaagagcacttagtctgaaattgactctgctgctcgagttacatagtattgtcctaacaaatcaattccctaatgggtggaaatcctcttaagatttgaagagccctgtgttgattgcattgcctcactttcagttcatgctaccaactgcagccatttccctttctgaaatagactgtaccactcttttgctgaaaagccttcagtggctctccatcacatcctacattttttagctggatttcgaggcacccaaggcatgttcctgagcattgcacataccaggttgtagcagatcagtcaccgtcactttctgaacaaacccttgatcttccggcctctcaattttgtttggagcatgcccatcagctctcagactcccactcctcagggatactgattagtcgagacccaatgtcacctcccacactacccaggtggaattagcccttttgtctctgtgcttgcaattaagctttatatctcccttatcaccatttttgtgttatagttgggagtctaagagctcttgggaagcagagataatgtcctcagacctctaaaccaccagcaccagctctgtgcctgttatatggcaggctttcgatgaacgcttgctgaactggatctgggggtttgatcgagagaagagcttaaagatgctctcccctccccgttgacattatttgcctgacattctttgcccacacag

SEQ ID NO: 18806 - DNA, 2300 bp, Homo sapien
catcacggtctagagaagagaaaaattggtgataatgaaaatttctaaaaatgagacattacataagtaagttatgaaatactctaaatcaagtacttagggaaaaataaaacaacaacttaaggcttatctctggtatttagaagtatgaatgactttcttctttggacttttctgaaattttccaattgtcctcagtgaatttgtattatgtttataatccagtacaatgttacataaagttttaaaagattgaaaagaaaagcagttatttgaaagcaagctatggtttagtgagcaataaaattggttaggaaggatggagtcaaattttaagggaccttgaaagtcaggcacattataggaaatgtgaagtcatttacagtctccacacgcaccccttattccatgttactcagtatataatacaaggaagggtagcattgtaaacaaatggaatcccatggcactattacttagctcagtaataaaagctgttttgaccaagagtctggatatgcagctcctttttatttaagagagagcatgtgcctgtttacaaactatgagcagttactagaataaatatcaaagtgtacagttacacaaactagttttttatttttcagcaagccttcagatttgaactttagtttttatatgttagctattccacttctcatggctgttttatgtgtctataagatagggacgtttggttggatgtgttgtgatttcagcattctatggcagaaggtgtctgtccttgtggctatactgtccttgagttcctggagatgagagccagttctgacacactgagtgaatgaggcacatgaacattgctgggctcatccttaaatctgtgtcactgttctctgcttttagcgccacccaagactgtcaaaccccctgaggatcaactgaagtcggagaacctcgaggtgtccagttccttcaactacagtgtgctgcagcatcttggccagtttccaccccttatgcctaacaagcagatcgcggagtcggccaatagcagtagcccccagagctctgcggggggcaagcccgccatgtcctatgccagcgctctgcgggcccctccaaagcccaggccccctcctgagcaggccaagaagagtagcgaccctctgtctctcttccaggaactgagcctagggagctcatctggcagcaatggcttttactcatattttaaataatcactttttttttccctcaagggagaatgttttaatttctgtttgtatcagtagaattaaggtagttggacttcatctatagatgcacagttccctttgttttaatattaaatatgttctcacttaattgctttgctgctagacttgcaactaatttttttaaagtatattccattattttgcatttttgatgtgtcaaaactttgacagcttttatgtagaataaaaaaatttttaaatttgtgtattgttacatatgtttgcatcaagctagcagccaagaggttaattgtgcaactataaaaaaaaaaaaaaaaagaaaagtttgtctaaaatgtatttaaaaagaaaaaaaaattgtaagtagcatttacatttattcaataatattaccacatgctgggtttctgtaccagaaatggccagttgatgtacaaatgtatgttatttttgcttaaattcatttaaattttttttaaaataaaggggcagcatcttctaaataagttttatcagctttttttttttttttggtgacacgatgctgcattctaaaacttttatagttttagactatgtatgatgtgttgttgtaatctccatccaccataggatagagttaaaggcattctttgcaggcatattttgtatgccactgttttttgaaatgtgaaaaaaacgttggcatacttagttattttttggacaagctacacttcaagcttgtttttaatgttaatttgatagtgtgtgtttttttttttaaacaaatcaagaagctgaaaaatttttaggattgttggtgcttagtagacttgataactattttaaaaatgcgtgaatttagtaaaattctttttttctcactatgcatgtgtaaatgtttgtaacctggcttccctcttctccagtggtataaagaattgtgccgctttaaggtttgggtttttttctctccagtaaaaattttggtaccttatttgatgtttacattaaaatgtgacattatacgtggcaattcaaatattttgctagctgtcttgtttgaggaacaccattaaagaagaaatataatgt

SEQ ID NO: 18807 - DNA, 2300 bp, Homo sapien
gaaaagtcatttttacttgcaaagggcctcgtgtaattaaaaaatctacagcatattcatgaaaggctaagaatagtgcagagggacctacaagtaagtagcccagatcttacagatgcatgtgttctctatttaagcagtaggcttggcattaatattgaatgtagattagtctataattgtctgtcagagaccctaagatccaaatacaggccccatacaagaaataaggacctttgcctgttgtttcaaatgtatagaagatttcgggccaggtgtatcaacaacagttatccaagagatggggaggaactacttaaaaaattataagcaaatttttaggtttaattttcataaacttaggtgaatatacatgcagatgtaattggatttctaagtaatgttttgaaatgttttctagaagaaaagtgatacaagtggagagtatgccatactatcttaccattcatttcagttgatgagtgcagtcagggttacttctgtagcattggctagaagcagcatataacatgatggtttattgctttgagggtggctgggataatagttttcagtaatcttgaatctgttagaagtgaatattcctctttttaaaagaccactgtagatgtaacaggaagaattttatttatatatacatgtaataactattttggtcaacttttaattattcaaaagaaatggaaagtttttcaactaataccaacagtcataccaacttgtttacttttgtgaattgtactgggtcagtttctccaagtaagagcaggaagttgtttggtaaagcagagtgtatacatatatcttgtctttgaacaaaaaagaacttgattcatcgtcaggttcttcaaagaatgcatggcatctttgttgactgaactattctgaagtgtgaatgtttgtgatttttgtcatttctgtgctatattttaggtgttcttgtcacatctgaatttgcctttttgcttccttctgcagaaattatctttgttgtgatgaaaatgtcctataatgcgagcttcctgtcagtaggcaacgtgtttaactaatacagttttaaaaaattatttacttttatgcaaaactcctgtatgcttatggtaaacaaatttgagcagtacttatgtaaagtaaaaaaggttaaaaaaaagaaaagcctctgttcttcttctgtctctagtcctgctcccttgagctgaatctggcaaacagctgggtgtcatttagcttttggaagacctctctattcctgagatattctggcagtgtggaagtagagtgagaagtcagaaaaggcatggtcattgaaccagagtttggatgttgtgcagggactattctgttcttattttctgtgataagtaataatgataaactaccatcagcttaagataactgtaatttgaattgtgaaacatgaaaacagttagttctttagtcaggttggtaaagttttgatttgttgatcttttaaaagaaatatgcatgaattgaattcatgtaatgttagggctggtgggggttaatggtagtaatgaattaccatctgttgaattttaggataagctgcacagtatatttactataggctttttataactcatcatctcctttaattctcatagcaactcacgagatagttatttccattttacaaaggaagaaattcaggcttaagtgtgactcaactaatgtaacgtcacgagaccagtaaagtagtggagctggtgttcttcctggaaagcctgtgctcttctttctctagctagtctaagtgacttattttccagataaggaaatataggcctgaagaaattaaatgagttgctcaaggtcacacagctcagtagtagcaacattaaaccaagcttgtttttaatctttggaggcttatctcaagactcttggtctagtgctggtcatgctacattttattgaactagtgtggaccaaaagaccatatgctgggaatattggatacaaatgctttggaactgatatcttggtgaatggtgttttctactatgtattaaaaaaactttcttctttgtctttcagaaattataaagagctctgatgggctatttgggtgatacccagtgcagtgaactgcaggtgagtaaggtttagaactttatttagaaaacaagaattttataatgcctgaaagaataaggtgggacaagggtgaagtgatacagggctgtagtgaaacagtggtaacctgaaggcacagatcctaacggaatcggttacttctggaacagactgaatgatga

SEQ ID NO: 18808 - DNA, 2300 bp, Homo sapien
cgctcccagggtggctccgcggagcctggagccacattcctaggggaggggtccccacctagagggtcgcggatcacgttacccgcccggaggaggagaccgcgggacacagagtaaacaaggggtaaaaagttgcatttggctcaatttttttttttaaatcgtgcttcgacgctggtggactcggggacacggcgtcctcccagttcccggagcccaacggccccggggcggtttcccagggcagaggcacctctccgggcggcgggtgcggagctggtctgcgcggcctctgaaggcgaccccggccgctcgcgggcttcctggaagcgcggccgcaggagcagaaacgctcacatccacgcgcacaaataaatccgcgagcagctccgcgccgcgccgcgggcggcaaggaaacctcgggttgattcaatgcagacgcggggcgtctgcccgggcaggaacgcggcgaggcgagaggaccgggcgtgggggcagggaggccggggcaggagaaagggagaaaaccccaaagccacgttttaaaaatgcgggtgaattttcaatgccgtcagcccgggggaggggaaggggccagctgcgggcgccggggtcggcagtccacccggggcaactttccgggcgggaggcgcggccggagggggcggcgccggcggcgggaggcgggagtcgggggccggggggagtcactttaaaggctctttcttacccataatgctttgtggggacgttgacaagtggatccaagatggcgtagaaagtaatgacaggtaagtcctgacttcccccttctctgctcctggggccgctccgcgagctcccggagctctccggggaggggacccgactcccctccggtgtcccggaccccgggcgcggcggccccggggcaggctgggggcctgggcggcccgcggctgggcctgggaagcgcggctcttcgaggcgaggcccggacgctggggctgtttacagcttcttcccctacttagtccccttcccctccgctggggcccgcagcgtcctgggccctggcaggagagggggccttgcacgcctggcccgggagcctgcgggaggtttctccggcccagagcactctgggagggggactcgagcctcccggcacgttcccctcctccgggtcgcggctgggggtggggagcgtgcgggcctcccacgccccgctcgatgccccccctcaggcctcggacttccaccgggtggggtgggggctggagcgggggcgtggggaaaagtgggtcaggcgtgcgccccctccctcccccgcggagggctctcggcccgagattcactttcttcccccctttccccgccccctcctcggaaatgctctttggcccacaagcacatcaacaaaaataaagataggctctcttttcctggagattccttgagagtactccagtacccttttcaagggctcacagactgcagtcttacctagggaacttcgattcctctcccctaaattattggagccttctgcaccctcgcctttgctgagaaatcttcagacagggctggaagccagggtcctctgattgttcttggatcgggatcctcaggttttgtttgcagttcaaaaattgtcattccttctccctcacaacttaacacttctcaggcaaatcattaatataataaaaagtgtaacttcagagacagtggattcctggagcgggggaaggagggaggagttgtctgtcttgcctagtttgttcttaattttgctctctcttaaactcatattaatgaaatttcctctccttcatttctttatgtttttgaaagtaaggtcagtctgtgttgaaaaagatgattttattatgtttttgagttttaagagcattgtataatctattcttttaccttactgaaaggaaatgttttaaggtcaaaaaccagactcatttgcaaagctgcacactgtaccatttttgtaactttttccattttaaatgtagatgccctttcacttcaggctgataaaatgtttgctactgataatgtctgttactggtgttgtatggaaacatcttttctatttgcctcaggatttggatgaagtaatggatcactaatgaactacagtgctggtgagatgtgtaaggtgagactgcagttaaaaatgatttcctttttttccttctttattttaatcaactggtaagagtaaggctgaaactgagtaatttgatggggccatctttgttttccaaatgtatcactcagtcagtgggtctatgggcagggct

SEQ ID NO: 18809 - DNA, 2300 bp, Homo sapien
ttgggtcaatgcctatacaaggcaaagaaaggctgcttatcaaagaaacgtgtttgggagacacagtccttgccctcaacttatttcctgtttacttatattaggtgggtgcaaaagtcactgcggcttttgtcattacttttgcataaactcagaccacatacctaaaggtgccatgcaaacaaaaccaccattaagccagtgcataccagtggctaaataagtgcaaaagaggaattggaaaagaagcacctggggtaccctggaaagagacattggagccttcttcagacgggccaagcattcccttttccagcaggaggggcgctgcctccccccagcctagcccatgcccttggtggctaccttgctgggccgtctaagaacctggctccaggctccagtttctccacttattccgaggtgagaagcaggtgactcaggggaggttgctccccagcacgctgcgttcttggctgggaatgactcactacctcgttccctccttcacgagtgacccggggccaatcccttaatgtgtctacaccttctcatcagaccgggacaattgcctggtggagtttttggctccccaggggcagggctcctgtctgccaccgttcacgttcctagtgaggctgttgatagggtctggaggagcgtaaaatcctcgggtagatccaaggccccaggccctccccgtgcaccgaaagagggttttaatgccagtgcttctgcggtcttctaaaggtagagccgttcaacagcattttgtaccgaatacaattcgcaagcattcctgtcttggagaattttcttttgggtatctccttgttgtaaaaacttgcttggaaaaaaaaaaaagcaactggagcaggcctccaaagacagcaaagcagggaccagaggctctgcggagagcgcgggaggaggctgaccaaggggcctccgttgctggggggacctgggcggctggacgccggggtcagtacgctgctcgccccgcgcagccgaaagcgggcgtggtgtcgcggggagaggatgcccggcagcagtgtggccggcgggctgggggtactcgcccgggtcagagacctcagcccgcgccaaggcgccccacactttccagcgcagcgggtcgcagcccggagacgccgggcgtccccacctccagcctcccgagctgcagcggcgcccgcggttctcccccgacccgccaggtggacccggactggcgcaccctgctttccgcccgggaccctcccccgagccctggctgcctccgcgccccgccccgcccggagcccgcagccggcgccccggattacctgccccggagtcacagtccgcagcccggacgctcccagggtggctccgcggagcctggagccacattcctaggggaggggtccccacctagagggtcgcggatcacgttacccgcccggaggaggagaccgcgggacacagagtaaacaaggggtaaaaagttgcatttggctcaatttttttttttaaatcgtgcttcgacgctggtggactcggggacacggcgtcctcccagttcccggagcccaacggccccggggcggtttcccagggcagaggcacctctccgggcggcgggtgcggagctggtctgcgcggcctctgaaggcgaccccggccgctcgcgggcttcctggaagcgcggccgcaggagcagaaacgctcacatccacgcgcacaaataaatccgcgagcagctccgcgccgcgccgcgggcggcaaggaaacctcgggttgattcaatgcagacgcggggcgtctgcccgggcaggaacgcggcgaggcgagaggaccgggcgtgggggcagggaggccggggcaggagaaagggagaaaaccccaaagccacgttttaaaaatgcgggtgaattttcaatgccgtcagcccgggggaggggaaggggccagctgcgggcgccggggtcggcagtccacccggggcaactttccgggcgggaggcgcggccggagggggcggcgccggcggcgggaggcgggagtcgggggccggggggagtcactttaaaggctctttcttacccataatgctttgtggggacgttgacaagtggatccaagatggcgtagaaagtaatgacaggtaagtcctgacttcccccttctctgctcctggggccgctccgcgagctcccggagctctccggggaggggacccgactcccctccggtgtcccggaccccgggcgcggcggccccggggcaggctgggggcctgggcggcccgcggctgg

SEQ ID NO: 18810 - DNA, 2300 bp, Homo sapien
gctacttttctttcacttttaacatcaactaaaatttctaagaattcttccatgagaaaaacaatggaagattatatgttgatatagtcagaactttatttcagcgtgtcatggattataaagtttctttgtttatttatttatttattttgagacagggtctcgtctgtcacccaggttggagtgcagtggcgcaatcttggcttactgcaacctccacctcccgggttcaagcaattctcctgcctcagcctcccgagaagctgggattacaggtgcgtgccatgacgactggctaatttttgcatttttagtacagacggggtttcgccatgttggtcaggctggtcttgaactactggcctcaagtgatccacccacctcagcatcccgaagtgctgggattataggcatgagccataagacccatctgatggactataaaataaaaaaaaaacaataagagctttaccaagaagtggcttgttgctcaccattttggaaaatgtcaccaacaataggcccttaccatgcttcaggaaccaagagaacacacctgttgcagttgcagcttttacatttatagttattgtgtatgggtgtaaataactacttccttgtattttccactgtagacatgttttagcccttatctcttgaaatatatattattttgctattttaaaatttgtttcttggttgggcacagtggctcacacctgtaatctcagcactttaggaggccaaggtgagaggactgcttgaggccaggtgtttgagaccagcctgggctacgtagtatagctgctatctctacaaaaataaaaaaaaggtaaaatttgtttctcctctacattacagattatagctgagatattgtcttattttgcttgtagatggtttatattttccctgattttcattgcagttaaaacaaacaaagagatctattcagcatctataaagcgatgtcggcactaattaaattgagaaccactaacataatagataaaccactccaagatttcccgttttcctgtttgctttccaggctgctgttgaccatatgcccacaccaaacacaacctcattcccattttctttacttttctttttcttttttttttttttttttgagacggagtcttgctctgtcgcccaggctggagtgcagtggcgcaatctcgccggctcactgcaagcttcgcctcctgggttcacgccattctcctgcctcagcctcccgagtagttgggactacaggtgcccgccaccacgcccggctaattttttgtatttttagtagagacggggtttcaccgtgttagccacgatggtctcgatctcctgacctcatgatccgcccgcctcagcctcccaaagggctgggattacaggcgtgagccaccgcgcccggcctcattcccattttcaaggatcctaagcttttttaagatctcaagctattttctagggaccagcatggtatgaatgataacacataaaacgtgtaaggcccttaagaattgaaattgtctcacatgtcatctagtttgatgctcacgaaaatcctatagggataacaaatatgtctttttaacttttctttttaccaacttagtggattacagtgaaaatgaaaacaaagagaaaaaccactttgcttattaaatgactgagctgctgccatatcttctcttaggagctttcagagatcccacagagtaagccaccaagattctcaagtagataaaaccttagaattttctattttaaggtttattttagcctcctgatgtagagatgagaaaaccgagatccaagaaaagcgactggccacggtcctgagaaatcatatttcgaagcaggggtgtagggatatatgagatggtctgttctattacactcgcttttctcatcgcaaattttaggtaaaaagtctgatgttcccagagacaaaacctgacgctgcaggctggagtggcgagtcccgccccgcgcgcctcaagccccacccccaggctgtccgcggcagtgcctgagtggcaaccagcgccggggacctcgaggggtcctttgcgtgggctcccgatgggctgcctgagcgggtgcgcgggcaacttccggtgtgggtgacgagtggtggccgaagcagggggacagcaagggacgctcaggcggggaccatggcggacggcggctcggagcgggctgacgggcgcatcgtcaagatggaggtggactacagcgccacggtggatcagcgcctacccgagtgtgcgaagctagccaaggtgagg

SEQ ID NO: 18811 - DNA, 2300 bp, Homo sapien
tatttttaaattttagagacagggtttcagcatgtttcccaggctggtcttgaactcctgggctcatgcgatcggcccacctcccctcccaaagtgctgggattacaggggtgagccaccgagcccagccaggaatcactaaaaggtttgaaggtggcaggatgagagctgtacttgcacaagattaatatgaccaggtttgcggatgcaatgaatgaaaagaaaatgagaatccaatggagaagtcaccttacaacaggaggggtgggctgggcgcggtggctcacacctgtaatcccagcactttgggaggccgaggccatcacctgagctcaggagtttgagaccagcctgaccaacatggtgaaactccatctctactaaaaatacaaaattagccaggcgtggtggccggtgcctgtaatcccagctactccagaggctgaggcagaagacttgcttgaacccgggaggtggaggttgcagtgagccgagatcatgccattgcactccagcctgggcaacaagagcgaaactccatcacaaaccaataacagcaacaagacggatgatggaggaagcatatatgtgacaatttacagttcgggaaattcagagaagtagctcctcaacagtgtcacccgtcagtagaatacttccttccagaatcagtgtcaggaaatgtccaggaagccaggaactgagcctacacatcccgatgtcccaagtgcatgcgcatgtgtggctagccaatcccttgccttcctgcctctgggaagattattaggtcttccatttgttttcaagtaagaagcaaaaaaaaaaaaaaaaaaaggaaaaacagcttgagtttctttccatatcacagccttccaatgtgttattattcaacactgcagtgtcagatttagattttccacctcgaggaatttggtttagctttaattagttgctgtgaatatttctgagccaactctggaaagcatttatctggaaaatagtttccactaaaatataagctggatatagggtatcattttcctaggagggtttgtatcagttaacagttataaattctctccagccctctggatgacttttgccacaagcccatcatcgtcatattggttaattacttattaattaaacacaattcaaaatactgtattgaggcatctgcatcgccatctaagctctagcttcaggacttcagagcgtgaagatttttcggagaaaagataacgcttacaggttattctcatacaggcaactgatgcatttttcatccggcaacttttcataaaaacaagctgaaaaataccagacaaatgaaaaacagacttcagcagttccatgctgcttcctgagtaactgaagaatgtgcttcttgtggttaaaatgagagatctgtttaatatggatcaaatagcaacactccaggcattttcattgacatttcactgtgactttttgaacttaggagtgcggatacgaaaacctactctttctttctgctgcgcggagcctgcacaatctgcagaaagattgcagagccgggccaggcgaggtaacaggctacgtggggttcatgttctctctggttgttccctccccgtttgtacttcatttccattcacacggctgcacttcccagttttccaggatctctcctctgaaaccaggcaagggtttgttcccaaatcccacccattgcctctccagccccagacttgcttactggaccacacataggtggtgggcattggtgacttgtccctagggtcaggggaccagaaacttcccagaggggctggatggagcacggcagcactcagggcacaatggagagcggattcaaagggcaaaggagccgaggaaagcccctctgcccgagcctccccagcgccggccgggctccgctccggagcagccccgccgtctggcagagacatgctgttttgtttaaatcctccacattctttgccatttccccattggccggatggggctaccctccccgccgcggccgctgctgatgtcagcctcgctcgcgctcgctcctcccgcacccacctcccggccccaggcacactgcatcggcgcggacgctccggccccggcgaggtggctgcaaactcgcgggcacgcacggcgcccggggagccgagggactcgggggaggggacgcgcgcggaaggcgccagcttcctcccgcccgcccctggcagccgcgagccgaggttggaggcgcccggggccccagccgggcagagccgagcggcggcggcggcggcggcttc

SEQ ID NO: 18812 - DNA, 2300 bp, Homo sapien
ttggtgggatatattttcatacatgcagttgtggcaatattgattgagctttctctgagcccaaactaccaattcttacaagtgaaacaggatgtcatctccgtgttgtaatcattttatacttcacatagtacattggaagtctgaggtagcaaattcggcttccggaagtccttgacttggggtcaaagagcatcgctgatatcaggagaagctgcctgaatgtgaattcggtagtaaaaatggaaagatattttatgtgtttggctaggcgcagtgcctcacacctgtaatcccagcaccttgggaggctgaggtgggcagatagcttgagctcaggagtttgagactggcgctgtgggcaacatggcaaaaacctatctctacaaaaaaatacaaaaattagctgggcatggtggtgcacacctgtggttccggcggctacttgggaggctgaggtgggaggatcgtttaagcccgaaaggcagagcttgcagcaccactgcactccagtgtgagtgacagagtgagaccccatttcaaaaaagaaaaaaaaaagagccaggtgtggtggctcatgcctgtaaccccagcactttgggaggccaaggtgggcagatcacttgaggtcaagagttcgagaccagtctggccaacacagtgaaacctcatctgtactaaaaatacaaaattggccaggtacagtggctcgtgcctgtaatcccagctattctggaggctgaggcaggagaatcgcttgaacccgggaggcagaggttgcagtgagcagagatcacgccactgcactccagcctgggcgacagaacgagactccatctcaattaaaaaaaaaaaaatgatattttctgtgttcatctaagtagagaaataagtatagactgccttatgttcatttgcttcccagtgttccttggtggctggattattcatctaagtgagatgtaagatcttttgagcatctaacataatagttattcataaagacatttaggctgatggctttctcagaacgtcctgctgttcatgatggacttcatctatatttcaatgaatttctaaatggaggaaacagaacatttttcctttgattaattcattggttttcagtcctcaaggacccataggctggcgaactctaagaggaagtcacaaaaggaagaatggtaaattggaattggaactgtggaactcaccccgtaaaaatctttcaacactgtcctgagttcaacatctgaaatacagtggaccaggagaagattgatggaagctaatttaaaaagctaatttaaaattgcaccaaaaaaagcacagcgttatgaatttaataaagttcgtagggtgttttggaccacgattttacaactctctcactttttttttttttgagacagagtctcactctgtcacccaggctggagtgcagtggtgcaatctcctctcaccgcaatgtctgcctctcgggtccaagcaattctcctgtctcagcctcctgagtagctgggactacaggcatgcaccaccaggcctgattgatttttgaattttattagagatggggtttcactatgttggccaggcaggtctcaaactcctgacctcaggtgatccacccgccttggtctcccaaagtgctgggattacaggcgtgagccaccacacccggccacaactctcacttttaattgactgtgccccagaatcaagcactttggctagcaaatgatggctagttagatcacagaggtgtgtgttgcattctgtgtctgttcactgtgaaatcgggattttaagagtgtatgttgttgaacatacacctgtctttgagtgatcggtccccagaggccacctctaaggtgaagatttggggaggtaattgtgggaagccccaggaggagcagaggaaaatgagaaaggggacgaagggaatgtaatagaatgtgtgttgggagagggtttccttatgagccagtgcagaggaaagtcttgaaatgcactaaggaaatacagtctgtgccgtgatggtagcaccgatgtggaatcccataagcagctgcttgaaaaagacttggtggcagacataactctttttgccttttaagtgctccgggagatttcacatgccaatgttgaattgtccccaacttgggttcagggtgcccaggaactagcaaaatcagcttttttgtggtaggatcttcataggatccaggagctgtcacccacgaatgacagagcccctgcactggatagcctttctccaatctgtataaggtggaata

SEQ ID NO: 18813 - DNA, 2300 bp, Homo sapien
taccattttcttgagtgactgattttttttttttttttttttttttttgagatagggttttgctctgtcacctaggctggagtgcagtggtgtgaccatagttccctgcagccttgacctcccagactcaagtggtccttccacctcagcctcccaagcagctgggactacaggcacaccatcatgtccagctaatttttaatttttgtagagatggggtctccctgtgttgccagggctggtctcaaactcctcagctcgagtgattctcctgccttggcctcccaaagtgctgggattacaggtatgaacaaccacacctggccaaattttcaatttataggacctctttatatattatagatggtaatcctgttgactacatatgcagcaaatattttcccctagtcttttagctttgtttatggtggcaattttctttaaatcattgtatttttaaagaaaggaggttaatttcacaggaagtggaggcaagatcatatgtttgaaaggcctttagaagtcagttgaacacacatggaaactacaaatgcccttgaacaaagcatctgcaagcgtgaattttccttcattgtaccacacagttgcagcagcaaacattttaaaaaggggagtcttctgttctaattcaatgatctgtgaaatggcacattatactttatttccctctacaaacatttccgttcactttcagcctccttcaccaaaacagaagtcatttttacatcattctaagtcaaaataaaagtcttgaacaagtagttgggtcagggaggccccagaaatcataaataagaatggatacttctttggctccagcaaaatggtagccatcctttgagaaatgccattttttaaaccctttacaatgattacaaattcaatacatgcttcttacaaaaagcttagggtgactccatttttttgtagtgaaagtagccagtcctcgaagtgtggtgtataccttttccacataattcagaccactaagatctagaactgtaatctatagttgtgatttttttttttttttttgagacagagtttcactcttgttgcccaggctggagtgcaatggtgcgatctcagctcactgcaacctctgcctcccgggttcaagcgattctcctacctcagcctcctgagtagctgggattacaggtgcccgcaaccacgcctagctaacttttgtattttcagtagagacggagtttcaccatgttggccaggctggtctcgaactcctgacctcaggtgatctgcccgccttggcctcccaaagtgctggggttacaggtgtgagccaccgtgccagccttatagttgtgatttttttctgtagtttttaattgggagcagggagtaggcaggggaagggttcacaggttcctctgaaaatctgatggaaagttattcattctctccccagataaacgaatacaagcacacacacataaaatgttgcgttggaaaatctggcttggtgaactcaaccagctcatgcaacccctagcaggcttctttctccattttaatcttgcctccctcattgttagacctgctctagggactccaggctgatttctaagtcactttcatgaggtagtgtcgtctacagcagccagaactctccctccctcatactttttggttagagtcaggttttcaaagacattcgtgaggttcacctcaatcataggctccttctggcaatgttctgtgttcctttctcaaaacactgtcagatttgtaaagcaaaaccaagcctttgtgaaactgggctgcctatttttatccaccttccctctcaccccatctcctgaaatacgttgttgttatttctctgattagcgttctagtcgtgcagagagacccaaggctcatggataaagaccaatcacggctttgaaagacacactcaactcctccaatatggaaatggttacactttacaatgaacacgaacagaataaaatctctttagggaaacagtttcgtgacagccaaatgctgaaactcagaagagatacaaaattcatccttggctgacaaatgatcactaccctcaacaatgtccttttttcttgactcttaattaagcactggaggtggtgtgtctaattagagagaaagacatctagagctacccatgcatcagtgtgtacagtttgtgcactgtatgaacacacagcagaggaggcaaatggggctcaaattcagccctaagcccagagcacctgctgagtctgcccagaaggggcacctttttctaattcatc

SEQ ID NO: 18814 - DNA, 2300 bp, Homo sapien
catcctggctaacaaggtgaaaccctgtctctactaaaaatacaaacaagtcagccgggcatggtggcgggcgcctgtagtcccagctcaggaggctgaggcaggggaatggcgtgaacccggggcgcagagcttgcagtgagccgagattgcgccactgcactccagcctgggctacagtgcaagactccgcctcaaaaaagaaaaaagaaagaaagaaagaaaagccttgctactgatggtgccctcatcacctctcacctggtaactacaataactgcgatagacttctagggaatctccctgttggtgccccaggcgcacttgctactgagaatgctcttagttaactgcatgatcgctccctcccctagttaactgcatgatcgctccctcccctccttcatgccatcctcaaaagatacccttgggccaggcactggggctctgtaatcccagcactctaggaggccaaggggggagggtcatttcagcccaggaattcaaggtcagcttgggcaatacggtgaaaccccatctttacaaaaaatacaaaaattagccgggcatggtggtgcatgtctgtagtcccaggtactcgggaggctgaggtgggaggatagcttaaatccgggaagcagagattgcagtgagttgagactgcgtcactccagcctgggcgacagagcaagaccctgtctcaaaaaaaaaaaaaaaaaaaaaaagacatcctctcaaggaggcctgtggtcatcctagtgaaaatttcacatacacagaccactccttcctcccccacacacccacgctttatctctcccttctgagtttaatgtttttcttcttaccacctatcacaaagtaagttatgaagcataataataaactatatcctcttgatctcacaacccagcctaaaaattaaaagattatcagagttcaagatcaccttgggcaacaaagcaagactccatgtctgcaaaaaatacaaaaattagccgggcgtggtgatggatgcctgtagtcccagttattcgggaggctgaagcaggaggattgctttatttagcccaagagttagaggctgcagtgagccatgataatgccactacttttgaacaacaaaagacctattagcattataaaaatagactgcatttgattccttcacagtagctggatattctccttttgcccatgtcgtcatgttggggcaatgagaaacaacacacatggcgatctggtggatgcttaaatctaaactgaggcactttgtcacactgggtacatttgtttagtaattgcctattaaatggtttctccctaagaacatcacaatttatctttacttatttatttaacattattgattgaatctgccatgcttatctgagaaacatacatttctcccggaaataaaaaccttgccaaaaatcacacaggggaccttcaacttcaccttcatcaaactagtctgaatttcctgtaagctgaggagagattttccccactggggctcagagaaggggagtcagagaactcagaaggcctgaaagactgaaaagactggagatctctagagggttccaagaaacttggggggaattaagcatttcacgtaggaacagcacgttattgggagtttacctacagagataaatattttttctttggcagatcgttccacaaggccatggatggaattcctagggagttcccttgcaattaaaaaaaaaaaaatctagcttatttatattcgaccactccctagacccatctacagtctctcaagtccccacctagaacagcacgcagccgattcaggacccagtaagcagcacttccgcgcctaccctatcccttcctggagcacatccgggactcggcgaggcgtggtctcgggaggcggagtctgacgcaagccggcccagcccacctggctaaattcacagtcgcgctcgctccttccgcccgccagaggtcgcaggctgcgagagcaggttcctggtttggcaagcactcgccccctcaggcccgttcattctcgcgagagaaagcgcgaggcctgccgggagtgagcgcggccgtacttaggtttgctcaaaatggcagcgctggaggaagaattcacgttgtcttcggtagtcctgagcgccgggcctgaaggactcctaggcgtggagcagagcgacaaaacagaccagtttctagtgacagacagcggcaggacagtcatcctctataaggtgaaggcaataggtttgggagcgccccgactgccttctcgcccctttctgagc

SEQ ID NO: 18815 - DNA, 2300 bp, Homo sapien
attggttttcttctgttaactaccctttcatccctggagtcaatccttcttggtcatggatcttaatatttcccgttggatttggtttgttggtattttgattaggatttttttttgcatctatactcatggggatattgctctgtagtttttttgtgtggtgtctttgtccggctttggtatcagagcaaccaaaagcccaaatgagtttaggaagtatttcctgctcttttatattttgaaagagtttgggaagatttgtgttaaattgtaaatttgtagaatttaccagtgaagccatctggtcttgggcttttctttgttgggtgtttttaattgttattcctggttcataaagccctcccttcctcagggctcacctttccaggcttcttcttaccatgagctctcatttcttccagttcctgtggcaatcactgtcttcataattcatttctatactaaagcaaagcatatatatttaactgtaactccccccttccccaaaatatcatatatttatacttgggacttttttctgaatttatgtcttattttatagaatgcctctctgtatggaacataaaatttcaaacactacagacttcaaaagagttaccacaagggaccagtggtcaagtaagttttttcacttgagtactttctctgatttagttattttgttgtgttttgttttgctttgttttgagatggggcctcactctgttgcccaggctggtcttttactcttgggctcaagtgatcctcctgcttcagaaatttagttatttttctgcctaataaatatgctgtaagggaagagatctctttgaacctaaatattttggcagcttttcaaaccaggtgtggtggtatgtgtctgtagtccctgctactgaggaggttgaggcaggaatatcttttgagcccaggagttcaaggcttcagtgctgtatgattgtgcctgtgaagagctgctgcagtccagcctggacaacatagtgtgatctcatctctgtaaataaataagtaaatagcttggcagttattgatcaaatttaagaattattttttacctgagggattatgtttagttcagttattgttgaaatcacttccaaaattctaaatttttgccagaacaattagctatttaataaaacagcttttgtttttagctgctctttggttttgtctttttacttatgtattttgaactataccctcaagctgttacttttcctaataaattagtcttttagattatgtgttaaatgttaaatgttaccatgaaattacataaaaatacttaaaagaattaaaattgaagctgaacagactgtgcacttcctgaggcagggttccttgtgagtttttttctccagtgtattttcagtgcttagcaaggtgcacagtaagttttagttacttagtgaatgaatattcatatacaaataaatcaaggcaataggatgttttggtaattttaatttgaggataaagagacaaggtttctcagcatacaatttaattatactttatatgtaaaaaagtaattttaactattcacaattttttattgtgaataaactcacacttttttattacaacttattattttatttgttttatcattttattatttattattacaaacttttttttatttccttgttccctcaggcttttttttccacatacctgtcttatttttacaatcataaaatataaagtgttaaattccggtttgtaaatttagtgcattagaagtttgcccatgctatagtagccttggtaattattatgttaatagatgtataatagtgaccacattaattttaaacaattgagttttttaaaatgtatatgttgattaaatttttctgagttgaaaatattctttaaattatgcttcattcagacttgggcaaaaataagagcctatttaataagctctgcatataaaattcttcttgaaagttgcttactttgcctcgtttttaatactgagcacttatacagtgagtgataaggctttattgagtcataccttagaagagaaaaaaatttgcttatgtttttgataactttttttgtagctctggtattatggagaacatttgtttatgctacatggaaaatctctaactgtgattccatacaagtgtgaagtgtcatcattagcaggtgctcttggaaaactcaagcatagtcaagatccaggtagaaacttacttctgtttgttttattaatacaaaccgttttattaacttgtagtttcgtacagattcccacagcc

SEQ ID NO: 18816 - DNA, 2300 bp, Homo sapien
agaacaattagctatttaataaaacagcttttgtttttagctgctctttggttttgtctttttacttatgtattttgaactataccctcaagctgttacttttcctaataaattagtcttttagattatgtgttaaatgttaaatgttaccatgaaattacataaaaatacttaaaagaattaaaattgaagctgaacagactgtgcacttcctgaggcagggttccttgtgagtttttttctccagtgtattttcagtgcttagcaaggtgcacagtaagttttagttacttagtgaatgaatattcatatacaaataaatcaaggcaataggatgttttggtaattttaatttgaggataaagagacaaggtttctcagcatacaatttaattatactttatatgtaaaaaagtaattttaactattcacaattttttattgtgaataaactcacacttttttattacaacttattattttatttgttttatcattttattatttattattacaaacttttttttatttccttgttccctcaggcttttttttccacatacctgtcttatttttacaatcataaaatataaagtgttaaattccggtttgtaaatttagtgcattagaagtttgcccatgctatagtagccttggtaattattatgttaatagatgtataatagtgaccacattaattttaaacaattgagttttttaaaatgtatatgttgattaaatttttctgagttgaaaatattctttaaattatgcttcattcagacttgggcaaaaataagagcctatttaataagctctgcatataaaattcttcttgaaagttgcttactttgcctcgtttttaatactgagcacttatacagtgagtgataaggctttattgagtcataccttagaagagaaaaaaatttgcttatgtttttgataactttttttgtagctctggtattatggagaacatttgtttatgctacatggaaaatctctaactgtgattccatacaagtgtgaagtgtcatcattagcaggtgctcttggaaaactcaagcatagtcaagatccaggtagaaacttacttctgtttgttttattaatacaaaccgttttattaacttgtagtttcgtacagattcccacagccttctatttgtaaagctttttcttaattttgaaatttaccgctgtttattgaaacttgtgaacaggccaggcacggtgtctcacccctgtaatcccagcacttaaggaggcagaggcgggaggatagcttgagcccgggagttcaagaccagcctgggcaacatagtaagaccctgtactccacagaaaatggaaaacaaaaaaaaaaaagtttgaaacttgtgaacagtccaaattgcaggttctgtggcaagctgaagagctacactgtgttttgaatgccagtgttctgattttaggggcaatgggagaacccccaaacaaaatcagtaatacctctgccctcccttgtttaccgatggcctcatctgttagcttaacgttgttggacatacagccttttcactatattatgattttcttatctgaggttatcagaattacatggacttcaaagcctctcttaaattgtatgagtggttttttttaaattgttctttgattgtttagttgggcaaaaagtaagtcaaaacattccagaaattgtgcattttgcattttcttaggaactcatgtcgtgtcccattttgtaaactgggagacacctcaaggatgtggacttgggttccagaactcagagcagtcaagaagaattgtaagtttcgtagttgaaattgaaacattagtgcaaatgttgaaaaacagaaaaagactgaattattttaatgaatcatatccttacaactcttagagctttgactataatgacaggacagtttgcggcttgaacccagtaacctcacattctttatccagaaatgccccatgttgtctattagttatatttacttttaaaagtttttgatgagagcaaaagtgtgctaatctctttggagtgtttcatatccctctaaatgtgtattggatctcttatattgttttgtgatcctaatcaatttacttaattccagttaaggagacgaaaaattgaagtgagtttacagccagaggttccaccatccaaacaacttttgtcaaccataatggtaaataaataatattgaaatatgaaaaatcaaactcaagtgttccaaagaaatcgcatctactcttcgttctgtcttatttttatgatcatc

SEQ ID NO: 18817 - DNA, 2300 bp, Homo sapien
agctaatttttgtatttttagtagacaggatttcaccatgttgcccaggataatctcgaactcctgggctcaagtgatccgcccacctggcctcctcaagtgctgggattacaggcctgagccaccgtgcctgaccaccctcttcaaacaaaatatgggcacctccattggcctaggtcttcatcttgcctactttattgacttacattacttacctggtccctggagacatatacacatttgtcacccttagagctcgaccaaattgtattgaatgcatttctctggcaattagtgcttgtattttaattttcatttcacatatgtgttccattttcctaacaagactgaaataagccatttggtatgcagaattctgttagatatttttatttttatttttttgagacggagtcttgctttgttgccaggctggagtgcagtggtgcgatctcggctcactgcaacctccacctcccaggctcaagcgattcttctgcctcagcctctggagtagctgggactacaggcacgcaccaccacgcctggctaacttttgtatttttagtacagaacttttgcatttttagtagagatggggtttcaccatattggccaggctggtctcaaactcctgccctggtgatccgccctcctcagcctcccaaagtgctgggattacaggcgtgagccaccgcgcccagcatcttttttaaaaaaaattgagacagggtcttgctctgtcacccaagctggagtgcagtggtgcaatcacggctcactgcaacatccacctcccaggctcaagcaatcctcccacctcagcctctcgctagctgggaccacaggtgcacaccaccatgcccggctaatttttcaaattttttctaaagacgaggtcctgctatgttgcccaggctggtcttgaactcttgacctcaagctatcatccggccttggcctctcaaaggactgggattgcaggtgtgagctaccacgcccggccaactatttttctttaaattacttttcggttgtcacttctctcaataaatattcatatgtttataacacctttctcttatctaaagagctgacctcaaccactcagggttgagtcgctgtgataaggtttgagggtgcctgaaatgtcatcatgattcgtcctttgggctaagctgaaacctagtgacttgtcaggtcaataaattaaggttatttcccgataatacaaacatttaacaccgtgaagtaggttttaggcaggattccctcttttccactgcaaaggagaggtaagttcttgctgaggtgatcgaagtcctagctggggcactgggaaggtggcgggacattggaacgtgcagtagttgcgttctggagtttactgaggctttcccagtgcggattccacgctacaggtcttagggcgcccctccctccgggcgtggcagcccggggcgtggctcctggcacagatccggagcagttgtcattggagtcattttctggactccagctccatgcttcagagtttcctaagttcagggggcttgtctctctgtcccctcgactaatttccctctgtcgctggcgctgcccggtgccctcggtcgcttgggccgcccctctccgcgacttttttttttctttctctcgctggctctttcagcatcagtttccatagggggagggaagggaatgatatttgggggctcccttgccttcctctccgagccgcgaaaggggagacgcggggaggaggtccggccggctttgggctccagccagcggtccgcggagactttggtctccgaaggcctttgacgccgggcatttcgcgagctgcgcgcccctctcagccgcgccacctgcgcccggagttttgccgcgccacccgcgcccggagtccagccgcaccgcgctgtgccgagcccaggcgcccagggctccccgcccccgactcgacgctcccgcgctccccctagcggccgccgcgccgcttcgctccgtcccaggctcgtcggcggcgcagctcacgtgaccgcgctctgggcctgcggccgctgtcggttcccccagtcaccgagcgagagggaagaaacaagatggcggctgaaggcgatccggagtggggccccagcaattcggattgagccttctccctccacccgcttccgtcggccgggcccctcccgcccggccccgcgggcctccccacccggccccggcgctccccaccgccccccctgcgcccgcccctcccccttcgctttccttctccccccgcctcggctccg

SEQ ID NO: 18818 - DNA, 2300 bp, Homo sapien
atgaaccctatacagacacataggcattcactcatatacatatgtgcccacacaaataaatacagaaataatatagatgtatatatttatgactacattttttagctctgttggctgagagactctagaatagtaacaccccaatagtaacaaacacaccaaccacttagattgtgacttctaacatcattctccaatttgttcttcaaaaaagaacaaaggctccttggagagatggtggattgtagggctggggcagggaaaatacaaggtgagcccggagcatcttgtaatagtggaaagtaagaaaatgctggatggatggatggatggatggatggatggatggatatgtgtcaaaaggacactggactcggaaaaagtccccagtggccaaagctgaaacaatttgtgcaacaaaattaaaagtgatagtattgcatgataacccaaagaatataattaatatccatgagtgcgtactgatataccgtgtgttctgtacactgtggtccttctgtatcccgtggtctataacatgccatagtatcactctgtctaagttgaaagagggtaggtgtactaagagacttagtgactttcagaacaattaagggacttcagaaagaaagttgtttccaaaagggcctctgttttctctttttacagttgaggaaatgatggcctggagaggttaggtagcttgcccagagtcacacagctaatccaagtcagatttgcagtgggttttgggtttctaggttttgatcactgcagtgtgctgcccagactgtgggtctatgtcagcttgcagtttttgtcatctgtcacagatatccgtgacagatatctatatcaaggctatattttaaaaagataggctcattttactttttttaaaaagtagagcccataattagcatgtattatctagaggtgaaggtacaccaaattgattgaattctgtaaacacaattttgtttgtaatcttgatttttatttcataggtctaatgctttaaaaatacttaatttttcctctttaatagcttgtattgaaactcgtaagtgacatttgtggtactgttctatttggttatatataggaataatttttttgtttgttttacacattatagaagaaattttggaatccataagagccaaaaagggagacattgataatgttaaaagcccagaagaaacagaaaaagacaagaatgagactgagaatgactctaaagatgctgagaaaaacagagaagaatttgaagaccagtcccttgaaaaagacagtgacgacaaaacaccagatgatgaccctgagcaaggaaaatctgagggtaaaaaaattacttgattaaaaagaaatatttcattagtgttatttatgaaatctccagttttacttgcaaaatgaaagtgaaatattgcaagcagctacctaatttaatatttctaaagagatcaggataccgtcccctcttataacgtgtgtaacaattgtaatgagttttatgtattagtgaatttgctataatgttatattcatgtctctatttatacttcccattaagttgccatttccctatgaaaaagaactattctttaatattataccagagtatacacttttgtatgtgataaaatgttcatttttatattaattacttaagcattcttaatatattattaaatattcttaaatactctctgaattacctattgcagcaatatccgagaatctacttgctttaaaatggccgttcaatggaagcaggttttttgtgattatttagtagttgactgaatgtggccatttgccctgaagcaattttaaagaatatctttgaagttttgttgtgcattttgctgtagagccaacagaagttggggataaaggtaactctgtgtcagcaaatcttggcgacaacacaacaaatgcaacttcagaagagactagtccctctgaagggaggagccctgtggggtgtctctcagaaacccccgatagcagcaacatggcagagaagaaggtggcatctgagctcccccaggatgtgccaggtacagagggcagcgtatcaatgcctctgtaatggggggaatccttcccttttgtagtaaaagccgaatgtcacctaaaaccttaaactatgtgttcattcatgctgcttgcttacagtgccatccccatttgctaaattgtcacctaacatttggagtttgataaatgtcctcgcagttagtgcttgaaactcatcataattttcatgcttcttaaacttcatttagctgttt

SEQ ID NO: 18819 - DNA, 2300 bp, Homo sapien
ccaattaaagtgtaaattcagtggcttttagtatattcacaaagttcaaccattattacatcaatcttagaacattttcataaccttgaaaagaagcctcattcatacccattagcagttacttcccaacccctcccgaaagtgccaccagcttagtggtctactttctgtctctctggatttgcctattttggacagtccatagaaatggaatcagacaatatgtggtcctttgtggctggcttcatccacttagcatggttttaaggttcatccatgttgtagcatttatcagtactttctttttgtttctgaataatactctgtatggatatgccacattttgttatccattcatcagttgatggacattgggctgtttcctcttttggctatacgaataatgctgctatgaacattcatgcagaagttttttgtggccatgcgttttcacttctcttggcgatatacctaggaatggaattactggatcatatggtaactctgtttaaccttttgaggaactacattgtcttttgtaacaagtcatttttaaaaaaaaactagataagctagataatgcatgtggctagagatactttaaaaaaatatttttggctgggcgtggtggctcatgcctgtaatctcagcactttgggaggctgaggtgggcggatcacctgaagtcaggagttcaagaccagcctggccaacattgcgaaaccctgtctctactgaaaattcaaaaataagccaggcatggtggcacatgcctataatcccagctacttgggaggctgaagcatgagaattgcttgaacccaggaggcggaggttgcagtgaactgagatcatgccactgcactccagcctgggcaacagagtgagactccatctcaaaaaaaaaaatatatatatataaattcctcctttcagagtaaaaattacatttatataaatgtctttgtttcacagatgtgaaggagctcttagattctgacagtgataaaccctgcaaggaagaaccaatggaagtagacgatgacatgaaaacagagtcacatgtaaattgtcaggagagttctcaagtagatgtggtcaatgttagtgagggttttcatctaaggactagttacaaaaagaaaacaaaatcatccaaactagatggacttcttgaaaggagaattaaacagtttacactggaagaaaaacagcgactcgaaaaaatcaagttggagggtggaattaagggtataggaaagacttctacaaattcttcaaaaaatctctctgaatcaccagtaataacgaaagcaaaagaagggtgtcagagtgactcgatgagacaagaacagagcccaaatgcaaataatgatcaacctgaggacttgattcagggatgttcagaaagtgattcctcagttcttagaatgagtgatcctagtcataccacaaacaaactttatccaaaagatcgagtgttagatgatgtctccattcggagcccagaaacaaaatgtccgaaacaaaattccattgaaaatgacatagaagaaaaagtctctgaccttgccagtagaggccaggaacccagtaagagtaaaacaaaaggaaatgattttttcatcgatgactctaaactagccagtgcagatgatattggtactttgatctgtaagaacaaaaaaccgctcatacaggaggaaagtgacaccattgtttcttcttccaagagtgctttacattcatcagtgcctaaaagtaccaatgacagagatgccacacctctgtcaagagcaatggactttgaaggaaaactgggatgtgactctgaatctaatagcactttggaaaatagttctgataccgtgtctattcaggatagcagtgaagaagatatgattgttcagaatagcaatgaaagcatttctgaacagttcagaactcgagaacaagatgttgaagtcttggagccgttaaagtgtgagttggtttctggtgagtccactggaaactgtgaggacaggctgccggtcaaggggactgaagcaaatggtaaaaaaccaagtcagcagaagaaattagaggagagaccagttaataaatgtagtgatcaaataaagctaaaaaataccactgacaaaaagaataatgaaaatcgagagtctgaaaagaaaggacagagaacaagtacatttcaaataaatggaaaagataataaacccaaaatatatttgaaaggtgaatgcttgaaagaaatttctgagagtagagtagtaagtggtaatgttgaaccaaag

SEQ ID NO: 18820 - DNA, 2300 bp, Homo sapien
actacaggcacccaccaccgcgcctggctaattttttgtatttttagtagagatggggtttcaccgtggtctcaatctcctgaccttgtgatctgcccacctcggcctcccaaagtgctgggattacaggcatgagccaccatgcccggccctaagttttgtatttttaatagagatggggttttgccatattggtcaggctggtgtcgaactcctgacctcaggtgatctgcccacctcggcctcccacagtgctgggattacaggcgtgagccaccgcatctgacctcattttattcttttagaaaatttaaacattttcaggtttcttgtttttgcaaaagttaggatttttccttcaaaactcctttatcacatttaataacaattatctatttctctatatttggtccccaaaattttcctaacagatattttggaattaggttaactttataaagtcttcatgaatttttgccttatcaaccttacaatgaaacattctcattttataaacttatatggcatttaaaatgaatatagccccttttaaaaaaaaatgttaggtgcgtgttatgcctatgaatgaagaagtttttcttttaaaggacatataataccaaagtcttacaaaaccatattataaatactggagtcctaatgaggacaagaaacacagcccttcagtttagtagagtgaatatgaatgtgtatgtgtatgtatatacatatagatatatatggatttctttggttttcctttcaggtatagacttcagacagtaaagtccttagctggagtgagcctgatgttacggttactgtgggcaagtttgagatgggatgatatggcggccaaggctcctccaggaggagggactacacggacaggtaagggggaagggagttattttctaatttaagtttaaaagctaaaatcacaggccaggcgtgggcgctcatgcctgtaatcccagcactttgggaggctgaggcaggtggatcatgaggtcaggagatcctgaccatcctggctaacatggtgaaaccccgtctctactaaaaatacaaaaaattacctgggcgtggtggtgggctcctgtagtcccagctactcgggaggctgaggcaggagaatggcgtgaacctgggaggcggagcttacagtgagctgagattgtgccactgcactccagccagtgcgacagagtgagactctgtctcaaaataataataataataataataataataataataataataataataaaatataatgcttgttttttagaaatacagttttggccatgtgtggtggctctcacctgtaatcctagcactttgggaggccaaggcaggaggatcacttgaggccaggagtttgtgaccagcctggacaacataacgagaccttgtctcttcaaaactctaatttaaaaagaaaaaaatcaactaggccttgtgtttgtagtccctgccacttgggaggctggggccaggaggattgcttgagccaggagttcaaggttgcagtgactgtggtccactaatgtcttccagtctggataacagagcaaaaccctgtctcttaaaaaaaatttttttttcacatacagctttgttgaagtttggcacatgctataaaatcccaggggccagaagggaaggttcagattataaagtgagtcacttatgtgtgaaccagtctacattttttaaaagatatttatgattgtttaattaaaaatttaaactaagacttctggaggcctgtgcttgctgcttctgtcctaggctttttattattttgattgagtattgccaccaggagctcagctatacccagcagcattttgtttcgtttaggaatttgcagcgaggaagaagctcagtattgttgcagtctagcagtgatcctgctagatgttagtgatcctgttaattaagtcaggtgtttccaaaagtttattccacgtgtgtctctttttgaaagcaccagatgtacctttttagtctctgagtatttcagttggttattaatactattgaattaaatcaccatagaaacatccgaaactgaaatcacaacaacagaaataattaagaggagagatgttggtccttatggcattcgatctgaatattgtatcaggaaaatcatttgtcccattggagttccagaaacaccaaaaggtaagaaatagaattctattctttcatgattaacctgttaaccatgtattttatgaattgaaatttgatataattttttcttctctgttcaccttttaaaaaag

SEQ ID NO: 18821 - DNA, 2300 bp, Homo sapien
actaccagttgttaaagctattataaagccaccaaaattagcatgataccaaaggaagcaacacaaatagttacagaggcattatatgtgggaattggctgcatgacagtggtgtcattttgcatcagtaaatgatactggaataattggcttatagtttggggggaaaatagacttccgtgttacaacatataccaggactaagaacattcttgggaggatgtatctgatgagagaatacaagagaactttacaagcaataattaaagccaaaatttttaaaaagactagtctggccgcattttttaaaattgcaagtttagaaataaaaacgtagatggcaaagtggaaaaaatagtttctaaaaatatgtattaaataagtaggaaaagaaatgggcagtgtgtggagagtgaattcacaaatgaagaacaatgacttaaaacagtttttaatgccaacctgtggtaattgaggaaatttagcactgtgatacatgatactatttgcagttgcctgaatattttactttactggtgatatcaaggtttggcagggttcagtgaaataggcacacagagctggcagtagtgtgaattggaataacctttcaaaacttcaacttagtactatattcctactatgaacccagtaatattttttggagggttactttaaagaaataatcagaagcacccaaaaatggataagcaggaattttaccatggcgttagtttaacaacaacaacaaaaaggtgtgggggaagtattctgaatgtcaaaataagtttcattttacatatgtgcagtaatatgaagtatcattcagccattaagagaaacacaaagatatatatgtgtatccacagatggaaaaaaggcagcgagtaaatattaaaagcttgagaaatttgatgttattcagtagttagtaatgagtctgtaagtgtcaaattagctaccaaaaaattattcttagcaactgttctacatgggggaaaattccacttgcctattctagtttcagcaagttaaactaaaaagaggtttatggaaaactgtagagccattccagttcaacttcattcattcaatagacatttattgaacaattactatgaaagcattatttgggccaggtgaggttgctcatgcctgtaatcccagcactttgggaggccaaggcgggtggatcacgaggtcaggagatcaagaccatcctgactaacatggtgaaaccccatctctattaaaacaaatacaaaaaattagtcgggtgtggtgggacatgcctgtagtcccagctactcgggaggctcaggcaggagaatcgcttgaacccaggaggcagaggttgcagtgagccaagatcacgccaccgcactccagcctgggcgacagagcgagactccgtctcaaaaaaaagaaaagcattatttgagcactctgccctagtattgaggatatagtggtccttgccttcatggctctcccaagctatctgtcaaatagctgtaagagaagcttattataaatgcagttggcccagaatattccagattctttatattttgtttaaaattcatatgaattaattttttattaaattagcacttatttttaatattatattcctaagaaaaggcagccttataaatggcatattttacacattcttttttgtcttccctattatcattttggttttagatttataggaagaattttaattggttttttccattatcctacagacagcagagactggataacggttggcagtgaaaacagactcactgccaaccaggcaggacctttggatgtgggtatatgtctgaatgtatccttaggctctgaatatcccagtgtttttttgaagatggaaaagaatacgttcatgtgaggtgttgaattatttcaattcaaaataatgccaagggtgtataagcattcataatgttttgctgtttgggtaggtgctcctcagcaagtgatgactcaaatcatcagggggcagcctgtctccactgcagtctccgcccctaacacggtttcctcaacacctgggcagaaaagcttaacttcagcaacgtccacttcaaatatacagtcttcagcctcacaaccccctcgcccccaacaaggacaagtgaagctcaccatggctcaacttactcagttaacacagggccacgtaagtaacataagctttattttaactttagaggtgatcttatttattcttgcggtaagtttaaaaacatgaacttattttgatacgtttttaaatgtgctgattt

SEQ ID NO: 18822 - DNA, 2300 bp, Homo sapien
cacccacgcacagtcatccaagccccaagttgcagcacagtctcagcctcaaagtaatgtccaaggacagtctcctgttcgtgtccaaagtccatcacagactcgaatacgtccatcaactccatcccaactgtctcctggacaacaatcccaggttcagactacaacctcacaaccgattccaattcaaccacatacatctcttcagataccttcccaaggccagccacagtcacaaccccaggtacagtcttcaactcaaactctttcatcaggacaaactttaaatcaagttactgtttcatccccatcccgtcctcagctacaaatacagcagccacagccccaagtcattgctgtgcctcagctgcaacaacaagtccaggttctctctcagatccagtcacaggttgtggctcagatacaggctcagcaaagtggtgtgccccagcaaatcaaactccagttacctatccaaattcagcaaagcagtgctgtgcagactcaccagattcagaatgtggttacagtgcaggcagccagtgtgcaagagcagttgcaaagggttcagcaactcagggatcagcagcaaaagaagaaacagcaacagatagaaattaagcgtgaacacaccctccaagcttctaatcaaagtgaaatcattcagaaacaggtaaagttattaagtaaaagcagcatgttcagtagcttgaattattgtgctgtgcagtagaattagtgtttggttgtgttaggtttcctaaatgagacaaagtcattaatgtttaaatttagaagaaacactgaattgaccaaaaaaaatactgaatgactactgtggtgtggaacacttcgttagatacatataatatatagtcagtgcttattaggaatgacctgtattttgggaggactaagatgggaagaatggagttatgagctttaatctttaatataaaacttgagggtttaactaagttttaaagccacttcagacattatagcaattcctttaaagttattgaaagttgtcattccttagtttgcatgtagactatgcaaattatagacagattaaactcatttgcatttctagccacacctttgtaaaaaagtttttgaaaacatattatttcatagcttaagtaaaaagtggcatcatccagcaacatcttgcaatggcacattagtgaaataaagcaatttagatgagttagaattagtctactaaagtgaagtcacacatataacatctgataacattactggcagaaaccatcttttcatctacctatagcttgcttcgctcagcactaggcaggagtttgaatgtggattttaagtgttaccaagttgtgagaccttcattcagttcctaggtctcccattcacagtccgtgaaactcacttatccctccttagctatagcctcttaaaacccttctctttccagccacatgagattattgcaatgattaaatgaggtcataaatgtagaagcactttttacacagcgaagttattttaaagatgtagtattcttatgaaaatgacggtcatatatattatatttaaatgtattattacccagctttactgtgtatctataaactgagaattactacactgtctgtctatccgctaatctttgtataggggagacgagggacagttctttaaaattcattcctgggaagaaagcataatgttaaaaatacggcctttggagaaggatagccaggttaaaatttcagctgtattacttactgtttgtcaaacaaggtggttaatttctttatgtctcagtatcttgtttataaaattattgctatggttcagtgttgttgtaaggaataaacgaggtaatgtcaagtgcttagcctagcacggtacccagcaggtggtaagcacccaggccatctggtagctgctaattttatttatgttacgatataaaattcttacagtttctttaaaaaaacacatatgtgctcaaatttctactgttgttatctgtgtactaacctgtggtgattataaaatatgcgcttttggatttattctgtcctgaaggtggtgatgaagcataatgctgtaatagaacatttaaaacagaaaaagagcatgactccagctgaaagagaagagaatcaaaggtaggggagacgcagggtcttgttgtctgtccgtctcttctctttatcgtgcacacgcacagagttctgagtttatacttgtttatcttgattgaagttcattaaatgagaacacttggcactaatagttactcataactggtt

SEQ ID NO: 18823 - DNA, 2300 bp, Homo sapien
agtgagcacctgtagctacttgaaggggttgaggtgggaggatcacttgagcctggcaggtcaaggctacagcaagccgtgtttatgtcactgcagtccaggcagggtgacaaagtgagacactgtctccacataagaaatactcttggtcatagctatgatttctttacaccaagtttgtttgtggatgccaatcacaatgggtttgttcctagggtaataaggtttgctttgatcatttccaagagtaagttgtaccactagatagcagaagaggtgtgcttaaaaagtatggcaaatgcatattgaggaagtagtatgttggccagacacagaggctcacgcctgtaatcccaacactttggaaggccgaggcaggtcacttgaggtcaggagttcgagaccagcctggccaacatggtgaaaccccatctctaccaaaaatacaaaaattagctgagtttggtggcacgtgcctgtggtcctagctaggtacttgggaggctgaggtgggaggatcacttgagcctgggaggtgaagggtacagtgagccaagactgtgccactgcactctagcctgggtgacagagtgagacccactctcaaaaagaaaaaacagagtacagtaaagaagctggccaaaaccaagatggcgatgaaagtgacctctggttgtcctcactgctcattaaaactttttaaaaaatatatgaaaaggggccaggcagtgtggctcacacctgtaatcccaggactttggaagtctaaggtgggtggattgcctgaggtcaggagttcaacaccagcctagccaacataatgaaactctgtccctactaaaaatacaaaaaattagctgggtatggtggtgggtgcctgtaatcctagctagttgggaggctgaggcaggagaatcacttgaacccaggaggtggggaggttggagtgcgctgagattgtgccactgcactccagcctaggcaacaaagcactttgggaggccgaggcgggtggatcacctgaggtcaggagtttgcaaccagcctggccaacatggcgaaaccccgtttctactaaaaatacaaaaaaattagctgggtgtggtgttgcacgcctgtaatcccagctacttgggaggctgaggcaggagaattgcctgaacccaggagacataagttgcagtgagctgagattgcaccattgacaagagcgaaactgcatctcaaaaaatatatatatgaaaagaaagttatcttttaaaaaaagaaaatagtgcgttatgttgcactactctccctgcagtctgaaattctagacataggagcatcataataaataaggcaaatctgcctcttttctgctttatgctggtcagaccacattttgagtctcaaggccagttcatgtccagtctcactgtaaggacagagagcaagagcaactagaagaaagcagccagtgagagaggatgcttgaaatcaccttctgagcaaccacagaaagagcccagatgggacaggggcaagccaggagggacgctcttcctagccacttggctcatctttcagtcagctctcctttgaagataactagcagctttctagttgttcttacctagtcttcattttgtttctagttgtcttagttgggtttaagatataagaaaactcttgtttgcaactaactaaaactctcacgttaggctgaactgtggagctactttgacaagagtgggtagtgtaccatcttctggccagatcacacatttacatgactctaatgatagtcttgtattgtctttaattgataacaggaagagctgaagagagacctgaaaattaagaaagaaaaagacctgatgcagttggctcaggccacagcagtagctgcaccctgccccccagtgacaccagctcctccagcccctccagcccctccaccttcacctccccctccacctgctgtgcaacacacaggccttctgtccacgcccaccttacctgctgcttcccagaagaggaagcgggaagaggaaaaagactccagctcaaagtccaagaaaaagaaaatgatctctactacctcaaaggaaactaagaaggacacaaagctttactgtatctgtaaaacgccttatgatgaatctaagtgagtagatctttttgagctctagttttttgtcttgaaagtttagctattaaattggattttgaagaaaatgaatattttgggagtgatataaatgaaaatattaaatttaagagtaatgtttcatccatggtcttgcatgtgatattct

SEQ ID NO: 18824 - DNA, 2300 bp, Homo sapien
aggctggtttgggaatccagtgagagtgactgaaaactgaaattcaagtcctgaacatccttccagaacacagcctatcaccctgtggagataacacacaaactatctcagaggacccccacctgtggcagtgaaaatcatgtgagagtcatagttcaaaagaaaaaagtgctgggcaccgtggctcatacctgtaatctcagcactttgggaggccgaagtgggaggatcacttgagcccaggtgtttgagaccagtctgggcaacatagagagaccccgtctgtacaaaaaattggccaggcgtggtggctaatgcctgtaatcccaacactttgggaggccgaggtggacggatcacctgaggtcaggagttcgagatcagcctggccaacatggcaaaaccctgtctctactaaaaatgcaaaaattagccagatgtggtggcacacacctgtaatcccagctactcgggaggccgagtcaggagaatcgcttgaacccgggagactgaggttgcagtgagccgagatcatgccactgtactccagcctgggagacagagcaaagctctgtcaaaaaaaaaaaagaaaagaaaaaaagccgggcctggtggcgcatgcctatagccccagctactcgggaggctgaggtgggaggatcacatgagcctgggaggtccaggctgcagggggccgtgatcctgcccctgctctgcagcctgggctatacagcgagacaaaagaaaaaaagaaaaaagttagtggtaacaggataaactacataaccatatattattccttcacattcatgaagcaggtcaatttgaagcttgaggacgacttccattcctctaggtgaatctgccaagaaatgccttggtagaactaagagtgccaatggtatcagcaaggccagtctggttccctgtgattcatggtaattctcactatgactttgacatggtgttcctacacagtgcctatcaacacttatagacacactgtgtaagcgtttgttacatttacttttccttttgtcattaggtcttttgttacagaggccactctgctctccacaatcacacatttacacagctcccccttgccaagcagtgtagaccctcacaggctttggataactatccttgcatcattctccacaccttgtccccggtgttgaactgaagcatctccttccacgttccctgcccgttagttagccaggccactgcccacattgtcacaaacattatattaacaggaaaactggcccgtgccatattccattatgagaggttatttttaattcgattaaattccaatgtttattcagaaaacctggtagagattgaattactctatgtactttcttagttttcttcttcatatcatattttgaccatttatcttctacacctggctgacctgcatgttccttgtagtgtaacttctacttggtgtttgcgctttgctttgttttcaaatttaaattgtgagatacattttcaaacctatctaagaaatagccctgatattgaaatggcttctgtggaataggtttgacagatgtaagtctttgattctttggctttggtttttgtgcctgttacagttttacacacattcattcagaggaagacattaccatcaatgtgttgtttcttttttcaaattccagtatgtttttaaagacccatatttcactaagcagtgtacttgttgaaactgatgtgagtgactttatgtttccacatgtgatagagcatcagatactggagtttgccaggagtagaatggttggattcagaaatgtttagctgactcattgcaggaagttacactgtaaaaaagtgaatcaaggcagggaagacagatttaagtaccatgcagctcaaaatgacaattacattgtcattttcattgtgaatacttttaggttctatattggctgtgatctttgtactaactggtatcatggagaatgtgttggcatcacagaaaaggaggctaagaaaatggatgtgtacatctgtaatgattgtaaacgggcacaagagggcagcagtgaggaattgtactgtatctgcagaacaccttatgatgagtcacagtgagttctgataagagcatcatatttaataatttaggaagccaaattgctctgactggttacttatttattttaaaataaaaagcagatttttttctacatttattatacacttacattacaaattccttttcatttttctctttttccctttttacctacccttcaaaatttatcttgcttcatagt

SEQ ID NO: 18825 - DNA, 2300 bp, Homo sapien
ccctgatattgaaatggcttctgtggaataggtttgacagatgtaagtctttgattctttggctttggtttttgtgcctgttacagttttacacacattcattcagaggaagacattaccatcaatgtgttgtttcttttttcaaattccagtatgtttttaaagacccatatttcactaagcagtgtacttgttgaaactgatgtgagtgactttatgtttccacatgtgatagagcatcagatactggagtttgccaggagtagaatggttggattcagaaatgtttagctgactcattgcaggaagttacactgtaaaaaagtgaatcaaggcagggaagacagatttaagtaccatgcagctcaaaatgacaattacattgtcattttcattgtgaatacttttaggttctatattggctgtgatctttgtactaactggtatcatggagaatgtgttggcatcacagaaaaggaggctaagaaaatggatgtgtacatctgtaatgattgtaaacgggcacaagagggcagcagtgaggaattgtactgtatctgcagaacaccttatgatgagtcacagtgagttctgataagagcatcatatttaataatttaggaagccaaattgctctgactggttacttatttattttaaaataaaaagcagatttttttctacatttattatacacttacattacaaattccttttcatttttctctttttccctttttacctacccttcaaaatttatcttgcttcatagtgaatgtttgagacacattggggaaaatgtggtttaatggtagatttgattcttcaatatgtaacatagaaattaatgagattaaaatagcctgacttgtttggactttatcagtgtttgaaatggtgctttattgtaggttagaaaaacactaatttgggtacaagctctgagactctgttattagcttataggattttgaacacccatatggtacagtactagttgaaagatttttggctttgttttcagctttaaaatcaattgaatgtttcatatttatctttaaattggttctccagtattacacagtgttcttataaatttttttactgcttgttcttaacatcaaaaatactaaattaatgaactggaatgtcaatcttgaaagtattaaaaccataatactaaaactattttatatcccagggtttagcaaattttcaggtgcatgctttattataagtaacatcatcccatgtgttttgaactcacatttccatttcggatcttgcagattttatattggctgtgatcggtgtcagaattggtaccatgggcgctgcgttggcatcttgcaaagtgaggcagagctcattgatgagtatgtctgtccacagtgccagtcaacagaggatgccatgacagtgctcacgccactaacagagaaggattatgaggggttgaagagggtgctccgttccttacaggtgagacccctctgtgtgcagcatttcaaaatgaaatcagccagcataattttggaagcatttctaggatttcaagtttccaatcttagaatgattatttactgactcccagctagtctagtgaagtgcctaacaaactgcagtccttcacgtaccagtgccatgagctttaccatatccccacaccacgtcagcttatctcacactcacaagagtgttaacatgactcacttctttatacattttatttttaaggagacttcctctcacccccatggattgagaagcagtatgattagattatagttgttcttggccgggcatggtggctcatgcctgtaatcccagcactttgggaggccaaggtgggcggatcacaaggtcaggagatcagaccatcctggctaacacggtgaaaccccgtctctactaaaaatacaaaaaattagctgggcgtggtggcgggcgcctgtagtcctagctactccggaggttgaggcaggagaatggcatgaacccgggaggcagagcttgcagtgagccgagatggcgccactgcactccaacctgggcgagagtgtgagactccatcgcaaaaaaaaaaaaaaaaaaaaaagattatagttattcttttccttatgaaaaacaaaaaggggactgggcgtggtggctaacacctgtaatcccagcacttggggaggctgaggcgggtggatcacaaggtcaggagttcgagaccagactggccaaaaggatgaaaccccatctctctactaaaaatacaaaaaattagccaggtgcggtggggcgcaccagta

SEQ ID NO: 18826 - DNA, 2300 bp, Homo sapien
ttttaaagcagattatcgatttggcaagactgatcaactttaaatgaagtgttgccagagctgcaaatgggcagatccatctctttaatgcaaggggagagaaaaataaaggctagttcttgcctgtttggagggcactgggacccaggcaagcaaggaggtgaaattgtgtaactggtatggaaaggtgcccagctcccaagctggctgaggtttactcaccaacctgtctgcagaactagggaaaatcattaataattttaaaaatttgttttcatgccataccatttaggagtctttcctccatcatctaatggggaaaaaaatgtaagcgacgtgtgcttttatacttaaccaggggcctctctgcctcccagccaagcttttaaaaccttccttagctgtggtttaccagtaagtggtgtccaagaagccagataaaaatccacttacaaatgctcgattctgcagagaccgggatgacagtgtaaacatggatgggaaaaccaaatagttctgttgtcaggggcgcttaaagaattaggagaacctgtaatatgagacctttccccctggggtttgctcttggtactttctcaacaaactgtaaatagcaaagaggcggatgtttatatatgttttatatatatatatatatatacacacacacacacacacacacacgcacacgcacacatacacacatatacgtatatattaaaggaagggcaaaaaagtttgttatctaaccagtgttgtaagacatgtttagtcttagagtaaatagggggttgtaattttaaaagctataatcttagaggtcaagaccctcgtatccttcttcctttggggcctgggaagcgcgtgccccgcttggccgcgacgctgcgtccgggttctccctgcttcacttccaggcctccgggcctccctcccatctctcctcttgcaggtgcctgcgaagcctcccttgtcctctatctcctctccccctcccagagcccttcttctgcagcgcccctgccccactagcggcctcctcccctcctggcttcccttcccctctcggcctcccgtctcagcctccccttccctcttcttccttctcggcttcctcggctttccccgacggcctcccctcactgcttctcctcccccaccgccttcccgcctctcctcttctctccccacagcctcgccgccgcacagcagaaagccggactcccgcggctgcccgagcgcggaggagacaccggggccccgcgcgcagccactccttgaggccccgcagcggccgcgcgcggccgaggtcgctcccgccgcccgcgcctggcctgacccgcgccgccggaagcccccaccgccggccgacaaccaggccagcttccgggaggccgcacgcgcgcccgctggcccgccgggcccgcgcctggcgcaagccgagaaccgcgcgtcgccgcgccgcgagcccgcgtcggaggacgccccgcgacgcgcgcgctcacgggccctgcgcttccccgccgcccggccgcccgcgctcgccaccgagggctccgccggccacgcccaccccaaccggccgcgcgccgccgcgctggccccgggacccgcgcccgcgccgccgccgcgcttcagcctcagcttcggcctcagcccgccgcagagggacgcggagcccggcgctgagccctgcgcgcgcgcctgccggtccgatctggacgaacgcgaggcgttctgcgagagcgaattcggtgagcccggccgccgcgccgccgccccgccgccccgcgagcctttccgagccccggagaatccgcccgcgagatcccagggcgcctgacccgtgcgggccgtttcgcggttgctaaaaaccacctcctgggggactgggagaggaactcggggtaatgctcttctccaaactgtttttcggaagcagcggtgaacgggatcgtgcacgatgtggacgtgctgggcgcgggcatccggctggtgaccctgctggtggatcgggacgggctgtacaagatgaaccgcctgtacctcacccccgacggcttcttcttccgagtccacatgttagccctggactcctccagctgcaataagccgtgtccagagtttaaacctggtattgaaactgacctgaatgacgctgcatatgtactttataccaccgtttgtaacgtgggtgccacagcccgggctgtaggtcgcccagcctttttttgggagcgatgggaaacaatgacatgaatgggatttagacgacaggtattattccggccactctgtga

SEQ ID NO: 18827 - DNA, 2300 bp, Homo sapien
cgactgggtgagcaggggctgcggggggcgctgtggagggctggggggaagcggggccgaaatccggcagccccgggcactttgctctccccgcagccccagcgcacaaccttgggacacctgagccggggtttaactaacacgcacacactcttatacttcatgcacgaaatgaaattaagttactcagcccgtgaagaaatgaggggttctctgggggatcgtgtttttgttttgcttttatttggatgttctgtcggcttcgctatctctgggaaaaacagtttccgtacctcacagggcaatttactctgggttatttttccacatggaaattgaatgacttcagtggcatttaacccaaatatcagacaatctttcccatgacaacagatggttatatcaatggggaagcagttgtgaggtcaacagttgacagtcaggaattggatatccaccagaactttattcagctgtgcatggcacaaccgtttaacaacataatgagtcagaatcaacctctttgcaaaaacatgaactctaaccagctattattgctgggtgaaagctgattttaaagcagattatcgatttggcaagactgatcaactttaaatgaagtgttgccagagctgcaaatgggcagatccatctctttaatgcaaggggagagaaaaataaaggctagttcttgcctgtttggagggcactgggacccaggcaagcaaggaggtgaaattgtgtaactggtatggaaaggtgcccagctcccaagctggctgaggtttactcaccaacctgtctgcagaactagggaaaatcattaataattttaaaaatttgttttcatgccataccatttaggagtctttcctccatcatctaatggggaaaaaaatgtaagcgacgtgtgcttttatacttaaccaggggcctctctgcctcccagccaagcttttaaaaccttccttagctgtggtttaccagtaagtggtgtccaagaagccagataaaaatccacttacaaatgctcgattctgcagagaccgggatgacagtgtaaacatggatgggaaaaccaaatagttctgttgtcaggggcgcttaaagaattaggagaacctgtaatatgagacctttccccctggggtttgctcttggtactttctcaacaaactgtaaatagcaaagaggcggatgtttatatatgttttatatatatatatatatatacacacacacacacacacacacacgcacacgcacacatacacacatatacgtatatattaaaggaagggcaaaaaagtttgttatctaaccagtgttgtaagacatgtttagtcttagagtaaatagggggttgtaattttaaaagctataatcttagaggtcaagaccctcgtatccttcttcctttggggcctgggaagcgcgtgccccgcttggccgcgacgctgcgtccgggttctccctgcttcacttccaggcctccgggcctccctcccatctctcctcttgcaggtgcctgcgaagcctcccttgtcctctatctcctctccccctcccagagcccttcttctgcagcgcccctgccccactagcggcctcctcccctcctggcttcccttcccctctcggcctcccgtctcagcctccccttccctcttcttccttctcggcttcctcggctttccccgacggcctcccctcactgcttctcctcccccaccgccttcccgcctctcctcttctctccccacagcctcgccgccgcacagcagaaagccggactcccgcggctgcccgagcgcggaggagacaccggggccccgcgcgcagccactccttgaggccccgcagcggccgcgcgcggccgaggtcgctcccgccgcccgcgcctggcctgacccgcgccgccggaagcccccaccgccggccgacaaccaggccagcttccgggaggccgcacgcgcgcccgctggcccgccgggcccgcgcctggcgcaagccgagaaccgcgcgtcgccgcgccgcgagcccgcgtcggaggacgccccgcgacgcgcgcgctcacgggccctgcgcttccccgccgcccggccgcccgcgctcgccaccgagggctccgccggccacgcccaccccaaccggccgcgcgccgccgcgctggccccgggacccgcgcccgcgccgccgccgcgcttcagcctcagcttcggcctcagcccgccgcagagggacgcggagcccggcgctgagccctgcgcgcgcgcctgccggtccgatctggacgaacg

SEQ ID NO: 18828 - DNA, 2300 bp, Homo sapien
gaaatagagcaaataacagtactacctcacagttgtgaagatcaagtgtattaatatatggtaaacactcagaacacttctgggcacatagtagtcagtattttcaagcaaaagaaactcaacttggcttggtatggtggtcaggcctataattccagcactttgggaggctgaggtgggtggattgcttgagctcaggacttcgagaccagcttgggcaaaatagtgaaaccctgtctttacaaaaaatgcaaaaattagctggacgtggtggtgtgtacctatagtcccagctatttgggaggctgaggtgggaggatggcttcagcccaggaggcagaggtcgcagtgagctgagatcgtgccactccactccagcctgggcgacagagctagaccctgtctcaaagaaaagaaaaaaaagaaaaaaaaaaagagaagaaactcaacttgacaatacaaaagaaatgtgtatcggatctcctacctgcaaaccttcagagatagagcaggtcagacctctcaaggtttccctacagttttcttattcagatttctaggactcacatcccttagttcagaagaacagaggctgctttcctacctccaaccagtaaacaaaaggcagaggctgtccaactggatgaatttaggtcatgtgcctgcccctgaaccattctcagtagctgagagaatgccacacagtgattggtttaggggtgaattccttccacattcttgcatttagggggatgggattatgctgattaagagtaggtccaaccctttatgaactctggctttacgatgaatgaggctggcattaatgcctgcaaaaatggacaaacttgctgtttgaatttatttatagtaagaaataaaccatgaaaacttttctaaaatgtaatcttttagaacacaaaaaaattgcagaaacaaaaatggcccagaatcctgatgctctgttgaccatctttgttttgtttgttcgtttgagcatatggcaaaaaatgcaaaattcagaaatgtgtaatgagcatagaatgttactataacaattgaaaaaacttgaacacacactacatactaaacaacagcatgaaatttcagtttttctgaatttgatgactgcagtgtggttatataagagaatgtcttttcttaggagagacaccgtgaaacagaggaaaaaggacatgattctgaaactttctcttaaagtaacatattaaaatcacacatatgtacacgcgtgcatatgtatacatatatatgtatagagaaagcaatagcaaatgtggcaaaatgttaagatttggcaaatctggataaagatttgcaattctgctgcatttgaaattatttaaaaataaaaaacttgagtttttggagaaacaggcataagaaaccttttgtttccatatttgcggcttctatacagtcttttatgatgcaattaaaaaaaaactaaactaaaaaatataacacaaatcttccctcccatagtagccagaaacccccgccgagtactttgggtgtcataataggaaaaaaatgcaaagcaatatgtttttctataaagattacttatttactaattagaatttttttattttcatgaagatcaacaacaaagtttttaaaataatgacttagagaatcattttgtggtatttgtttaaggctgtcgcccaggaaaacgcccaaggaccatgcacgcttcaaccctatggaaacacgaacggcccagggaaccgccccttcgcgctgcttgacgggatctggagtcctcccgctccgccccgccaggcgctcagggaccgcccggccgctccctcaccgcccggccgctccctcaccgcccggccgctccctcaccgcccggccgctccctcaccgcccggccgctccctcatctcgcgatgccatcctctttttttttttttctttcccccctcccactcgcccccaagccctatgactccctcccctcccaacgtgtttttcaaatccaccaatgggcacacagcttaggctcgaaccagccaatcggaatgcggagtcaccgggaaatttaaatcgcgccggccggctgcacgagccacacggtctttgagctgagtcgaggtggaccctttgaacgcagtcgccctacagccgctgattccccccgcatcgcctcccgtggaagcccaggcccgcttcgcaggtacagactcaggcggcggcccggcccgagcgctaacggcttgcccgtgggcggcgttcgccttttgggttgggggagggaggccccgggt

SEQ ID NO: 18829 - DNA, 2300 bp, Homo sapien
ctgcaaaccttcagagatagagcaggtcagacctctcaaggtttccctacagttttcttattcagatttctaggactcacatcccttagttcagaagaacagaggctgctttcctacctccaaccagtaaacaaaaggcagaggctgtccaactggatgaatttaggtcatgtgcctgcccctgaaccattctcagtagctgagagaatgccacacagtgattggtttaggggtgaattccttccacattcttgcatttagggggatgggattatgctgattaagagtaggtccaaccctttatgaactctggctttacgatgaatgaggctggcattaatgcctgcaaaaatggacaaacttgctgtttgaatttatttatagtaagaaataaaccatgaaaacttttctaaaatgtaatcttttagaacacaaaaaaattgcagaaacaaaaatggcccagaatcctgatgctctgttgaccatctttgttttgtttgttcgtttgagcatatggcaaaaaatgcaaaattcagaaatgtgtaatgagcatagaatgttactataacaattgaaaaaacttgaacacacactacatactaaacaacagcatgaaatttcagtttttctgaatttgatgactgcagtgtggttatataagagaatgtcttttcttaggagagacaccgtgaaacagaggaaaaaggacatgattctgaaactttctcttaaagtaacatattaaaatcacacatatgtacacgcgtgcatatgtatacatatatatgtatagagaaagcaatagcaaatgtggcaaaatgttaagatttggcaaatctggataaagatttgcaattctgctgcatttgaaattatttaaaaataaaaaacttgagtttttggagaaacaggcataagaaaccttttgtttccatatttgcggcttctatacagtcttttatgatgcaattaaaaaaaaactaaactaaaaaatataacacaaatcttccctcccatagtagccagaaacccccgccgagtactttgggtgtcataataggaaaaaaatgcaaagcaatatgtttttctataaagattacttatttactaattagaatttttttattttcatgaagatcaacaacaaagtttttaaaataatgacttagagaatcattttgtggtatttgtttaaggctgtcgcccaggaaaacgcccaaggaccatgcacgcttcaaccctatggaaacacgaacggcccagggaaccgccccttcgcgctgcttgacgggatctggagtcctcccgctccgccccgccaggcgctcagggaccgcccggccgctccctcaccgcccggccgctccctcaccgcccggccgctccctcaccgcccggccgctccctcaccgcccggccgctccctcatctcgcgatgccatcctctttttttttttttctttcccccctcccactcgcccccaagccctatgactccctcccctcccaacgtgtttttcaaatccaccaatgggcacacagcttaggctcgaaccagccaatcggaatgcggagtcaccgggaaatttaaatcgcgccggccggctgcacgagccacacggtctttgagctgagtcgaggtggaccctttgaacgcagtcgccctacagccgctgattccccccgcatcgcctcccgtggaagcccaggcccgcttcgcaggtacagactcaggcggcggcccggcccgagcgctaacggcttgcccgtgggcggcgttcgccttttgggttgggggagggaggccccgggtccacgccgagcctggctctgcctcccgcgttgactaggcctcgggggcgacgttcattgaccaggcggctgagtttcgcggggtctgcgggtttagggcgccgacgctctgcaaacggcagcggaggccttaacgcgtcgcggccgggagaatcggagcgagccaggcttgagggcgaatgtcccgggaggacttgtggcggccctggtttcgcctcctcctttctcgttgcatcttccccggcgtgggggcaggggctgggggtggcagttgggagcaccgtctctgacacctaggccccgggggtggctctgccaccaagtcgtaggcgagcgtaatgaaagcaaagatagcaaattgtaaggagggctttgacttttgtcatcttctgaatgacgcacagctgatgtcatcctaattaagcgcattcactcctagtctctggaaatgcaaatcaaatatgcgagatgcggcactgcatttttaa

SEQ ID NO: 18830 - DNA, 2300 bp, Homo sapien
ccccagcagtgccagcccaccggcgctgcgctcaatttctcgccgagccgtagctgccttcccgccgggcagccctcgggactgcagcccgccatgcctgagccttcccccgcctctgtgggttcctgtgcagcccgagcctccccgacaagccctgccccctgctcacggcgcccaggcccatcgaccacccaagggctgaggagtgcgagcacatggcacaggactggcaggcagctccacctgcagccccggtgggggatccactggatgaagccagctgggcttctgagtctggtggggtcttggaaaacctttatgtctagctcagggtttgtgagtgcaccagtggacactctatctagctactctggtggggccttggagaacctttatgtctagctcagggattgtaaatacaccaatcagcactctgtatctagctcaaggtttgtaaacacaccaatcagcaccctgtgtttagctcaggatttgtgaatgcaccaatcaacactctgtatctagctcaggatttgtgaatgcaccaatcgacactctgtatctagctgctctggtggggccttggggaacctttgtgtccatactctgtatctaactaatctgatggtgacgtggagaacctttgtatctagctcagggattgtaaacacaccaatcagcgccctgtccaaacagaccacttggctctaccaatcagcaggatgagggtggggccagataagagaataaaagcaggctgccagagcctgcagtggtaactcgttcgcgtctctttacacagtgtgaagtttcagttttttgctgtttgggtccacactgtttttatgagctgtaacactcaccacgtaagtctccagtttctatcctaaaggcagtaagacaacaagctcaccgggaaggatgaacagcgccggacacgtcgccttaagagctataacactcaccaccaaggcctgcagtttcactcccgagctagtgagaccaagaacccacctaaaggaaaaaactccgaacacatcttaaggtcaagaaggaacgaactcctgacacgccaccttaaaagctgtaacactcaccaccagggtctgtggcttcattcttgaagtcagtgagaccaagagcccaccaattctggacacaatagggctgagtgcggtggctcaggtctgtaatcccagcacttcgggaggccaaggcaggcagatcatttgaggtcaggagttcgtgaccaacctgggcaacatagagaaacctaaatgtccctcctaaacgtgtctttaccaaaaataaaagaattagtggggtgtagtggtgcatactgtgatctcagctactgcagaggctcaggtgggaggatcatctgagcctgggaagttgggactgcagtgagtctgggtgacagggagaccctgtcttaaaaaaaaaaattttagcagtatagttacaaggtcaaaggatatggtacatctttagaaagttgttatctttctgctcctgagataaatacagtagtgtatgaacaactcttcatacgttactccaaggtttatcttgttaattctttaagacgtatcatctccctatccttggctgcacctgaaaagagcgggactctgcaggtaacccgattttctccaccaggtgagtcccggatggaggcgtcaactacaagaccaggaacagcactcctggggctttgctggaaccatcggcgtgggaatgctgtctcttccctcgccagaaatacgacaagttcccggcgggtagcagacttggttctaattttcctcgccccagcctcttggagcgccctgcatgctgtgggcgtctaataaatgcagtcggccctgcttggtctaaaactctcccttgagtggaccggacactaaacccctccaggggtcacagctgccgctcccgccgccactttgctccttgcctgctcccttcccgcgttccgcctgggaccctcggcggcagctcacaccttccctcagtgccggtgcccgctccgggcatctggcgcgcgcccgccggccccgccccgctgaccccaccggccccgcctcccatctccccctcgcccccccggagccgacaaatggccgcggcggcctcaggtccggcgtcactcagacaagggggcgggtggaggaggaagcggccaagtccacagtcctgctcccgtgccgccgagcaccgcccacctcagctgaccagccctgtccgctactaggcctcgcctagaggagggaaaggccgtggcgtccgctccctcc

SEQ ID NO: 18831 - DNA, 2300 bp, Homo sapien
taattaccaaagggaaaaattattttttatttttttatgagacaaagtctcactctgtcacccaggctgaaatacagtggcaaaatcgtagctcacaacagcctcgacccccaccctgggctcaagtgagtctccaaattcagccccccaagtatatgggactatagtcttgtaccaccacacccagctaatttttttttttttttttttttttttttgtatttttagtagagacagggtttcaccttgttgctcaggctggtctaaaactcctggactcaagcgatctgcccgtctcggccttccaaagtgctgggattataagcatgagccaccacacccagcaaaataactacaatggagagatctggaagatcaccttaaacaagtgatcaaacttagcattatgagccacctgcaatcacgaggcaggaaggatatatcacctatgcagtatttttcccaaaaatgcttaccttgaatctcatcatgtggaaacagacaaatccagattatgggacaatttacaaaacaactatctttgactcttaaaaaatgccatgtcatgaaagatcaaaaaaagtagaggaatgttttagattaaaggaaatgaagacatgacatgcagtgcctaatctttgattggattctgtgctattctttcatctttctggtatgtttgaattttttttgaaatataaacttgggcaaaagagataaccaagataattgattaatttattgttatggctcattgggggcagtttcagagaaataaaaacaatctttgtaactggagtaaattctcaaggttaatcttaagcaatatagcatggtcattaagaatacagattccacagccagactaggcttaaatcccagctctgtgaataatgtgaatttgggcacattgattaatctctgttccttggccttgtcattataatagtacctacctctaatgagttttgaggattagatgaatcagtacctgaaaaatgcctgacacacagtgagtgctcaataaatgttaactactgtaattattacattacagaggttgtgggggggccttttctgagtcctccaaaaggatgactttattagggccacattaagactgtggaaacagaagagtattcaacagataaatgaagtctatgagttgggggtacaatttatggagttttagattaaaactgcatccaataagttggtctgacacatctttcaaacctatagaggaataatcacaagtgactagtattcctttgggtccaatagaggtctctgatcttcatacagattgaatgtacccagaaccgtaacctagcattttacttatatagcaaccttaactctgacacaaaagtgtttcttttgttttgaggccaagtctcactctgttacacaggctgagtgcagtggtgcaatctcacttcactgcagcctctgcctcctgggctcaaatgatcctcccacctcagcctcctgagtagctagaactacaggtgagtgccaccatgcctggctcatttttgtattttttgtagagatggggtttcaccatgttgcccaggctggtctcaaactcctgagctcaagcaaccctctctccttggcctcccaaagtgctgggattacaggcatgagcctgaagtttaattgttattcttttcctgcccccgacttttgattttaaacattttctttttttcctttaagccttaggatggctaggaagcattttcagatggtataatgaacacctgtataactttcatctggaatcaacagttgctaatactttgccacatttgctttccatgtgtgtatgtctatacattttctggacaaaccatttgagagtcagttgcagacaaaatgaccctttgccattaaagacttcagtgtgcagcccctaagaagcaaggcattctcctgcataaccagaggactatcatcacccaatggaacttcatattatcattgtctactatgcagcccatatacacattttcacaattgtcccaatcataacatggcttaaaaaattcagaatccaatccaacatcagacattgcatttagcgttcatgatttttttttttttttttgtagaaagacctttaatacttctgtttacaaaattcaggcatacatttcagtttgccctgaaccgtgcccaaggctgtgtgctcatctctgccaggatgtctgtgccctcatgtactgctgacgtggagggtgcagagcagagcctggggtctggaggcttcgctgggcctcagggggagggga

SEQ ID NO: 18832 - DNA, 2300 bp, Homo sapien
taggctcaagtgattctcctttctcctgtctcagcctcccaaagtgctgggatcataggcatgagacaccatgcctggtcagttatttaagaaaataaatattagaccatgcagaaataatgctatcctaaaatttgtgagcaagtacaaagttcatgatttagaaatttaaacagtttaaacgcaaaatgaagttctttttaatgaataccaaaaaactgactgaaaatctagtgaataccttttatgcttcagacacctcgtatagagagtctttaccctcaagcatctcgcagttgagtaagggtgacatgtaagaaataggttacaatcattgtgacaaggacaactgcagtattattatgtacacacaaggcaatgaacaggcagaagtaaagttttgtcatgaggcaggatgaggctatagaagaggtgacaactaagctaaagaagccactcaggatgtcagaagacagctgttcagtcaaaaacaggcacagtatccaaaggaactcatttgatccctaaaattctgttaagatgtgctgtaggtggggcgcggtggctcacgcctgtaatccctgcactttgggaggccgaagtaggtggatcacctgaggtcaggagttcaagaccagcctggccaacatggtgaaaccccgtctctactaaaaatacaaaaattggctaacatgacgaaaccctgtctctactaaaaatacaaaaaaaaaaaaaaaaaaaaaaattagccgggcgtggtggtgtgtgcctgtagtcccagctactctgtagactgaggcacgagaatcgcttgaacccaggaagcataagttgcagtgagccgagatcgcaccactgcactccagtctggatgacagagcgagacttcgtgtcaagtaataataataaaaaaagatgtgctgtaattgtctccgttttacaaaagaggtcaagtagttgacacaggtcccacgctagtgagggttttgggattcaagcacagaccaccttcgcccctatgctacaccacctcaggctgtcgggagataggcgcccagtcaaaaggcacatggaagaaagcccacgacttctcaagcattgaagcaggagtggcgcatcggtattctcaacttcaaactttgagaacagtcatggtaggaatgcattttattcaagaatgggttcaggtgagggtggatatgggcactgggttcaaaggacaaatttggagaattcatgatccaggagagtgaacaaataaggaagggctaaagagatcctcgaagttgaaaggttcagagttaatgtcctctaaggagagccaacaaggggttacaaatgctgaagtcatcaagaaaatgtgcctgtctttccttgagactgggaaggagaattaggatgacgaaaatccagaggatggtaaaatagcttgacttcaaaataacaggccgggcgccgtggctcacgcctgtaattccagcactgtgggagaccggggtgcgggggggtggatcacctgagcgcaggagttcgagaccagcctgggtaacagggtgaaaacccgtattaaaaaaaaaaaagccgggcgcggtggcccacgcctgtaatcccagcactttgggaggccaaggcgggcggatcacttgaggtcaggagttcgagaccagcctggccaacatggtgaaaccccatctctactaaaaataacaaaaattagccggacgtgatagcgggcacctgtagttccagctactggggaggctgaggcgggaaaatcgcttgaacccaggaggcaaaggttgcactgagcccagactgtcccactgcactccagcctgggcaacagagcaagactccgtctccaaaaaaaaaaaaaaaaaaaaaaaagcaagaaaaagaaagagaatggcgaggcccagagagaccgaaagtcccaccagagggtacagagctagctcagccctaatgccggccccgcggtgcctttccgagctcacggcctcccctcagcatccgggtttcggcctcggagcgccagggacgccacgaggacgcgccccacacttgcgcttctgggttccagcccccgcggcccccaacaaataaagaagggaaagtgctgagggtgacggccccggggagcgctgcggctctacgtcaacctgcggcggccgccgactcatttggggccacgctggttgcattcgtcacgccggcgatgcctctcaaacccgcggcctgccgaggacgttcccacacgggagaccccagcgacgcgggcgcatctgtggctctcgaga

SEQ ID NO: 18833 - DNA, 2300 bp, Homo sapien
tggaagaaagcccacgacttctcaagcattgaagcaggagtggcgcatcggtattctcaacttcaaactttgagaacagtcatggtaggaatgcattttattcaagaatgggttcaggtgagggtggatatgggcactgggttcaaaggacaaatttggagaattcatgatccaggagagtgaacaaataaggaagggctaaagagatcctcgaagttgaaaggttcagagttaatgtcctctaaggagagccaacaaggggttacaaatgctgaagtcatcaagaaaatgtgcctgtctttccttgagactgggaaggagaattaggatgacgaaaatccagaggatggtaaaatagcttgacttcaaaataacaggccgggcgccgtggctcacgcctgtaattccagcactgtgggagaccggggtgcgggggggtggatcacctgagcgcaggagttcgagaccagcctgggtaacagggtgaaaacccgtattaaaaaaaaaaaagccgggcgcggtggcccacgcctgtaatcccagcactttgggaggccaaggcgggcggatcacttgaggtcaggagttcgagaccagcctggccaacatggtgaaaccccatctctactaaaaataacaaaaattagccggacgtgatagcgggcacctgtagttccagctactggggaggctgaggcgggaaaatcgcttgaacccaggaggcaaaggttgcactgagcccagactgtcccactgcactccagcctgggcaacagagcaagactccgtctccaaaaaaaaaaaaaaaaaaaaaaaagcaagaaaaagaaagagaatggcgaggcccagagagaccgaaagtcccaccagagggtacagagctagctcagccctaatgccggccccgcggtgcctttccgagctcacggcctcccctcagcatccgggtttcggcctcggagcgccagggacgccacgaggacgcgccccacacttgcgcttctgggttccagcccccgcggcccccaacaaataaagaagggaaagtgctgagggtgacggccccggggagcgctgcggctctacgtcaacctgcggcggccgccgactcatttggggccacgctggttgcattcgtcacgccggcgatgcctctcaaacccgcggcctgccgaggacgttcccacacgggagaccccagcgacgcgggcgcatctgtggctctcgagaaccgggccgcggagccgccgcgagcgcaagcgaggaatcggcgactgcgggggtggacagctggggcttgtagtcccctcgctaccctctattctggaagaggcgggtcgcggccgctgaactccagctctgcgcctgcccaggcggccgcacgctcaggggcgtggcatgggtgggtcgtgagttgggcggggcccacagggcgtgcgcgacgcagcggcgcggcgcgtggcgtaaggggcgtggcgccagtgggcgtggcgtggcgcagtgcgaagggacgcggtgcgcatgcgcgtgagggctgccgcgggtgggtggtatcgaggcctgtcgggtcagggcggttcgcgggtgctgtcagagctgggccggggcccctaggcagggtagccgggtcgtagaggcgggggccggtcgcggtcggtggagcgggatgaggatgtaggaggggcggacgtggcggaagccgcggggtccgcggggtcggtgcctctagggagccagggaggcctttcccgaggctcctggggaagaagaggcgaagcgagagtccctggggaacccccactccactcccagctggagactgggttgtgtctgcatggaccagagcccacagtgcgagttgctataggcaaccagccagggtggccagctccttcccgtttgcccgtgatgttctggttttgggaccaaagcatcctaggcctccagcccactgcagtgaccgaattctgcgccccctgcccatcttctcccgcagcttccctagattaggcttgggaggcaagaggaggcctcctgacctttcacactgcctttttaatattaagatgaagtcacactccacaactttcttccagccaggcccagacatgtccgtccttgtaagttaaaagcttccatgggagccttccttcctaatcaaggtaggtagactacaggaaggtacatcttgttttatattttgtcctgtagaagtcagatttcagcccagttgtgtaggagtgaggatgagcctatgcttatatcagagctttgagtacagagacatttggtctggaatt

SEQ ID NO: 18834 - DNA, 2300 bp, Homo sapien
caaggcgggcggatcacttgaggtcaggagttcgagaccagcctggccaacatggtgaaaccccatctctactaaaaataacaaaaattagccggacgtgatagcgggcacctgtagttccagctactggggaggctgaggcgggaaaatcgcttgaacccaggaggcaaaggttgcactgagcccagactgtcccactgcactccagcctgggcaacagagcaagactccgtctccaaaaaaaaaaaaaaaaaaaaaaaagcaagaaaaagaaagagaatggcgaggcccagagagaccgaaagtcccaccagagggtacagagctagctcagccctaatgccggccccgcggtgcctttccgagctcacggcctcccctcagcatccgggtttcggcctcggagcgccagggacgccacgaggacgcgccccacacttgcgcttctgggttccagcccccgcggcccccaacaaataaagaagggaaagtgctgagggtgacggccccggggagcgctgcggctctacgtcaacctgcggcggccgccgactcatttggggccacgctggttgcattcgtcacgccggcgatgcctctcaaacccgcggcctgccgaggacgttcccacacgggagaccccagcgacgcgggcgcatctgtggctctcgagaaccgggccgcggagccgccgcgagcgcaagcgaggaatcggcgactgcgggggtggacagctggggcttgtagtcccctcgctaccctctattctggaagaggcgggtcgcggccgctgaactccagctctgcgcctgcccaggcggccgcacgctcaggggcgtggcatgggtgggtcgtgagttgggcggggcccacagggcgtgcgcgacgcagcggcgcggcgcgtggcgtaaggggcgtggcgccagtgggcgtggcgtggcgcagtgcgaagggacgcggtgcgcatgcgcgtgagggctgccgcgggtgggtggtatcgaggcctgtcgggtcagggcggttcgcgggtgctgtcagagctgggccggggcccctaggcagggtagccgggtcgtagaggcgggggccggtcgcggtcggtggagcgggatgaggatgtaggaggggcggacgtggcggaagccgcggggtccgcggggtcggtgcctctagggagccagggaggcctttcccgaggctcctggggaagaagaggcgaagcgagagtccctggggaacccccactccactcccagctggagactgggttgtgtctgcatggaccagagcccacagtgcgagttgctataggcaaccagccagggtggccagctccttcccgtttgcccgtgatgttctggttttgggaccaaagcatcctaggcctccagcccactgcagtgaccgaattctgcgccccctgcccatcttctcccgcagcttccctagattaggcttgggaggcaagaggaggcctcctgacctttcacactgcctttttaatattaagatgaagtcacactccacaactttcttccagccaggcccagacatgtccgtccttgtaagttaaaagcttccatgggagccttccttcctaatcaaggtaggtagactacaggaaggtacatcttgttttatattttgtcctgtagaagtcagatttcagcccagttgtgtaggagtgaggatgagcctatgcttatatcagagctttgagtacagagacatttggtctggaattttagtcagcctcttcaaccccagaatttataggttcaatcagaacagacattagcttaagttttcccatcaatcgtctatcattaaactggcaaaatctaaataattagaaaatatgacaaagatgatccagacagagatgttcaactttttccttaattcaaaaagcctcgtggtggaacatcggacccattcaagaggaaggatgaaagctctatataggaacacgatgtgaatggaagaaacctgtcattgtgaggctggcttttgattagtcatctgatgtcttccctaatgtgacatgactttgaggccataaacttcagtggctaagctgtagtttctcagcctgcagttaaattgcagaaatgatagggcttacattagttttgtttttatttgatgttgaagatctttgagtcacattagaaacgatgagtatttttcatgtggcactgatgagttaattcatattattattttttgagacagagtctctattgcccaggctggactgcagtggcacgatcacggcccactgcagcctcgacctcctg

SEQ ID NO: 18835 - DNA, 2300 bp, Homo sapien
agactagaaccttctttcaagtacctgaattgaaatgaaactcattttgaataataaaaactctagaaactctttatcttctcatcttactggcctggtctgtggcagcaagcacattatttccattccccaaatatgtttaggtctcccaagaaagctgggactggcggtaacgagcaagtaaataacttgaaaaagaaccgttcaatgccccaaggaaccaaccaacataatttccagggggtgattttgtttttagaagagccgctcccctcttttaggcccagccaagtcacatttttggacgtccgtgggctctgatcaccacagccctccttttccgagagcctaccttactgtctcaagtgcattaccttgtttttttctcttgctggttgtcaccttatccctgaaagaatgaacagcttgtatcagtttttagcagcttaaaatatgacctatcaggaatatttgcaagtgaaaataacaatggtccttacactaccacaacatttggtggtgggagttccgctgcaggtctcagctataacatagtcatttatgagggatcttacaaatagtgtgtaatggtatttatatttgtgagtgttgcactttttctatagatttagagcggctttcaggtttatttcagtaataatgtcctcctcacattacattgtgaagtgtttacctgagtcagggagagagtttaatggggttatctgtcggggtgccatgaatgctgatgatggtctgcagggtgtgaacatcagccccattgctacgggggtggacaggtggaaaagctcagacttgacaaaccacctctgctagatagatgtatcttggaaatccagaaattacagtgaatattttatggaatatcagtgagcagacagcatttcccactttcctatcttaccttgagggtaagacttaaaggtatatatgtatttgtaatttgaaacctggattcttcattgtttgatgtatgcagtatgatgtaacaaagtatagaaatgatccctgaaagtatagtctttgatgtatggagtatgatgtaaggcacatttcatatctgagtcagtggtttcccttggagtcattctacttgattgaacccatttaagtcattttagaaaatggtggtttgctattaaaattaattggagagaatacttggtcattctattaggaaaaagagactgatggagcatggtgttttatggattctgttacagggcttattcctccttgaataatgtatttaaaaaattattgtccattcgattacatttttttttattttcctacaaggcaagcacggttttagtcctgtaggtcagcctttgtcacaaactcttttgaactaagatttgcctagttgaataaataaggtccatttgtgtctacactgcactatgagactaggagaaaaatcatctaagaagtcattcactcttgctaaaaattgaactaaacataaattttatatgattcatttgttcagcaatcataagtgctgtgtataactatatatttttggataatttcttagggttcagcttaaaaatataatttgcttactgcaactaaattttatgtactatggttaaatctttgtggttttaaaagataattttcactaaataaatccacgcagattttgctctgcaaatgctggctgaacaaagtattgagctaataaagagaattaataattttctactatctaaatactcttaaaaatcagtgaatttggaatgtttttcatttatgtcatagatcctgatcctgggcacctgtggagttagtatctctccggtcaagagatttttcaggcctcagacttctaatggtgagggttaagtagaagaatttgtcgaggattacccgtcggttcttgtccagcttgctttttgaagcacacattcccctgatatgaataatttacatttcaagccctacgagggacagagggccgcgttgctccctcttgggagcagcagtgctaaaatcgaagcaggcagctgcgggaccgctatagccggccctgcgctcgggcccttcccgggcaggaaacgcgtcgctgtccccggctgcgcccaggccggcgggcccagcagctgcgaaccgccggcgcaccacctgtttccgcgcccggggacttccccggcggggctcagaagtgtgggatcggtcgcttggcttcccctggcgtcagcgacccagggtaacctcctccactgctgcgtgccgtgcaggcctgcctgtgtgagagccacgtgtgccgcgct

SEQ ID NO: 18836 - DNA, 2300 bp, Homo sapien
tagaccatcagagtgttattccagggtcagctaagagcaagtttcaaaacgcaggctctggatggaaatggggtggctactgttgtaggcagacctcgagcaaaagcactgcggatttctcttcttcttaaaggcgtagcccggagaacagctttgacaagttgtttctggcccaagttgtcaaaaccagtctgtatttggctaaagttcatctgcattctctatttaaaaaaaatttccaaacctaacctggatagctgcctcacgatgttgaatcactggctacaaccgagtcaccattttacaagactatggtgttgaaacctgagcccctaatttaagtgtcctcctcaggagttccactgaggaaagtcctttttcggaaaccacagaaggaaaactcagggttagtggtactcattacactggaaggagcttttccacttggctgcattgtttatttacacactgtaagttcctattttggacactcttcccttaattatgagaagaggggtttctattatatcatctggccggatgtattgttgaccccaaaaatgccacataacggtgcttgggacatggggagatgcatggtttagagatttcagcataagcacttggcatcttttttacaagcaagacacctatcttaccatgatttgcaaaaacaatcagatcactgagaaatctcattcccggggtagaaaccatctcctgcgagaaggagctggcacggagtgtctaaccgtgcaaacaaaaccggcttccaggttgacaagttgtaattgctcttccccagttggctccggggagctttttctaagactgacgccccccatgtttggtgacattttatatacgccacctaacaaacttctatgacctgtcttgctagggtggggggaataaaaagaaaagacgacaacaacctagaaggaaataacccatttcctctgcaaaaccatcttcccttgctacggaactgcttggcgacaccagcgctttcctgcggttggcagcccgggaaccttgaagttgcgcgggaccggccgtcagccgctgacagttctgacagtccaggtggaggacccgcgctctgccgggaaatccccggcttcccgctggggacaaacggtggccgccgcagggagtgctgtgtttgggggtcgggggaggcagggagccccactttccctcgcgctgcctcagtgcccggcctgcgtgcgcgcgccagcctggggtaggaaggtacctctgacatttcgctcctgcgacgcgcaggcaacttcatgcggaaaatccgcggaggggctgagcctggagcccccgactcttccgacgtcccggagcccccaacccggggcagggggcactcaaaggccaggcgtgcctttaggtatcttccgggacccaactgtaccagggtcacggacattcaactctcagctacccacaccggcgcgagcgcgtcatcccggtggccctgggcattcctaactgtcagagcgaatatttttgggaataacctctccaaaatgtgaagatgttcagtggtctcctccgcctcccatcacaaaaaaaggccccaacacatattttttaaaaaacaacccacatcccacaatcaaacttttaaacatgtaaaataataaaccaactcaccaagttagaagggaagagaataaacccccaaaggctcccaataaggcggaggcttggcctccccctccttataagccgctcggtaacatgagaaaaggattaaccccttagggggcgggcccgactctagcgcaagttggctcgggctggtgaggcccgagcgcccgggccctccacccactcccgcgactcgggcacccgagccacaccctccccccgccccccaccccggccgcctgcgacccgggccgtgcgtgctgccgcccgcgccccggccccgcgtcgctgcctagctcttatcctataccggctgcagccggtctccgccggcctcgggggcgcgccgccgccgaccatgtgctgcgagcgctgagcgcagccaaggagggggcctgcctggcgcgcgcgcgccgtcccacgtggacctgagccgcgccggtcgcgcgcccgccagcctgccgcctgggctgggggtcacgaaaggtaaccgcgtcgcggtccggggccgggccgcccccgccagcgccgccggggtccttggcacaacgccccgatctcccaacccgggtgcgcctctgcgcgcgtgacccgcccagaccccggagctttgctgcaacgctagtaggagcgcg

SEQ ID NO: 18837 - DNA, 2300 bp, Homo sapien
agagattttatgtgacttgcttcgagtcactcaggtataaatggctggctgcacctttaggttcctaagacatacagaatatgctgtcatattgcacatgatatttccatatagagtacagtaacaggtcctaagtattaaagtgtaagatcctaaatatcaaagattatcttacaggcagccctgcattagcatgaagtgttcaaatcagtttctaaatatcattatatatggatcctttgaagaacaactcaaaaaagggctctctctcacagggagtgtgttggagtcagcaattaattggccttggtaaagcataaatcgtaacagcagcaagagctaatgggtactgaggccttaccaaatgccagtcactgcgatccgcactttacaagtaccataaattaaaccctccaattctgggaataccacctccatccccattttacagatctggagaaattaacgctctacgaggttaaattacgcctacaaggttgcaaagctgctcagcggccccttggctgtacactactggccatacaaggcaccctgtaccaacgaatcttctccccacttacacaaccagaacttgtcaacggcaaaggatggcatttaactcaggagagcctatcccaaaatggtgagagaactcagcgagcaaggaaggatttttattaaaattcagatcgccgactcctcccggtggcgaccctccgtgcatgcactcccaaactaggctctcttgagtttctgacatcagaaccacattctccgaaccccaatgaaggcagcagccggcgccaaagtctgcatacgaatgcaaataacatggcctttgcttccgagcagtttccaaatttgccctcgggatgtgaggtagagaccaagaagctaagtttgcgcccccgcaggctctgaaatgtctaggatctgacacatgctttgtccccatgaggagctcctgagatttcgcgtgcatcatccgcttagttcacggtgaccttggggtcggggactacgggatgaggggcacggactgtctaaacctccaggtcccttacagagggctccccgcgggtatgggagccatgcacctgtgccgacgccgccactgcctggagggtgcgcgcgcgccccgggccggggatgctgactcagcccggctgctcacattcctttcgcgcaacgcggatgctgttgctgccgctgctgccggtgcagcaaagtgggggaagcaaggcacccgcagcggcccggccgctcgctccctggggcccactgcgacactccctccccactgccggaaggggaactgtgggggtgcgcgagttgacgaaactgggggaagtgggcgctgcaggaggaactcaggcgccgcgcgcgcagctcacacccaaactggaaggaacctgttctgcccggggcgggcgcgaagccgccgcagccgcgagcgccgcgcgggatcagccccggcgcgcgcgtgttccccctcgccgctaaatccctaaatcctcagggcgcgggcgggactgggcggtgggcgcgccgggaaggcgcccgggggtggggacggggacccgcgcgctcgcgcctggccgaggtgctccgagacaggatgcaggcacccccaacaccctgcacgctcgcgctcctactagcgttgcagcaaagctccggggtctgggcgggtcacgcgcgcagaggcgcacccgggttgggagatcggggcgttgtgccaaggaccccggcggcgctggcgggggcggcccggccccggaccgcgacgcggttacctttcgtgacccccagcccaggcggcaggctggcgggcgcgcgaccggcgcggctcaggtccacgtgggacggcgcgcgcgcgccaggcaggccccctccttggctgcgctcagcgctcgcagcacatggtcggcggcggcgcgcccccgaggccggcggagaccggctgcagccggtataggataagagctaggcagcgacgcggggccggggcgcgggcggcagcacgcacggcccgggtcgcaggcggccggggtggggggcggggggagggtgtggctcgggtgcccgagtcgcgggagtgggtggagggcccgggcgctcgggcctcaccagcccgagccaacttgcgctagagtcgggcccgccccctaaggggttaatccttttctcatgttaccgagcggcttataaggagggggaggccaagcctccgccttattgggagcctttgggggtttattctcttcccttctaacttggtgagttggtttattatttta

SEQ ID NO: 18838 - DNA, 2300 bp, Homo sapien
tagcctcatgatgtttttgttttccagcaactttgctgcttaaagtgtgatccaaagacgagcagtacaggcctcacatgggcttgttagaaatacagatcccaggcccagccttacctactgaatctgcggtttaatcaacataaaatccacagcagattcatatgtacctccatgtgtaagatgcaccactggttgaacatgtctttagattttcttattaaaattacatggctaggatgcaaagggacacatttccatgaaaaaaattttttgaaattttttctaacattttattatgaaaattacaaacatacagcaaaattaaaagagttctttagtaagcacccatatatctgctacctagattctattattaactttttaaaaccatttccttttcccccagattaacttctgtcaagaattttggctgggcctgggtgtggtggctcacacctgtaatcccagcacttaaggaggccaaggcgggcagatcacttgagaggtcaggagttcgagaccagcctggccaacatggtgaaaccccgtttctaccaaaaatacaaaaattagctggggtgtgttggtgggcacctgtaatcccagctactaggaggctgaggcatgagaatttcttttttctttttcttctttttttttttgagatggagttttgttcttgttgcccaggctggagtgcagtggtgcgatctcagctcgccgcaatctctgcctcctgggttcaagcgattctcttgcctcagcctcccaagtagctgggattgcaggcatacgccaccatgcccggctcattttgtatttttagtagaactggggtttctccatgttggtcaggctggtctcaaactcccaacctcaggtgatccgcccgccttgacctcccaaagtgctgggattacaggtgtgaaccaccgctccctgcgagaatttcttgaacccgggaggcggaggtttcagtgagccgagattgtgccattgcactccagcctgggtgacagagtgagactcagtctcaaaaaaaaaagaattttagctggtcatagtggcacatgcctgtaatcccagctatgtgggaggttgaggcaagaggatgacttgagccaggagttcaagactggcctaggcaacgtagcaggaccctatctccaaaaatttttttaaatgtagaaacattaggttatagcttgactgttacaaataaccatgtcttggtaataagggtctcacctctccttctggaattctcagtggcacactgggatttagcagcattgggggctggtcctggtcccacccagaacactgggcctcaatatcctcatctctacagtgagtgggttggcagagatcatctctaatgttacttccaaccctgtcgctataggtccattgcgaatattattatcatcactatttttcaggtggagaaactgatgaaccagttaaatatttgaataaaaacatctgttggcatggaaaagtgattatttcctaagctactgagtaaaacacagctgcactggcagttttaactctgttttcttgtcaatttttgttctttcaggaaaccttacagaaacatgaagccctcaaccatctgctactcagttattcggggctgacggcggcttctagaacatccaggtgttctgcagatgcgagaactcatcctgtagtcaccagatggagtcccaaacagccaagcagatgtaaggcctgtgctgtggctctgaggccctgaatacagaagggtcactttcttagtggccaaagagcagttgttgacattgatgtctaattattgaacacgaccagtcattttactgagctgcggtgaggaaacactgaccatagaagatcaagccaaatgagggattgcaaatttcctgattcttttgaattaggattccagatgggggcctcatttctacagcccccaacattcctatagccgttatcactgccatcaccactgccaccagcatcttcttgcagattccacccctgctccccagagacttcctgctttgaaagtgagcagaaaggaagctctcagaaaaatctctagtggtggctgccgtcgctccagacaatcggaatcctgccttcaccaccatgggctggctttttctaaaggttttgttggcgggagtgagtttctcaggatttctttatcctcttgtggatttttgcatcagtgggaaaacaagaggacagaagccaaactttgtgattattttggccgatgacatggggtggggtgacctgggagcaaa

SEQ ID NO: 18839 - DNA, 2300 bp, Homo sapien
tgccccctcccactttacccccaagtccccaaagtccactgtgtcattcttatgcttttatgtcctcctcataacttagctcccacatatcagtgagaacatacgatgtttggtttttcatttctgagttacttcacttagaataatagcctccagtctcacccaggttgctgcaaatgctgttgattcattcctttttatggctgagcagtattccattatatatatatcacagtttctttatccactcattgattgatggacatttgggctggttccacatttttgcaattgcaaattgtgctgctataaatatgtgtgtgcaagtatctttttcgtacaatgacttcttgtcctctgggtagatacccagtagtgggattgctggatcaaatggtagttcagcttttagttctttaaggaatctgttttccatagcggctatactagtttacattcccatcagcagtgtagaagtgttccctgttcaccgtatccatgccaacatctactgttttttgattttttgattatggctattcttgcaggaatgaggtggtatcatattgtggttttgatttgcatttctctgatcattagtgacattaagcattttttcatgtttgttggccatttgtatacttttgaggcttgtctattcatgtgcttagctcactttttgatggtattgtttctttcttgctgatttgtttgagttccttgtaggttctggatattagtcctttgtcagatgtatagattgtgaagattttctcccactgtgtgggctgtttactctgctgactgttccttttgctgtgcaaaagatctttagtttaattatgtcctagctatttatatttgttcttattgcatttgcttttgggttcttgttcatgaaatccttgcctaagccaatgtctagaagggcttttccaatgttatcttctagaatttttatagtttcaggtcttagatttaagttcttaatccatgttgagttgatttttgtataaggtgagagatgaggatccagtttcattctcctacatgtggctagccaattatcccagcaccgtttgttgaaaagggtgtcctttccccactttatgtttgtgttggctttgtcgaagatcagctggctgtaattatttgggtttatttctgggttctctattctgttccattggtctatgtgcctatttttataccagtactatgctgttttggtgattatggctttatagtatagtttgaaatcaggtagtgtgatgcctccagatttgttctttttgcttagtcttgctttggctatgcaagctcttttttgtttttgtatgaatttttctaattctgtgaagaatgatggtggtattttgatggggattgtgttggatttgtagattgtttttagcagtatggtcattttcacaatattgattctacccatccatgagcatgagatgtgtttccatttgtttgtgtcatctatgatttctttcagcagtgttttgtagttttccttgcagaggtctttcacctccttggttaggtatattcctaagtttttttttttttcagctattgtaaaaggggttgacttcttgatttgactctccgcttggttgctgttggtgtatagaagagctactgatttgtgtacattaatcttgtttctagaaacttagctgaattctgttatcagttctaggagctttctggaggagtctttagggttttcgaggtaaacaatcatattgtcagcaaacagtgagagtttgacttcctctttactgatttgaatgcccttttactgatttgaatgccctttacttctttctcttgtcttgctctggctaggacttccagtagtatgttgaagaggagtggtgacagtgggcatccttttcttgtttcagttctcagagggagtgatatcagcttttccccattcagtattatgttggctgtgggtttcttttttttttttttattggtgcaaattactgtttattaagcattatttattccttatgcaaaacaaatgtgcactagcctttggcattaactaaacactctctacatatttctttttttattattattatactttaagttttagggtacatgcgcacaatgtgcaggttagttacatatgtatacatgtgccatgctggtgtgctgcacccattaactcgtcatctagcattaggcatatctcccaatgctatccctcccccctccccccaccccacaacagtccccagagtgtgatgttccccttcctgtgtccatgtgtt

SEQ ID NO: 18840 - DNA, 2300 bp, Homo sapien
cactttagcctagtctctcctgtccctttacttccagaatttcacattagtcccctaaagacttctagatcttttcccacttctaatttgttctgcacaccctggccaagtttatctgacaaagacactgcttttttatcatgaaacactcctgctcaaaaactaacaccagctcccaggtctatcccataaagtccaaactcttaataacaaactgataataacagcttacactttaaaaactttatggtacacttcatgtaattctccaaacaacgtagcacctagcatgccagattctaggttttctaaccaggacagaaatgactgcagcatttgacagagctggaaggtggggggaagcacctttgatctgaaaggttacaaaaatggcacaaagtatctaaacagcagttccattcacttctgatagtttatacaacacctcacaatcagccaaagagcaataacatctgtgaatctatgagctgaactattttttacatcagtggagagaaaaaaataataaagttgagaaaagaaactgttacatttgcatctcagaaaacacaaaccggaaatccaaccagaaaggtttaggtgaaatagtgccctttgttcatctattgtaggtccaaggttaaatatatatatatatacacatacataaaagtagctttgtcataaactgggtattaaaagtgggaaatggggaaaaccgcaattacttttgcaccaacctaataaatttgaattatgctgatttgagagactgtcatataacaataactaaaatatcatctcaaaatttgaaaaaatgaattaaaaatccatcagcagttatacaatccaaagctggcagagctcctgcttcataaaccgtattgacagtaattccgcatgggaacatgtacagtactcagcttttaaaaagagattctttgttaaggtttatctcgaattacgtgagttttgaattgtgctatatcttcaagacgttacccctttcataaactacactgccctacacacactttcatttttttcagctgcggatcggataggtcttgtttagatactttgtgccatttttgtaacttttcagatcaaaggtgcttccccccaccttccagctccgtcaaatgctgcagtcatttctgtcctggttagaaaacctagaatctcgcatgctaggtgctacgttgtttttgcaaattactgtttagcagttatttagtgcacaggtcttgaaagcagacatgcagacattctaccatttactgttactttagacaaattgtttagctttggagcttcagttgcctcttctgtatattgagcacaatcgtattttccacacaagttttataagaattcaagatgacatacatagtacggcgcgcttggcaagtagtgagggttctcaaccgctcggcaatggataagataacttgctatctctctggctgaggcagccccatttcaggagcttctctcaatgcggcttgaggactcgacaaaagggtggggctttggagtctaacgctctctgctaaactctgtaagtttaataggcagagttacacatggcaaggggtctgggcggggtgggaactagcgcgtcctcctgtcacccttgcggcggccccgacgcagttgccggactgaaaccagcagatctggccccagccgcattccttcttccctctccctcccagctgggcggctccggcaatgaaaacaccgccacgtgggcctgctgcctttgcgtcacgcgcctttgtccaatggagagccgcgttacgaagccaggggcgggtcgccagccgggcgggtccgcccacagctgccacggattggccaaggggggcggtgcccgccagccgtggcttgggctcgtggccaatggtggccggaggcaggggccccgccctatcaggtgctctggtcctcgggaccagctggaggggcgagaaggggcggggcgaagccggggacgcggcggggacggggcggggtaggggcggggtggggacggggcggggtaggggcggggtggggacggggcggggtaggggcggggcaggaccggcgacccggcccgtggagccggcgcgggcgggctgctgaggtggctgtcgccggctccgagctgcggcttcccgggccgagcccccgatggaggccgaggccgcggacgctcccccgggcggggttgagtcggcgctcagctgcttctctttcaaccaggactgcacgtaagctgcgactcggcccctgccagggaggtgggggacaga

SEQ ID NO: 18841 - DNA, 2300 bp, Homo sapien
cgtggctggactggcgcctgcatgcagctgaatggggacacacagccaggactcagcaaggaagcagctgtcactcaaagtgctcagctcaatgtcagcagcttgcttgtttccttattcttagtgtcttaactgcacttggaaggtaacactaatggtgggacatagtgtcactctgacttaaccttgtagtttgggtagctctgcaggaagagggagaaatgggaagtaaattaacattcatttaatatatcccccactgtactgaacaccatatatatatatgtagacagagagagagagagagagagagagagagagagagagatctatctattctgcaatggagagtgattaagatcactgcctgggtttaagccatgttagctgtgtggccatgggcaagtcacttaacttctccatgtctcatgtttttttctgtaacaataacaatattacctatgttaagagttactatgaggattaaattaattatgtgtaaagcccttagatcagtgcttggaacacagtaagtgctatacgtgtgtttgctgttatacccttagtagttaacttcaacaaagtcctgttcatccttttatgaccgaggaaacggacacccatggagattaagtcaattaccggacatggcagagcctgaaaccaaactcagatttacctgactgcaatattttcttcccataacatgaccgggcctgctcaatgctatcaaattccctctgctgcttgccagcgtagggttcagtttatcaacccttctttgtactgtcaagagtgaaatcctatctgactgaggctcttttatccccatttctgatcaaccctggagaagggccaatggtcaacatttggggagtcagtgaaaggagaaacttcccttttccattcccccctgtaagcctgattgcccttttgatatcgcctatgtatccctatcagaaggcagtgaataacataactaaataaatcatctgatggacagtacccttagagcctggtggatttgggggagcagtcggcctccgagggcagcgctgcccaataggaatataatgggagccatctgtgtaactttaaactttttaatagctacactaagaattaaaaaacaaaagtgaaattaactttaatattttacctaatatatcaaaaatattatcatttcaatctggaatcaatataaacactattgagctacttttttgtattgtgttgagttcatgatttactttaaacatacagcccttgaagtatatacaatgttactacaacagctcctggacacttgcatatgtgtgtattttgcttttttgtattgtgttgaatccattatgaattttaagcacacggccctagaaatatatacaatgctactaaagcagcccctagccagacacttggacatgtttccttgatgggccttctttattgagttacagacttgatgtgtctaaaattgtaccgtctcccttttcttcctccttagacagatactctgatggaaaaaaaaaatggctgaaagagtaaagtcgcttttcctccgaattttccccattagtgcagcttgtctggacagctgcgatttcttgttgggtcacagggcatttttgacaatctgcacgctctgcacttctccctctgtgaggtcaggagtgatgggggggcacttcaggttctagaaggactcaggcctcctcttggaccctgacaaagtcctttcccgtgcctggtttccacagggacggtgttgcctgcacagacgacagcacccccggcgggggagagcggccccagcggagactcggcagggctcaggtttcctggaccggatgactgacctgagcccggggcccgggcggcgctggccgggcacaggatgcgcggcccggagagcgcatcccggccatccgcccgcgctcggccccgcagcgcagctgctgcagatccgcgggggccgccacctcctccgggggctggcagcgacaggactctccccgccccggcccggggccctcccttgcaggggctgcggggaggagtcgcccacctgtcatctgagacgccccacgtgggtcggccagggagggggtggaaaggagggagaaaaggcagaggcgtcaagggaggccggagggagagtggggtggacagaggagcggagggacgagagggaagcgcacgatagctgcgcggagagagagcgaagagcaggcggaggaacaaaggcgacccaagacacccagagagggacaggtaaggaggggcaggtgagcaggaag

SEQ ID NO: 18842 - DNA, 2300 bp, Homo sapien
tttttctgtaacaataacaatattacctatgttaagagttactatgaggattaaattaattatgtgtaaagcccttagatcagtgcttggaacacagtaagtgctatacgtgtgtttgctgttatacccttagtagttaacttcaacaaagtcctgttcatccttttatgaccgaggaaacggacacccatggagattaagtcaattaccggacatggcagagcctgaaaccaaactcagatttacctgactgcaatattttcttcccataacatgaccgggcctgctcaatgctatcaaattccctctgctgcttgccagcgtagggttcagtttatcaacccttctttgtactgtcaagagtgaaatcctatctgactgaggctcttttatccccatttctgatcaaccctggagaagggccaatggtcaacatttggggagtcagtgaaaggagaaacttcccttttccattcccccctgtaagcctgattgcccttttgatatcgcctatgtatccctatcagaaggcagtgaataacataactaaataaatcatctgatggacagtacccttagagcctggtggatttgggggagcagtcggcctccgagggcagcgctgcccaataggaatataatgggagccatctgtgtaactttaaactttttaatagctacactaagaattaaaaaacaaaagtgaaattaactttaatattttacctaatatatcaaaaatattatcatttcaatctggaatcaatataaacactattgagctacttttttgtattgtgttgagttcatgatttactttaaacatacagcccttgaagtatatacaatgttactacaacagctcctggacacttgcatatgtgtgtattttgcttttttgtattgtgttgaatccattatgaattttaagcacacggccctagaaatatatacaatgctactaaagcagcccctagccagacacttggacatgtttccttgatgggccttctttattgagttacagacttgatgtgtctaaaattgtaccgtctcccttttcttcctccttagacagatactctgatggaaaaaaaaaatggctgaaagagtaaagtcgcttttcctccgaattttccccattagtgcagcttgtctggacagctgcgatttcttgttgggtcacagggcatttttgacaatctgcacgctctgcacttctccctctgtgaggtcaggagtgatgggggggcacttcaggttctagaaggactcaggcctcctcttggaccctgacaaagtcctttcccgtgcctggtttccacagggacggtgttgcctgcacagacgacagcacccccggcgggggagagcggccccagcggagactcggcagggctcaggtttcctggaccggatgactgacctgagcccggggcccgggcggcgctggccgggcacaggatgcgcggcccggagagcgcatcccggccatccgcccgcgctcggccccgcagcgcagctgctgcagatccgcgggggccgccacctcctccgggggctggcagcgacaggactctccccgccccggcccggggccctcccttgcaggggctgcggggaggagtcgcccacctgtcatctgagacgccccacgtgggtcggccagggagggggtggaaaggagggagaaaaggcagaggcgtcaagggaggccggagggagagtggggtggacagaggagcggagggacgagagggaagcgcacgatagctgcgcggagagagagcgaagagcaggcggaggaacaaaggcgacccaagacacccagagagggacaggtaaggaggggcaggtgagcaggaaggaggagagaaccgggctagggagactgcggaaaggagaagtggcgggcgtgaggaaactgctgtggataagggacgagtaagatggaaagaatggcggaagacgaacgaccgcagagtgagggtccttccaagagcgaccaggggggaggaactggggctgttgcgcccttaaggttgctaaggcgacggttctggccagagcgaggcgcattgacgtcagtagccgaacgctgattggctgcggccaggccgtttccggtggagctgtcgcctagccgctatcgcagagtggagcggggctgggagcaaagcgctgagggagctcggtacgccgccgcctcgcacccgcagcctcgcgcccgccgccgcccgtccccaggtgagtggggtcggccgggggctcaggcgaggtgagcttcgtcgcttcgcagc

SEQ ID NO: 18843 - DNA, 2300 bp, Homo sapien
cggctccgagtctgcatcctcaaggccgtctgggcgttggctttggtgcggggctccccagccgccccgctcgcgctcgctgcccccaccccacggctcctggggccctgggccctccgcggccctccccggccgccttcgcccccgcgcgccgcggcctcttcgctcaccctcccccatttcctgaaggacaacggctctattttactggggtccgccatcgtctcgtccgccggtcctggctcttcttgtaagccggtagttttcctctccacttttgacgactcgtcattgctagcagtagcctttcctcttcatagcggagtgatctttcccccaacacgacggtcttagtcgggctcctgaatttcctcttgtcccctttcacctctctccctttcccaattttgcccccctgaggcctcctcgccaccactgtggccttccgactggcgtagcttgaagtctcggcttcccttcattttgtggtcatgaccgtggcctacgtgaagtgaagggcattttcctgcccttcttctagaaaatacacggtacctattaacctcttcagctcagagcctgtggtgacgaccgtcctactccttgagagattcccaagagatccgtctttttagcagagcgaggaaagcaaacacttactcaagatgaccctaggggagccgtaacttggctggtctaagggggtgcggtctgaatcaggaacagtttctcaaagtgtttttatttatttcccagaatgtaatcctttcgaaacaattttgtcacaactgaattttcaaaagaatgaatctgagtgttttgttttacatagagacaatgcagcgaaagttttaaagcagttaaataattgtgtgtggggagggaaggctaggttgttgggctttacaaataagtacacatagagaatccgggtaactcgattaaaaatattaagactgtgaagtctggttattcagggatttacatggtgactgcattaattttggtacatttctgttcgtatactgtcctattaccggtggctatctttttggttttcgtaatacattagttgtttcaaacaaaaacacagtttcactccttaggcccagttctctcatctctaccagccaaagacctgatcttagaatgattgatcatttgaatgttcttaaaatatgacaatgctttgaagcatgaaagatctgatttatgattgttcttggtggcctttaagtattatttgaaatgcagacaattctactgaagtggatcttcagttcatatgattgcctgacctggagaagtggcttgtataaatctatcctaaagtaaatgcgcgtttttgtttttgttttgcctgtttaaagtagcagcatgattatttttccatggcttctaatttatgtgcttgtcttggagccacgaactttctaatggtctgttaattagtctacttgttgttgacctttatggtgaaagttgtcaaaacaaaatgagtaacagtgtagcactttagaatagctctttactctgttaattctttctataagttcttttaaatttacagtttcatctcaatagtttacaatgcattataattggaaaagtctgattagtattgaattcagttgctgagtggaggggaccacactcttgtcttctactcttaagtgcttagtaattaggagttggaaggaaaacagtatatgaccctgttgttaaattagtaaacttttaattctagggtaaggttagctgctcatcattatctctgtttgctttactttacataaaggtaccataattcgaatcctctaaaatccattaaatgcaatttatccattaaatgtaatccattaaatgcaatttatctattgaatcttcatgcaagtttgaaacttaagtgttttaacattctcctgtcaagatgaagaaaatattttgacaattttctgtccaaatgttttacagtttatgtggtaagaattctcccctcccccaactaaggattttccttcttttaccactagtgtattatcatttaggggtggaatctggcaaacgagtctggaataaaggttgcttttaaaactcatctaattttcttgtgtgtttttaaaaattttgattatgctagtagttggctaatcagatcctcactccagtggtttgctctgtgacgttaggatactcccatgggatagaagttacgtatagggaatgtcagatattcttcattgtgctgacttgctttcgcttacagttgacttttgtgccctggtaattctgtatcctgt

SEQ ID NO: 18844 - DNA, 2300 bp, Homo sapien
aggctgggaagtccaagattaagccaccagcagattcagtgtctagtgtgaggacctgctttccggttcatagatgaagccttctctcttcacatagtgggagagatgagatagcattccgaaatctctttttttttttttttttgagatggagtttcgctctgtcgccaggccagagtgcagtggcgtgatctcagctcactgcaacctccacctcccaggttcaagcgattctcctgcctcagccttccaagtagctgggactgcaggtgcatgtcaccataaccccagcactttggcaggccgaggcgggtggatcatgaggtcaagagattgagaccatctggccaacatggtgaaacccatctctactaaaaatacaggatattttttagaagggcactaatcccacccatgagggctctgccctcatggcccaatcacctcccaaaggccccacttcctaatactatcatactggggattaggtttcaacatatgaatttaggggtaacacaaacattcagaccatagcaggttaatgatgtgattttcatacactggaatatgatgtgatgaacttaacaaagaatgaggagctttctgtgtactgaattggaaaaatcaccagaacctattgacaggaaaataaagcaagtttcagaacagtgcggattttatattatcatacctataaaaataaaagtggaaaaaaacaatggggaaaaacaccagcaacattagttgcctctggagatgggaagcgggttaactcagggacaggatggaagagtcttgacatttaacattttgagccatgtaaatgcatttgctacttaaaaaataagtaaaatcaaacgttttaaaatgctctttttttctgaaagaaatactcttctttttaggaaactatttccaaggaaaattccagtattgcagagtcaggagcaaagtgatttctacttctcccctgaagatcatgtgatttgtaactaaggttttatttttgttgatgaaagcaacagccatgaagactttgtgctttatttttgtgatatatactttttctctttccttaaaaggaaggccagtgttaccaggcaatggcctcactgtccaacacaaatagaaggcaatactatggcatggcttttgagggaaaataaaagttttattgcagagtatgaatagttttctagatctaataaaaaatattacttagggttatttttaaaagaaatgaaagcatatgcttaaaataagagcatttagcttttgagcctttctgtgaacaaagtacgtattcgttttttatttttgagtacaaattgccacaaacttagacacttagaacaacaccccatttgtcctataggtcagaagtctgggataatgtttcaggccgttttgcgttgctataaagaaatatctggcgaggtgtggtggctcacgcctgtaattccagctctttgggtggtcaaggcgggcggatcacctgaggtcaggagttcaagaccaccctggccaagatggtaaaaccccatctctactaaaaatacaaaattagccaggcatggtggcatgcacctgtaatcccagctactcagaaggctgaggcaggagaatcgcttgaacctgggaggtagaggttgcagtgagccaagattgtgccattgcactctagcctaggcaacaagagcaaaacttcgtcgaaagaaggaaggaaggaaggaaagagaaaggagggagggaggaaggaagggaaggaaaaaagaaatacctgaagctgggtaatttattttttaaaaaaagatgtaattggctcatggttctgcaggctgtacaggaagcatgctgcttctggtgagggcctcagaaaacttactcatggcagaaggtggtagagaacaggcacatcacattggcaagagcaggagcacaagagagtgagcggggaggtgccatatgcctttaaacatccagatctcacatgaactctgagcaagacctcattcatcaccaaggagacggtgctaagccattcatgagggacccacccctatgttacaattacctcccaccaggccccaccttcaacactggggactacatttcaacatgagatttggaggggacaaacatccaaaccatatctgatggtatgactcattttctgctaggatctcacaagattaaaatcaaggtgttggttggctgcattttcgtcagcagctcaggggtcctccttcaagctcattctcgttgttggtagaattcagttccttgcccccatttccttg

SEQ ID NO: 18845 - DNA, 2300 bp, Homo sapien
ctgaaagcaggttccttcctgctatcttccttttccatccttttctatttttgtcctagcgatgagcagtctctaaccaagcctagtgtactacaggaactaataagtaatcataatgatagcaaacacatatttcacacttatttaggatgagttaggagctcttctaagtaatttatacatagtcaagtgccacataacattttagtcaatgcaacagtggtcccataagattacaatactgtatttttactgtatgtttcctatgtttagacacacaagtactcaccactgtgttacaactccctacagcattcagtagtcgcatgctgtacaggtttgtacctaggatcaacaggctatgccatgtagcctccgtgtgtagtaggctgaaccatctaggtttgtgtaagtacaccctgatgttcacacacacaggaaaattgcctaaggatgcatttctcagacgtgacacataattgtacttcaattcatttaagtctcataataaccttaggaggtaggttccatcattatcttcatttacatttgaggagactgcaaagtcccgaagaaatcttacactgaaccacggggaaaagaactctggtctgaacccacaagtcaaagtatgtctgagggttctcaattccagcaagggaagggagggggttaaagagtagaactaacttacatgggaagctttgctgcctgggcaagcagcttctggtggatttcctgaaattcagcagggtggggccgcctctccaatcagacttcactttactatactatggggtcattaaatagaggagccaggagttcaggactccctccctcttcttcaaaaggaaaactgggtgtggggagggtacattacctcacagaatattggagaaagcctaaatgtgtcctccagtgattcatttgggtggactactttcacaccaagctaaactcaaaagttcggagtggggtcatcagggcccctccctccctgagtgcaagaaacatttcctctttttaaagtacaggcagagttggaatcaaactccttccaaacaggaaatcagcaagattctaggtaaaactgataccttacttttaaaggtcaagctctttccttcaccaagagcgtgtttcctgagcacctactatgtgccaggcatgtggtaggtagttgttatgaatcttgatgtgccctgcgctctgcaggggggcggaggtggaagggaacacaaagaaagaacagataccaacactgccacccccgcctccccccacccccccccacacactcatttggcaaagcttacaggaaaaaaagggttttagggggcttgtggtggtttttttttccctaaaaataatagaaatggtaaaaagaggcttcggacccctcgcgtgagtcccttaaagtgactggattgagacctgggcagggaaagtgggaggcccgagcgagggggagggcgcaggcagtgggtgggtgacaaggtgcaagggcagcgccggcttcggatcgggagttggccgtcagctgcgccagaggcaggtgccagcggagagtgggtgggggtgccggcgccaggccaggctcggggaggccccgcgctacctctgcctctaggagtccaggcgcacagacaagctccccggagccgctcctgcttcgccaactccccactcgcgccgcccgtgccagccgccggcactggcgtctccgccgcccgcaggaggagtcgcgggagcactagcagccgccgccgagcgacagcatcctcaggagagacgccccgggctttgcagccggcggcctccgtccgccctccgcggtcgccccccgccccgtcgcccgtccgcccgcggtggcagccggcgccggcgccccggggcccttcacctgccgcgagcgtccgggcgggcgggcgcacgggagaaaaggcgcaagaagcgggcaccccgggaaccccattccctcggctcactcggcgcggagaagcgacgcccgctgactccgagagccccggtgctccgtgcacctggtccccaagttgaggagcgacacccctccacaggggactagcccgcgcggggagcattccggtctcactgaccccggcccacccgcgggactccaggcacctcttctgcccgcaccccgcgacccctcccgggaccccggagacagccggcctgcccccggcgtcccccttggccagcacgccatgccggggctgcgccgggaccgcctactgactctgctgctgctgggcgcgctgctctccgccgacctctac

SEQ ID NO: 18846 - DNA, 2300 bp, Homo sapien
aaggtagattagaggcaaacctgaggaagccaacatcctattggccaatcctactggtaggatttccactctcctatccagcttcattcacacttaatatctaactcccacatgcagttctgcacttgactgtgacctttaaagggcatggaaaatatgtttacataatttccaagcaagttacactattgttccctaaattggggccagaaaaaaaagagtctactaagcgagtatgaccccatgggttgaggagaattgaagtcacaagacctgcagtgtcaccacatccacgtcctttgccagccgagaaaaatgcgcatcagtttgccacacagttactgcagttacatcaccaccattcaatgcctgacttcttcattcgcttgccatgacatctaattaaacacattagaagttgcaacgtctctcagaaattggaaatcagttaaaatttaattccagataaaaaggaggaggttctagaacccctcaaaatgcccaccatcatacccagaggagtggagtagctgggaatagtaccgtcttgggctttttcacttggactgggcactcaggccacaatgttatgcccctgaaagcaggttccttcctgctatcttccttttccatccttttctatttttgtcctagcgatgagcagtctctaaccaagcctagtgtactacaggaactaataagtaatcataatgatagcaaacacatatttcacacttatttaggatgagttaggagctcttctaagtaatttatacatagtcaagtgccacataacattttagtcaatgcaacagtggtcccataagattacaatactgtatttttactgtatgtttcctatgtttagacacacaagtactcaccactgtgttacaactccctacagcattcagtagtcgcatgctgtacaggtttgtacctaggatcaacaggctatgccatgtagcctccgtgtgtagtaggctgaaccatctaggtttgtgtaagtacaccctgatgttcacacacacaggaaaattgcctaaggatgcatttctcagacgtgacacataattgtacttcaattcatttaagtctcataataaccttaggaggtaggttccatcattatcttcatttacatttgaggagactgcaaagtcccgaagaaatcttacactgaaccacggggaaaagaactctggtctgaacccacaagtcaaagtatgtctgagggttctcaattccagcaagggaagggagggggttaaagagtagaactaacttacatgggaagctttgctgcctgggcaagcagcttctggtggatttcctgaaattcagcagggtggggccgcctctccaatcagacttcactttactatactatggggtcattaaatagaggagccaggagttcaggactccctccctcttcttcaaaaggaaaactgggtgtggggagggtacattacctcacagaatattggagaaagcctaaatgtgtcctccagtgattcatttgggtggactactttcacaccaagctaaactcaaaagttcggagtggggtcatcagggcccctccctccctgagtgcaagaaacatttcctctttttaaagtacaggcagagttggaatcaaactccttccaaacaggaaatcagcaagattctaggtaaaactgataccttacttttaaaggtcaagctctttccttcaccaagagcgtgtttcctgagcacctactatgtgccaggcatgtggtaggtagttgttatgaatcttgatgtgccctgcgctctgcaggggggcggaggtggaagggaacacaaagaaagaacagataccaacactgccacccccgcctccccccacccccccccacacactcatttggcaaagcttacaggaaaaaaagggttttagggggcttgtggtggtttttttttccctaaaaataatagaaatggtaaaaagaggcttcggacccctcgcgtgagtcccttaaagtgactggattgagacctgggcagggaaagtgggaggcccgagcgagggggagggcgcaggcagtgggtgggtgacaaggtgcaagggcagcgccggcttcggatcgggagttggccgtcagctgcgccagaggcaggtgccagcggagagtgggtgggggtgccggcgccaggccaggctcggggaggccccgcgctacctctgcctctaggagtccaggcgcacagacaagctccccggagccgctcctgcttcgccaactccccactcgcgccgcccgtgccag

SEQ ID NO: 18847 - DNA, 2300 bp, Homo sapien
ctgcaacctctgcctcccacgctcaagtcattctcccatctcagccttctgagtagctgggactacaggtgctcaccaccatgcctggctaatttttgtatttttttgcagagacagggtttcaccatgttgcccaggctggttttgaactcctgagctgaagcgatccacccgcctcggccttccaaggtgctagtataacaggcatgagccaccgcgccaggctcctggatgttttatcgtggacatagtccaaggttgtatgccatctttatcccatccatttttctgtgtgtgtgattttttttttttttttagtagagacggggtttcaccatgttagccaggatggtctcaatctcctgacctcgtgatctgcccgcctcagcctcccaaagtgctgggattacaggcgtgagccaccgcgcctggcccccaatccatgacaaaaaacttcgaatagtacatgtccatgtattatttctaccagtttttatatacttccgggaatagtctgcgcacactcaagcatctctcttcccttgttttctcttctctttgttttttctcttttaacacacttggtagcacactaagtgcattgttctgcaccttgcgcttttcagtgagcaatgtgtcttggtaatagtttcataatactttgtaaagatcctcttcaatattgaggctgagaagtctgactttagcatttcctccaccattttttccctctaaattattattattattttttttttgcgacagagtcttgctctgtcgcccaggctggagttccgtggcgcaatcttggctcactgcaacctccacctcctggattcaagcaattctcttgcctcagcctcctgagtagctgggattacaggcatgtgccatcacacctggctaatttttgtatttttagtagagacggggtttcaccatgttggtcaggttggtctcaaactcctgacctcgtgatccacccacctcagcctcccaaagtgctgggattacaggcatgagccaccacgcttggcctctaagatctttttaagatcttttatttattcatgatttgtaaagttctgtgataatttagctctatttttccttctgatgctggcttccttgtatattctttcagtctacaggctgctagcttttactcctgtatgtatgtgtataaatgtgtgtgtgtgtgtgtgtgtgtgtgtgtgtgtatttttctttacctgttttctgtttgtctggaacggaaacttctattcctgttatttgactgttaggttttctgggttaatcctttctctcatgtcttgcttttgcccataatttttatttcctgatctctatttgctatctttgtgggaaggaaactgggatgaactttatattcatggaaagataaagttccatagaaatttttactttgcgtgctctagctttatttattaagagctcttctttcctcactgattaataaattcttgttttatggatacattatcttctcatatctttccaaggatgttatgttaaggttgttttatggatgcattatcttctcatatctctccaaggatgacatttagcacaaatcccttcctttcctttccctttctctttctctttctctctctttctttctttcttttctccctttctggctctgtctttctctttcttcctccctttgtctctcctttttaaaaaattaacccaaactttggcatattgagaaataatgtgggaaaagaggtaaggcagatgaaagaccaagaaaccacttttattaaacaattgaagagtcaggtagaggatgcagtttagtctaagagtccagtgggcctgcaaactcaaccccagaactgggaaacttaggcagccaatcacgggcaatgctgaactgggacaggactcctcccatggtacgactgttctcactgaggggtagaaaaaaacatgctctgtcttggaaagactcactcccaggaggaaagggtggagctgaactaagtctgaccggttctttctcccagactcacctttactgccctgtgggagaggctagtgggagggtgggcaaggccagagcgtgtcctgcctccatgtggagggagatacgggaagctggtaagtctccctgccaacctctccttggggtggagggtcagttcctggtttctggcactctgtgtgtgggagtaggtgaaggtgctgactgttataaatactgaattccatcttagcctccagggttgctcttgtgtccccctcctacactctgtgatatcagatgt

SEQ ID NO: 18848 - DNA, 2300 bp, Homo sapien
agacgaggcagagctgcttgttaaccggaactccatttacgaccttggctctatattctcaatctagctgtagggccttagtgtgggttgcagttatcaatgtccactctgactttatgcccaacaacccttgacatgtctggggatttttctttcttcagtgtataatcacccaaataatggctttaggtccctttgagggaggactaggaagtataatcaccacagtatatacttgtcaagatgttgcaagatcttttcttctaggggtctgactagttttttaatcaatatgttctgtatctgaaaagtagcttaggactaggagctgagcaagagatcatgactttttattggggtgatggagaccatgttgagcctcttactcctctatttcttccccttctggttatatagttactgagcagcacccttgttgacctccttcctattttgtctgtatatcatagtaaggtttatatatttcacttaaaatgaagaaatattaattctgggtaaagcatgtcaagttaagtatgtcttttgtaatcctgagagtgaccactaaaataactatacaaatagatacagttaagaaacataatagatacgttgaaatgcaataccaaaaaataatttcaaataaccaacaagaaagcagaaaatgggaaataggagaattaaaaccagagagaaaagaagcaaataacaaaatggcagatctgattttaaaaatcaatagctacataaaatgaaaataatttaaacacacccattaaaagatgtgcattgtcaaattggattttaaaaaccaaactcatgactctattatatgccatctacaagaaactcacttgaaatacaatttagagctgggtatagtggcatgtatctgtagtttcagctactcaggagtctgagatgggaagatcacttgaacccaggagttcaagtccagccttggcaacatagcaagaccatcatcttaaaaaaataataacaaacacagacgcacacacacacatacacacacacgcatacacatataatatgaatgtgatgtttggcagggccaacagaattgagatcataactgccactctgaaagcatatagtgtgtgtgtgtgtgtgtgtgtgtgtagataaaaataaacggatgaaaacaaaataccacgaaaacaataatcacaggaaagtaagaatggctatattattaatatgaaacaaagtagactttagaacacaaaagttactagagataaagattaacattacataatgataaaagggtcaattcaccaagaagacataacaattccaaatgttgcaaaatacatcaggcaaaacatgatagttttaaagggagaaatttgaaagtccctaagttttgttaaaatcttcaacattcctctcttagtaatcaacagaactaggagacagaaaattaggaaaaatatagaaaaaactgaacaatatcatcaaccaactaaatgtaatagatattatataatattccactcaacaccaaaaaactatacaacttttcaagtgcctatggaatatctgccaagatagatcatatcctgggtcatcaaataagccttaacaaatttgacatacaaaatattttttctgagtataattgaacttctgatttaaaattaaatcaataaccaaaagataagaaaatcttcagacacttggaaattaagcacatttctgattaatccgtgggtcaaataaattggaaaatagtctgaactgagtgaaaatgaagctgggaagcagaggaatgaaaattttgattatctaggtaaagctgtcaattaagcagactagagctctgggtagagagaagagcttttctctgattaagctgtttactttctcatggcttaaagacagcactttaaattttggtattagccacaataatcttggacgtaaaagagaaattgctccctataatatgatatagccaggcaacccagtataaatgccactgctctgcaggaactggccgaatatcaatgagaagacaaacagtccaagcatgatgacgtgaatgtgatgtttggcagggccaacagaattgagatcataacctccactctgaaagcagtcttcacagaaacttttcacagaagtcaaatagttaaagcaaattctagatacatggtagagaccaggagaaaatatgaataactttcttctaaacaaggagctcagtggataaaccatacctctagattccttgcttccattttcccagaagtaagttcactgtattttttctgttt

SEQ ID NO: 18849 - DNA, 2300 bp, Homo sapien
ttgtatgttttgagtttctctgaattgcatcaaattaagaaggtttggacattttaggcatttgaagcaacacacacatgcacatgcatgcatgcgtgcacacacacacacacacgatggcttttaacctggacccccccccttttttttttttgagacagagtttcactcttgttgcccagactggagtgcaatggcgctatctcagctcaccacaacctccacctcccgtgttcaagcaattctcctgcctcagcctcccaagtagctgggattacaggcatgcaccaccatgtgtggctaattttgtatttttagtagagatggggtttctccatgttggtcaggatggtctcgaacttccgacctcatgtgatccacctgcctcgtcctcccaaagtgctgggattacaggcgtgagccaacgctcctggccctggactcctatctttacaataattatctgtcatgggtagtactggtttcacttgctactattatatttctgttaggctctctctgaatagcagtgaggctaactttgacagtttcaaagaatattacaggttgtctttcagccttgtaaaaatgaatgctatcaaatcgaatttttatataatcaaactctttaaatcaattccaatattgaaatcattgcatttatagtgatactaattgtgattgtctttctttttccctagccttaccttcattttctcatttttcttttcattctgcgatgcctagaaatgaactgcaggaagaaactaatgagaaaggatcctgtgttcaggttgagaaaatcaaatcgaatttcatgtttcattttgatattcattctttaaggactttttaatgtgctgaattaattaagtaaaagacacttcacaggatggtttttaaagactgtgatatacaaaattcttataacccataatataggaatatatactgagcttacaatctagagagagaaaccatattagcacacacgagacactggaaaattaaggcagaccataattttactatagaggaaagttatgtgtaagaggtggaatctctaaaataatgggtaaatatagataagcattgggaaagttaatccaatccgggaaggaagaatagtttgtgcaataaaaccaaggatgagatgaaggcaccaggagctcctttgtaggcttatgttgggggatgatgaaaaatgaaagtgaggctagatattggaggatcttgaaacagaaaagtataggaaaggttttgcaaattacataatgtgaaaccaagacaccaatgtgtcttgaacacttagccttccatataaaatataaaccaagcttaagtctaatgtttgtggtagcagagaagagtgacaagatgacagccatgttttaggaaaccaacaggcaaccagaatgtcagagcgtggcatgagggagagataaaagaatgagcaggaatcaatggtgggatgatgaaggcaagaacgagtctgtagcagagaggaaagagtgattctgtcacacattcccaagaagtgactgtgctcagtaactaattaggcattggtatggtgattagatatcctggattctctgggacacatccttgattccaaatctttggactcatggctctcacaaagacctcagaattccaaaatatctgttgtcaaaactatagttcctagattcctttcctcatgcaactctgcttcacaatcctttgccagagggtgtataccactttcttctttgaaagaaaactgtcaccatcaacagggaggattaagctttggtaaaaagcgaagatgatataaggatatcattactctactcactgaaggaaactagggtgtttgaaaggcggatggtgcaagtagaagaatagagaggatgttgtgctctgaatgaatctactccaaaaattggaagtatagagaaaattcattaattttgatacaagatttttaacccgaagtttatcattatcacactgttttgatttcagaatttctccaagaagcaacgctatttttccaaacccagaagagcctgaaggagaggaggaagatatccagatggaaagaatgagaacagtgaatgctatggctgtgcgagactttgatgaggtagaactcagaaatgttcttcgtcaactatttttttttctgacagataaagtgagaaactttctaagtttagttttcgaaaaacacttggggttctttcattcttacacatacagcttattacttgacttcagcaggtatgcaaggcccacaaatgtaagagagcaaa

SEQ ID NO: 18850 - DNA, 2300 bp, Homo sapien
tgcagttttgagtgaatttcttaatcctgagttcttatttgattgcactgtggtctgagaaactgtttgttatgatttccgttcttttgcattttctgaggagtgttttacttccgattatgtagtcgattttagaataagtgctatgtggtgctgagaagaaagtatattctgttgattttgggtggagagttctgtagatgtctattaggtctgcttggtccatagctaagttcaagtcctaaatatccttgttaagtttctgtcacattgatctgtctaatattgacagtggggtgttaaagtctcccattattattgtgtcagagtctaagtgtctttgtaggtctctaagaacttgctttatgaatctgggtgctcctgtattgggtgcctatatatttaggatacttatctcttcttgttgcattgatccctttaccattatgtaatggccttctttgtctttttttaatctttgttggtttaaagtctgttttatcagagactaggattgcaacctctgctttttttttttttttttttttttttttgctttccatttacttggtaaatattccttcattcctttattttgagcctatgtgtgtctttgcacctgagatgggtctcttgaatacggcacacaaatgggtcttgactctttatccaattcggcaaattggatactggcatctgtgtcttttaattggggcatttagcccatttacatttaaggttaatattgttatgtgtgaatttgatcctgtcatcatgatgctggctggttattttgcacattagttgatgcaatttcttcatagtgtcgttggtctttatattttggcttgtttttgcagtagctgctattggttttttctttctacatttagtgcttcctttaggagctcttgaaaggcaggcctggtggtgacaaaatccctcagcatttgcttgtctgtaaagaattttatttctccttcacttatgaagcttagtttggctagatgtcttttacatttataaatgcttgggaaaaaaattcaatgaacaataatattttgtggcatgtgaaaatgtatatgaaattcaaattttgttgtccataaatacattttattgaaacacagccacacatcactaacatattgtttatgactgtgtttgtgctacaatggcaacagaaactgtacagcctgcaaagctgaaaatattcacaatgtggctatttagaaaaaaagtttgctgaaccctgctccattatctacttttttgtccatattatttatacaataaccttactgaaaaacttgtccagagctgagaaatcagcatagatgtcttcccagaaaagctctctctggaaacctctcccagtgacatccattgtatcatccagctttacttattttgcaatttagttatcaattttcctctctacttgtttattgcctaccttcttttatattatgtgatcctgagggtaggagataagttagctattgcattttcttttcctttacccttgataaatggtgagcttcacaaatcatttgctgaataaatgaatcaaggaagtgatgaagtaacaacattctaactgacggctttgtttctctgctaggctttcctggggtttgatgtatgctggcttcatccttatcatggccactttaatggctcttattgtaaaatctgcacaaattgtcgtcctgactggttttgtgatggtcttcaccctctttctcctctatggcctgtctttggtgagttggttaatttcatctaagtcttttattctctttctctctctctactgccaataatttatcactaattctggtctcacctcttttgttctctttgtagtatttgcatgaaacagtgtctaggggtggaaaaatataaaatatacttttataatataaaattccttttttgtgctactgttctcacagaattatataccagctgaagtctttctcttttctcagataactttagctttcctgatgagtgtgttgataaagaaacctttccttacgggcttggttgtgtttctccttattgtcttttgggggatcctgggattcccagcattgtatacacgtcttcctgcatttttggaatggactttgtgtcttcttagcccctttgccttcactgttgggatggcccaggtaagagttaaggtaacactttcactttttacaaaccgttctacacagattccctcttaataattcacacaacatgctctaagcattccattctataacttttgtaaaaataaacatgta

SEQ ID NO: 18851 - DNA, 2300 bp, Homo sapien
tactcaccatctgtgtgaatttgggcaagttatgtaactccctgggcctcacctttctggtccgtaaaatgggttgattagaataatgcctacctcatgggattattctgtggattaaatgttttaatatttaagtatgtcttagacacaataaatgctatatgtagttgccaaaaaaagtgtacattatggtataaaatcagtgtcatttcatttttgaactcccatgggattgtttttgaattggtaaactgattcaaaaacttctttataagagtaaatacgtcgggcgcagtggcttctgcctgtaatcccagcactttgtggggccaaggtgggtgcatcatttgaggtcaggagttccagaccagcttgaccaaaatggtgaaaccccttctctactaaaaacacacaaaaattagctggccgtggtggcaggtgcctgtagtcccagctactgtggaggctgaggcaggagaatcgcttgaacctgggaggcagaggttccattgagccgagattgtgccactgcactccagcctgggtgacagagggaaactccgtctcaaaataaataaataaataaataaatattaaatattgtttaatctagaaaatattaaaaagaagatcaatgagagggagcttgctctgttatagtgccacagagattacagtgtggtacactgaaggaaacattgaaaacagaatttagaaccgaaagtcaaaatcaactaggtccagaactcataagctctaacctaggtacaaagttcttctaggaaacaagttactgaaaaaaaatttcctaaattatattctctgtgcacaaaatgttggcgatgttattaaatgtattgaatgtgataattttgtattttctgcagaaaatcaaccaacctataaccttttctgtagacatatggaaacaatcagaagtctttttttttttttttaagtttgacagtctcatggattcaggagttcagcctacttccacagactgcttgctgagcaacttctggatcgcatataattagaaaaaggataaatataattgaatcaatattgagagaatgggaaatgggtaaggaagatttcatttggttatcatggtccatgagacacagataagaggctgatttaagaattgcatgcatttattgtttccctttcagctgtatgttcaggaagaaattacagtactgaagaatttaacagacttactggctgtaagcagaatgatagtggtcctttcccccctcttcttcagccaaagatgaactccatgaattataagaattttggaacagtcttttcttctacttacataagatgctcaaaaatagacagaatggcatctattaccagttaaaaatgtttctctaacaatactggaaagcaggacatactaaaattcagtagttactggtggagaaagtagtttgtttcatgggaaccgttgcagagatgacaagcctggaggctttgagagcacaggtaattgttatgtgagatttctctaaagattctgctcgcttcagtaccatgaaagatgaaagatgctacaattagtatgcacacaatgaaactgagatgcagatggaaactcagagtttcttttgttaccctgaagaaaattacattgctttattgccgtatttctggattcaagttttaagaatctgttgaaggttttaaatagtttctaacccaatttgtatgtatttacttgtcacttaaaatatatatatatataacatatatatttatgtatttttcactttgttctgctctactcttctctggattggcttcttacttatctttgtttaaatcattgtgttggggtcaactctcccattagggccttgtatgaaaagaccgattgagaaaggctagattctccttggtttgatagttcctaatgttttgatatgtccagccaaccatctgcaactacaaactccctgctgagtaactagcaggaaacaaagaaatggaaaacagcaaagaaatcaccacgtgagcagaagatattttggcaggctagctgaactgagaccagattctcctgggaaatttgtataaaacagaactattcacaatgaatgtgaaattaaaagcatgatgtagtagtgacccaaaaggaatgtgaattctcctccagaacatgcagagacccatggatgaactgtgtttctagatttttcctccagctttcctgagagtaagttaacctctaaaattgtggttattttgcatatagaaatataacataagactataaataggcatgc

SEQ ID NO: 18852 - DNA, 2300 bp, Homo sapien
aattattattttatcctaatattttcaatgggttatagcaaacaaaacaggatttttttttcctgccaagttatcagataattatcgtgagggaatacttttcaatattttgtcagtcttctaggcaatgttttgaaaagttgtacatacttgattgtggaagtgtatgagaaagagaaacagaaaaaagaaaacactgacttggaaatcaggagaacttgtaaccctggttacatataaatctattataattagttagtggaccctccattgactaaatgtgtagtagacagactaatatgaaggagaatctgccagttctggggctatctgttgatttatttattcacctactcatagttgctctatgttgtgagggagcctaatacacacaggctgcattggattctgtgtcagttggctatagtctggcttcagacagtttggacactagaaagcagtggtgggagacagaagagcagaggaccccctacattgggctccagtcacatcacctccttctgctgttcctgaagcccagaagcaacaatagcttgcttctcacttcaccatctttgtgggatgctcatcacccacctaaccatgtcataaggaattgcactctaagaacttaacgtagtcatggttttctggttagaccctgcctgataccaacaggggtgtctcaaagctgactccaactgtttcacaccagaagtctgaaacatcaagaagcaggattagaaatgaagccatccaaagggaagtccattttgtgacaaaagtgtgaagctcagttttggcttcactgaatcagtggtgctgggagtatatgcaagcacaggttttctgtaagccatgggaacaatggggatgaaatatacagtacttgagatgttcgtgacagacacatacctccgtgagttgagtatgaccgactgatcacgtaaacaggtctgctgcacaggatgactcgagggaaggggtgtctgaagggaattctccagaaagtggaaccagaggagtagcagaaagagacagtgattacccttcctctttggaacgatagcagcatgaacctgtctcactgcagaattattttgagacaggcttatgctgctatccttcaaaagaacacatccacccagctactgaggtttccatctctgggtttgctcagaaagacatgctgctcaggcctgaattatgtgttcatcaaaggtcctaacttctgaattattagcttcctaatgccattgtgtttgctcaggatcaaaatggactgaagcccatagctactctattagaaacctgttccccactcccacttccccatggcacacacctttcctccctcattcctatgatgaaaaacagaatttatagacatagccctcaaagtcttaaataaagttaaataattgtggaattattttgagacaggctcatgctgttatcctgtaattatatccatgaggtggtcctagatgctgctagagtgtccacttggcctagcctcaagtggatgctgatttgggggtagtgatttaaagttcctttccctgaagttaagacaagcagcaacaagttttcttcttggttctgtgcttcagaacacatccacccagctactgaggtttccatctctgggtttgctcagaaagacgtgctactcaggcctgaattatatgttcatcagaggtcctaacttctgaattattgtttttttgttgtggtaataatacatgatataaaattgaccattttagctgtttgcaagtgtacagttgagtagtattaagtatattcacattgttgtgaaatgcatctccagaactttgccgtcttgcggaattgaaactcgatgccaattagctttccccctcccccatcccctggaaataaccatcctattatgtttctatgaatattactagtttagaaaccttatataagtggaatatttgtctttttgtaactggtttatttcacttagcatattttccaggttcgtctatgttgtagcatgtgacaggatttccttcttttttttttttttttttttttgagaccgagttttgttcttgttgctcaggctgcagtgcaatggggcgatctctgctcactgcaacctctgcctcccagattcaagcgattctcctgcctcagcctcccaagttgctgggattacagacatttaccaccacacctggctgattttgtatttttagtagagatggggtttcaccatgttggtcaggctggttcagactcctgacctcaagtgatcctttttaagg

SEQ ID NO: 18853 - DNA, 2300 bp, Homo sapien
gtgagggagcagaatggcaaatggaggtgggtaaggctgtgtggatagatggagacaggctcttttggagcctcagaggttgtgttattgactttaaattttattttaaatgcattgagaaagcattgaaagacttatacagagagaagacccagaatataggtagagatatacgtgggtttgtagtgtggaggtgagaagataatggtctttctgattgttcagatttctgcagagaaatctgcaggaagctcataaactgagaatggaagatgaagtgagacagtttgaggatggaggaagaggtcttccttagtcatttcagagaaggagagcattctcatgaaattttgcttttgactactgtgatactccaaggacataattttcttaacaatattatgtattgtcttttaaataagtattaatttacttggtttagttctcaatgtggttttccaaagtatctattcatatttttttgccttagatcttttcagtgatctggataagtgttctgaccagggagtgacaggttatgacatttccatgtcaactctaaatgaagtctttatgaaactggaaggacagtcaactatcgaacaaggtaaagccatttgtataattcacagaaaaccaattcccaaatgatcatgtgtcaatttagtatttataatttcttatgggtgattcacactaagaaatgtgatttcattccaaatttggctctgctgtttgagatgggctgtcattatttcttagcgtcattactaagactgatcacagatcccttcatggcatctaccaagtttccttttggaaactatttcctatcctcagatgttccctgcttcttagataccttcaggctgtgaaaggctcttaattaggggaatgaggtctgaatatattttttaaaaataaaaattgctgttagcttgttaatatacaaaattccactaaagtcttagtggggagaattctcagtatccactcttgtatattttaatgggtgataataatcattgtcattatggagctcctcttatgccagacacttagattaatgtatggctatacattgatatatatgccttcaacattatctttcctataataacctttccaagaagtgtcattggcactggtttacaaatgagaaaatcagacctatgagcagttaagtgattttccccaatcacagatgtaagatacatgtacagatctggtagttcagagctgatgatctttcccctatactactaaatgattgataccttagtagtagatatttaggtgtaatgattggctatttttatgcagaagattttttaaaaatccctcagaggaatgatactcttgggaatttctttgcttttcaaagattgggcacaatgagatcaccatttttgtgaattattcttttggtatgaattcagtgtattttctcactgagtatagaatatggacatcataacatgtttcttatattgtttgcactgtaaccacaagcaatctaaaactttgttttatttaaaattttaattttttatcaccattggcaattataaaacttcactatagaaagaaaatatagatggcagtggtgaagtataaacaataaatattgaaaaatattgtctaaataattcctttgaattggttataaaaataaaaacaaatgtaaaactttttttttttttttttttcgagatggagtcttgctctgtctcctaggctggagtgcagtggtgcaatctcggctcacagcaacctccccctcccaggttcaagcgattctcctacctcagcctcctgaggagctcagattacaggcacctgccaccacgcccagctaagttttgtatttttagtagagacagggtttagccatgttggccaggttggtcttgaaatcctgacctcaggtgatccacccaccttggtctcccagagtactgggattacaggcataagccaccatgcctggccatgtaatactatttttaatattactaaggaaaatctgtgatgcctccaggatggcattaatattataatatgtgtgtttgtgtatgtgtgtgtttatagatttcgaacaagtggagatgataagagactcagaaagcctcaatgaaatggagctggctcactcttccttctctgaaatgcagacagctgtgagtgacatgggcctctggagaatgcaagtctttgccatggcacggctccgtttcttaaagttaaaacgtcaaactaaagtgttattgaccctgtgagtaggagagtactgtggtttt

SEQ ID NO: 18854 - DNA, 2300 bp, Homo sapien
gtgagagttaaatggattgtgcaaggtcacacagctagtacatggcagagccagaatttggacacaagtttggctccagagtgtttacactaactcctgtaatacatctctggacaggttattatactgggagaataaattcagatccttctcctgtctcttgtacctgatacatgctctacatactttgtggtttcattttctatgggcgatctatctatctatctatctatctatctatctatctatctatctatctatctactatctgtctgtctgtcttccagaaattgggcagagaatacagctttgctctcccctgaggttgtaggtgaaattttcctagtctgtttttagcaccggacagtcctataaaccctctggattcctgcaggaatatgaactccagcttaccaacctttcaaggaccaagttcaggccagagggtcattaaaacacctgaggcttggttttcagtccagtatatccttgaactgatggagtgtctgaaatgccactcacaacttaagggaaactttaaattccttttcagttttaacacctggaaacatgtctttctgtctttttttgtttcttccattgttgtttacattcttcatcttttttcttccttttttgaatttgactatatattggaaattcaatttggggatatattttacccaccacttccatgcccttctagctggaggctgggcactttagtatattagatcaccatttgtggggaaattgtcacattacgtaaggaaaacagcctcccaaaatgaaaataagtaagaggaaacaggtcaagaaaaaggaaaagaaagcatacacaagaaacaatggtaagaaatgaaactaataaatatatttaatctaaataattatcattgatattgtagctgtgaattttaatacaattataagaatggcagaatgaaaatgattcctaaaataaagtataaagggtctaaaacaatgataacaacaaaaaaattcataaaagccttaactgtattccaggtggtttaaaagtaactttgagttttgttatattactattacaaaatgttaagtgtttatgacctcccttcccacaccccatgagaactttagaacacctttattaacggtgtttgtgccaattttcaatgtaaaaaaagtggcatttcactgttgactatttttaaaaacagaagtaattgccaaggagagaaattttatatatatatatatacacacacacacacacacacacacattatatatatacacatatgtatacattatatatatatacattttatatatatacacacaggcacacacatatacacataatagtatcatggctgtagttgtcattgttgtttaaattatctgctttgctccagaaagtttctcagctttatgattattaacatctgtggattgggagccgtgtcaaatatttgagatttcccaattcatggactttgatttcctgttttgccattcactgtggcaggtcaagaaaagtttgcaactctttacagagcagagagagacagactatgctatatgaattaaacatgtttcagtttgttgtagtcttcgtgcacaaaaatttatctgaatctttttatatgttttgtagacctgggcaaaccactggcttattttgttcataagtattatgaaatcctgtatccactgtgaagagggtgggagcaacaaatttgttaaaaattcttcatttgtctgtcctaggagtttctccaaggcgtactatggattgcttagctttattaggaaaaaaaatcagctccagaatactctgctaacttagtctgaattagttaaatatacaactaactggcagttgtgtttattcatcagtagtgaaaagaaaatagatacagatttcttatacaaatttaactgctttgtttggttagttattgtttttactctttcttgttcctgcctccatcttggtctcatcatttctgaagaactagttccattttccttgtttaccgttttcccccttatccctgtagttgaaaggctaagtgaacaaacacagagtttattttattcccaaccaaccacggaacagtcatttccttgcagaataattggcttagggagaaagagacacagaaaacaaaacaagttcatcatgtacagcttggtctggctacaccccttttcagaaaccaggctgtgtaagagctgctggagtaggcacccatttaaagaaaaaatgaagaagcagcaataaagaagttgtaatcgttacctagacaaac

SEQ ID NO: 18855 - DNA, 2300 bp, Homo sapien
cacatatggaatatatatacatggaatatatatacatggaatatatatatacggaatatatatatacggaatataaatacacggaatatatatacggaatatatatatacggaatatatatatacggaatatatatatacggaatatatatatacggaatatatatatatacggaatatatatatacggaatatatatatacggaatatatatatacggaatatatatatatggaatatatatatggaatatataatatggaatatatatatggaatatataatatggaatatatatatggaatatataatatggaatatatatatatggaatatatatatatatatatggaaaaatgttgcatgtgtatctttggcagggttctctagagggactgaacttctgcagcattgtttctaacaggaaaactgagaaacaacctgtatatctttcaatttattctcaactaaaaagttttggtacatccaaacactgaaatactacatacacactacaaaaaaaaaaaactgacttaaactgacataggtatacaataaacaaggaaggtgtgatgttcgtagtatgatgttaagtaattatataatagtagatataatattatcctgtgtgtatatgatagaaaaatgtattagctaagaaagagtattttccagtttagattgtataaatactataatttttatggcaaaacatataagattttaaaaattatattttttaaagttaaatgaatggaattctccactttgacaatttttaagtgtacaattcagtgacattaattgcattcacaaaattgtgcaaccagcaccactgtctagttctcaaatttttcatcaacccaaacaggaattctgtaaccattaagtgataactcccactctctcctccccctagccgctagtaatttttaatttctttctgcctcagggaatgtgcctaatttattaatagatattccatatgaatgtaagcatacaatatttttccttctgtgtctgatttcaagcaaattttgttttattatatttttgccacaataaaaaaaattaaatggattgagacactgagaatttatgggcaataactctatattcattttatttgcaacagttgtttttttttttttttgcccaatctaacacaatcctgctaaattttctgattcatttgcttctgtattcatccaatcaatgtttcatattgctctgctgcaaaatctgcttgttggaagcatgtgaaagtcagcaactgcatgtcagctctgcttccatcaggcctatcttcttaccgctgcttctgactttagggtggtttctgtggcagtggtcctcctgtcacttttggaacaagacacattttgcattgaagttgttgcttgcctgacgtcctatcttcccaggtgtttcacaggacacttttaggctgactttttcagttgggattctgaaaccacaggttgtacaagaagcgtggtgccaatatctgcatccagtgaggcctcacactgcttctacttggcagaggtgaagtggagccagcatgtgcaaagatcacatggtgagagaggcagagagagggagaagatgccaggctctttttaactaccagttcccctgggaactaacagagtgagcactcactcataattgcaaggacagcaccaagcaattcatgagggatacatccctatgacccaaacacctcccactgggccccacctccaacattgggaatcaagtttcaacatgagattcacagggtcaaatatccaaatgatagcagatggatagtgacttttttttacaggtcagagaataaagttatatggatcttacagaagagagagaaccatcagttgatatcttaaccacttaccttaagactctaatgaacaaaacataagaaaagtccatcaaagttttatttctaagaaataaacttgcatataacccgaacgtaacaactctggtattacatcaatacagctataacattaatgcagcaattatataacacaaaagtgctataatgacatgggaaatgttcatgaactgtgaggtgaaaagatacagaaaatgactatgcctactgatactacctttgaaaaaggatccataaaaaatacattgaatataagttggctaaagaaaatattaactgcggtactttcttacagattatggctatcttcttccatataacttcaatatgtactaaaattcacatgcatttattttataatcagaatgtcattataattaaatgttatgctgtgc

SEQ ID NO: 18856 - DNA, 2300 bp, Homo sapien
ctgcaggagtggtatgtgacatgtgaaggaaattttattttaaatattgatgacatctttctattattcctatcagtaaatcaaatatctttttaaaaaatagatgaaagaatttataaaatttctcttgcgtattcaaaaaatattgtagcttaatggccacttttatctcctttagtagaagggggattggagcaaaaaccaaaggtgaatctgacattcattgtcttgtgcaggtggtgttacaaggcagcagagcatcagtaaggcaacagcatgacaacagcctcaagttcttggggtactgccctcaggagaactcactgtggcccaagcttacaatgaaagagcacttggagttgtatgcagctgtgaaaggactgggcaaagaagatgctgctctcagtatttcacggtacagagagaagtctcacaatttgtagcaggaggaaggggaaaatatgtcatttcttcattatatattaaaaggaaattataaacaatgtctttaaattttcatgcaaataaaatgattcaaatacctgaataagaaccaaatcataagatttagcatttatgaaaacgttaaggaagcttaaatttactatctagaataatagtgcttagagtttcctacagttgttttagataggtccatttgccatatacttcatgtataatcacactgttttttgtcagattggtggaagctcttaagctccaggaacaacttaaggctcctgtgaaaactctatcagagggaataaagagaaaggtatgggccaggctcggggtttccctgtgcacccatggctgggtgccgacgggctgttccttgcattgcagctgtgctttgtgctgagcatcctggggaacccatcagtggtgcttctagatgagccgttcaccgggatggaccccgaggggcagcagcaaatgtggtaaggagagtgaatattaagtgtcagagtcaagagaatacctctaggatattttgtttttgtttttgttttgtttctttgttacattttgctccattaacctttgatgtgcacatcttctattatgtaattcagtgaaacctaatatagcattcaaaattcctgcaggagggaaaaaatagatattttaagacccaaataaactcttgattatatttgtttggatttctctttcttattcctcttccccctgtctttttatttttccatttcatttttcagttattgaaagtcatatagtatgatgtttctgtattttttactccaactttcctacttttcttccccaatagtgcattattttaaccaatactcttcttttttatgaagcctattaatatggtactatcattaggcaatataacacaatttctattctttttctctatggcaaagattttctcttgtagcctatttatttatttatttatttatttatttacttaattgtattacttgacacagggtctttctccatcacccaggctggaatgcggtggtgcaatcacagctcactgcagcctcgacctcctgggcttaagtgatccactcatctcagcctcccaagcagctgggaccacaggcatgtgccaccatgcctggctaatttttaaatttttttgtggagatggggtttcaccatgttgcacaggtttcttgcatcctaacataacattttctctttagatttcctgcttttttctatttatctatttccccaaattactttctaaatgcaaacaatcccttactttatctttaggcagatacttcaggctaccgttaaaaacaaggagaggggcaccctcttgaccacccattacatgtcagaggctgaggctgtgtgtgaccgtatggccatgatggtgtcaggaacgctaaggtgggtgcctgtcctgaccagcatgggactagcatgttcttatagagagagtttcagtttgctatgaacagctgatgctctacagctccctaacctgtaattaaacaccttcctctacagtgagaaccgaggaagaaattaagagacaagtattttttctttatttcccctgaactaggtgtattggttccattcaacatctgaaaaacaagtttggtagagattatttactagaaataaaaatgaaagaacctacccaggtggaagctctccacacagagattttgaagcttttcccacaggctgcttggcaggaaaggtaaaggatgttttcggtttgagtgacaagtatgagtgttttccagtattagcatcaattagttttgtgctagtctaaaccggaagagaaaggcaga

SEQ ID NO: 18857 - DNA, 2300 bp, Homo sapien
ttagatatagactaacctttgtattttaagtttttccaaaaaagggcatttagttatctcaatgccatttatgaatactccattttatgtcttccaacatgaaatgacatctttatcagtattaaatttgcttatatctatggactgattgtgttgatattctccccattgatccatttgtttacatcagtgtcaggactacattgttttaattatggtagctttatatattttgatcaattcaaaatgatacatatgtcctatcatcctaatttttcaaaacttttctattttcctactcaattttattgatgaaaattagaatgcagtcaagtgccagaaactggtatgtggacttttatggacattattgttaatgtttattttgctagagcagtatttgtgagttgaaaatatttatgtttaaaggtttatctgcatttaaggtttattttatatactttagtattttattttatatttttactttatttcccttttgtgtatattcagttacatttatttatgtatttatttatttgccataaaattttgttcccattgcacgttctagctaggtttctatacaaaaatataaaattcttgtacaattatcttatatcagtttaccttactgaattttcttatttccaatttttttttcagattcttatcttgcattttccggtgaaacaaccatgttatgaaataattatatttttattttgaaaatatatactgcattatatattcttgctttatgacattggcttgaatctctaaaaatcatccactaacactaacactgttgcaagaaggcgtccttacattgtttctgattttactgagaattttcttagtgcttaaccattatcatcatagtaacttttaaaaatataaactatttatcttactaaatccctcaattcctgagttactgagagcttttgtcttttgtttgtttctagtatttatcaagaatgaatctggaatcttctcaaagcctgtgagcctctgttaagaatgattaatttattttaaataaaaccattaaaaattaataaattttattttatattctgtaatgtttaagaaatccccccctccctaaggtcaagaagatattattttatattattttctaaaatatttatatttccctttcacatttatgtcttcaatcatctaaaattcattttttttttcctgtggacttgttttatttctatctttaaggatgtccagttgtcccagcagttgagacaactgttttgaaaagtctgtgcctttcccattgatattcagagctacttctattcatatatcagttgcctatatatgtagagtctgtttctgggataactattacattttgtttgcttctgtcaagttcacagggacactaccagtctggtaccatgttaaaccatgtcctaggcttgaggttttgttttgaccatccagcgatgtgaatttgggctccaagtctgtgtaaaagctggcttgtatttccaccttcactttctccttccatgatgagcactcaaggcaatgatgttagcaatatcctgagggttcttttcacccctcactaaaaatataaccctttgaggtccatcctttattagagaaagagtgacctatctaccccttacttggggaagactctctgcttcaacagtttcttctgtcttctgctcctggacatggcatgaaaacggaagtttgagtatttcaaggataaagaataactctaggacaagagttgctttggggctaaacctatctcctgtattcatttagatttggctttaaaagcccatactattttattagctcttctatgctttttaaaagtttttaaaaaaattaatgtgggctttttaattctttctcagtgggagggtgagtttgaataaacctttcttccacatgagaagtattttacaagttgcttgtcaaatttaaaagaaaatgatcaaatcttcaagaaaatgatcaaatcttctgtgacaaaaaaatggacaaatattcaccattgagtgtgaatgccatggtgatgctaattctgattatttttcttttcttttagccataccttcagagtgttattttcctttttgtcataaggtgtctggaaatgaagtatggaaatgaaataatgaataaagacccagttttcaggttgggaaaatattaattgagatctgaatataatctaaatatttagtctttttaaatttataatttcatttatttatttgtttttgtttttgaaaatagaaacagggtttcaggtt

SEQ ID NO: 18858 - DNA, 2300 bp, Homo sapien
taattaggtatgtgaaattacatttctttaatttaaagtaaaattcagaaggttttagttattataattaaaggaagactgtgtgtagaatcttacgtaatagtctgattctttgactctgtggctagaatgacagttatctatggaggtggtagaattaagccataccttttccttcatcactcttggaacatataaattttttgtcatcttccttgcaaagggcacatttaattttgttcttgaataaaatattttattgggtatttgtttttattggtaaactttagtgaatctcttctataaaattgtaagtagatcagtgtgtagatttatttagtaacttacctcattgactttggaacatggtaggatatgaataaactctttcaagggttaaattaagaattgtaagtgcagtgcgcctatttctttttaataagaaccagaatttcatttttgatagagttaaaggcatggctaatattttcttagaaatacttccttgtacaacccatgtattggctcaaggtataaaatagtgtaaataatgctagttgacattacatttcaaccaaatgaaagtattaacttcataaaacaaatatattgagagtgtgattattgtattagacaacaacaacagcaatgacagaaggatttggtactgaattactttaaataagcaaaacctttcagtggcattattcattctttaatgtaggcaaaatttaatgaacttttagctttattgtgtaataagacatctgtgattttaggctctagcagtggatttaaaagtgttctttctcggtacaaagtacgtggctgatattttcccccattgctgggggcagttgctatacactttcctaaagtatatataatgttcacataaatacccagggacctcttttttgggatgtgcttttgtaattatgtgtaaccttgaatacttaagtttagtaaaagcaacaaaattatatctatagtttactaaggcagtcacgaaaaagcatagttttttttagaacctgaccatcctaagaaagttatgtcatctgaagatagagcatgactaatgaagaaaattacctgcttttgcacgtagatttggtaactttcactttacatttgtgaatgtgtaattggtgcaaagtaaattttttttcctgcaaagtgaaagttgagtagtcacaatcatgttatttattttgttcatttagttactttgcttttaatgtatatgaatacatgctcttgtaaacaattttaaaagacattcaaatttttttttagtttttatatactcagaatatattttggttgttaaattaaattatgttccctttttcacagtaacaaaatctgactcaggagaaatataacttaattcttaggaaaacaagggtaagtgagctggaaagcaaaggaggcaaaaagtgaaatatatttatttacagtgtacagttcatgtttatgaacatactaattttaaaatgtcttaaattactgatctcaaaacttttttctatgtcagtacagataaataaataaatatacatattaggcaaaagcaacatcaccaaccttatatttcccattcatggtcaaattttcaaaggaaagtaaaagctgagctttactgagtgagtgtttactgactaataaggcaagaaaaaacatgatgagtgtactttacatcttacttttgtgggctcttaatttttttctctagtttgttttcagtaaagacagtgggttttctttaaaataatttttttcttttaaatttgcacaaattatcttaggtcagtattttggttttaatcattaaaacatttttagagtaatgtaatttaacaaatattttaagtgattatgtttccagaaatggattctttggagagaactcggatgactatcagttttggccctgtaagatcgtggagatctgtaagatagatacttatataacttacataaaatatatataatatattacttatataacttatataactagctattattttatataactaactataatatgacaaatcctttgctagtagtactaacaacgttttataggagcacaattaattttacttaggataagtgttgttattattgtttttattgttgttctgttagttactcaaaacttcattctaattgtgccctgagtttgttaaaataccatactgtatttttgtgtaacatgtaaataggcattaatttttgagaaatagaaatgtttatccttaatgtatttttaatttgctaacattgatttt

SEQ ID NO: 18859 - DNA, 2300 bp, Homo sapien
agtgaattaacaaaggaacagaaaaccaactattgcatgttcccacttataaatgggagctaaattgggtaaacatggacataaaaatggcaacagtagacactgggcactactagacgggggcaggaggaaggggagcaagggttgaaaaactaactgttaggtactgtgtccagtacctaggtgacagaatgaattataccccaaacctcagcatcatgcagtatacccatgtaacacacctgcacatgtatcccctgattctaaagtaaaactagaaattacttaaaataaaatatagcttaaaatatcaaagaagagactgatttgcattcatgttcacatgtaaatgactgacagcaggccctttcattgattactttattaggaaaaagggaaaacagagttacatgaggttgatgctgaaagtaaatttaccgattttgtcagagatcataatgaccttatatattagtttctgccatataaaataataatgtttttcttacacattaaaaaataaagtgctgtatattaaaatagtagctaatatttgagagagagaacgttgtagctagctatacttgctttttataataatgagagatagtattttacttggtacaaaaaactacaagtagtgttcagtttaaatgatttatttaggattatattaataatttcatattttaatatggctagtatttcatgtcatgtgtattgcaagctattcatatttttatagaaacatatttctgatttacaggttttttgccttattggttatgttccatcagttattctgttcacttatattgcttctttcacctttaagaaaattttaaataccaaagaattttggtcatttatctattctgtggtaagtcacattttacattatttcaactttccatagcagtttaattaacatgaattctttcctgattatactaaaaatgttacatgtcttttgtaagtgaataatttagataggtaattggcagcttctttttgtgtgtacatttgtcttctgaatcatcctttccacgtaggaacaatatggaagagatttagcaactagtgtatcaaggatactagctacaaacaagtggtattcttgttgcttgctggctaaatatcatctcttgttccatgttttattagaggattgaaaaaatagtttaatgcgtagacaccaatttgtaagaagtttctaaacactttgtcacttttatttatttatttttttctttaggcagcgttggcttgtattgcaatcactgaaataactttctttatgggatacacaattgcaactattcttcattatgccttttgtatcatcattccaatctatccacttctaggttgcctgatttctttcataaaggtaattctgctaaatattttaatatgttaaaaaacataaaataaatatggtctaatttggggatgttagttcttgtatagaaaacagtaaaatgcattgggctaatggctactacttgatttagatattattaatgcagcataaattattgtgagctcttgtcaaactgtaaattctcaaaggaaaagggctatgttcattacaggttctctcatgctcaaaatgatgtatataattagaagtgtgacatggtttcagtcagtatttgtttttaggagtttatcagtgattaaataacgtatttcactataaagggatgagaaagaataaagtgtaagagattttctccaagaaaaaatagagacaaaaaccagattgattttattaaggctggataattgaaagaaatttccatgtgattagaaaaaatattgttatgaattcttggtttggaattgctaattaattctacttactaatcctactacccctgcttccctttttaggtctcagttcaatgtgtttaatttatactgatcctcagaaatattttgggacagggaagattttaagtaaaaaacataacttactaatatgaacagctaacttattatagaaagtacacgtttgctaaacaaaatacattttttcattttaatccaaatatttctacatattgcagcgtatatattttcaaatctttttgtcttagatttcttggaagaatgtacgaaaaaatgtggacacctataatccatgggataggctttcagtagctgttatatcggtaagaaataaagtgtttttgtgaattagcatgtaccttaagaatggtttggtcctatggttttaactatgtttagttttttatcctgttgcatgaaaaagaaggtgcataaaaagttaagca

SEQ ID NO: 18860 - DNA, 2300 bp, Homo sapien
agaaatttagttttttaaaaaattatatgcttgtttaaaatattaaaatatctgtacattccaaaccagattgtctttatctgtcattgagtattatttctgtgagttgttgaagcagtttttctgtatgagaattagctttgttggtgagaaaagcttggtacatatcaataatatatccgcttatatacagtatgtaataagtgtcttttttttaattgtaggactatgtttttgcagctgttttcaacagtactatggtttattctttacctatattagtgaatatcattagtaactactatctttatcatttaaatgtgactgaaaccatccagatctggagtaccccattctttcaagtaagccaatgtatatacagataaatttccatatgcatgtcatatatataataaccattaaaaactaagcaaaaataacaaaatatgtagaaatttatcttgtgagatctcttagacttcttaaaactcaagtgagaaacggtttacattaaggtttaggattccccagtagaagtatgtttcagggtaaaggagattctgttttggtattaatatttgtataaggaataagtgtgttctatattgatcatagaataaaatataagataatttttaaatgaatattttttacctaaaatccaggtattgggtattgaaaaaaacttgagaagtcacccaggcaaccatttttcctctagatagaactgttggattgtacatatcagaatcaagattacagaaaagtatccaacatattttctcttaatccttttgattttcatatgctaaaaaataaatggacaaatatctgtaacaatattttctatcttcttcttttcatacttttaaaaacagcttcattgaaatataatgcccaatcaacctgaccattattcaaagtatacacttcggtgtcttttattatgcttatagagttgtgcagtcatcactacagtcagttttaaatatgccatcacccccctccaaaaaaaataacccttatactcattagtaatcactcatttcctctcatacccactcccaaccctaggcaaccactaatgtactttctgtttctatggatttccttattttagacattttatataaatggaatcatacagtatgtagtcttttttgtctgctttcttgtacttagcatactgctttgaagattcatctgttttgtaacacgtatcagtgcttcatttatttttactaccaaatcatatttcattgtgtggaatgtatggaatgtttatgtgaaatactgcattctacttatctgttcatcagttgatggcatttgggttatttccaccttttggctattatgagtaatgcttatgaatatttgagtagaagattttgtatgagcatatgtttttatttctcttggatatataattaggagtggaattgctagatcatctagtaactctatgtttaacacttgaagaactgccaaactgctttccaaaatggttgcatcattttccatttccagcagcagtgtctgtggagaggtatctcatattatgaaatatttcaaacgtacagaaaacgaaccacctactatccaaatatttcaaatgttaatattgcataatatttgtttttagtaaaacttttaagacacaggtgaaaactcatgttacccctctccaatcttgtttccttctctcctccgtaggagtaaccgcaattcacaatttcacaatttgtaattcccatacgtgtttttttgatgttactacatatgtctgtatccataactattacacaagattttacaacttacaattttcaacaacactgacatataatcatactatatttcgaaagaaatacatgggagtttttgaagctaactattcatatatagtcgtattaatatttcaaatttgtttcttcattagattctgtatgattggatccaactgtagtctcattcatttccacttcttgcactactagtctacatatttgtgggttctttctgagcctccactgtcatattacgagagtttcagacaaattctgcaatgtcatatgacctgaactttggaattgacttaattgctaaataggaaaactcagaaggctaggtttcagcaagacagtgatgtactctgtctctatgtcatcccatggaggggtgtgccagtgcgagggtatctgctaggcactgcggattctattccagtgcagagtaccttctctgtcccacgggtctgtattcttatagaacaaggggaggaaactgaccttggtgag

SEQ ID NO: 18861 - DNA, 2300 bp, Homo sapien
ctctgtcatagaaacagagaaacaactgatgtaccactttacacagggcatcaaaactgacaggtgcatgcatgcagctaggatgatctcctattgatccccaccatcctgccacattcccccttgctgttgcagctggggaatgattctggatcctggctttatgttcattagtcttcctctcagccaccaccaccatgttcttttttatattaaaaatagtcttgaaacaaattgcttcccttgaactactataaaaccatatattcttctccaaaaaagcaagtgttacatctacaaatttaattgttaaggataatagcaatatacttaatgttttgtttttagtttgtttgtctgactgttgttatacttttgtcttgtgtattacaggcagtcttttagaattaaacctgggaaaatattcacatgtcaaatttataattttaaaaatttatgtgaactcaattatgaatgaaaaaatctgatctaatatatttctgattgaaaataataatttgaaatggggcagttttttagtgtccacatgcctgtttaatatttagtttttctgaggattccctgcccttcttcacctcttttcacacagatactgctgctagatgaaccaacagctggaatggacccctgttctcgacatattgtatggaatcttttaaaatacagaaaagccaatcgggtgacagtgttcagtactcatttcatggatgaagctgacattcttgcaggtgagatttttgttttattttcgaaggctgagatcatgggccaaaaggaagatggatatagagatgctaattcctgaggtataaatagagaagcttttacctagtggtatgtttccttcacaaaaaaagttctaaaaaattttaaaatgatacatttttgtgttgagaatctccaagaccatcccaggtttagtgatgtcctagaagaactcatatgactcagcacatagtcatactcatgactatgatttattacagcaaaaggatacaaagctaagttagcaaagggaaaaggtatatgaggcaaagtctcgaggaaaccaggtagaagcttccaagagtcctactcccagtggagtagacagatgtgctttaatttcttcagcattgagttgtaacaacatgtgtgaaatatctacttgggaaagttagtatatactcagtgttcaagattcttattgggtgctgatcacataaacatcttctgcctagcacataccaaagttccagattctcagaaggaaagaagttgtttggcataaaccacattgtttgtacagtttaggcactgagccactcttacctgttttgagaatagtaggaaccctcccaaatccaagttctcaactaacagccaagggccaaccttgtaagcaggcctttctaaggatagaagcctctgacctgctatgttaactcttttctgcacaattttatacacatacatacatataaagaatccaagttgaagtcaacacatgacttttaatagctatgacagatatagaagtttgaaattcttgagcaacttctgtctgcttataatataatctaataaaattgggcaagtcattcatgtcttcagtagtacctttatttttaaaaacccaacaaactaacatttgttcttcttattacttttgttgatttttggagttgtttctacatttggttataaaggaaattgtgaaagtgcttgtattggtaagccttttaggaaaaatatatttggaataacatatggtaagtagactctagagtcagactccttgagtagagttcctggctttgttacttaatagctgtatgaaacatatataaggaatgtattttctttttaccttagtattcatatctgaaaaatagttgatgataatctagtaccatcctcataagactttttgtgatgattaatgatatcataatgtggatgactctcatatgagaaaccataaaatgtaaatgccaattattaatgctgttgatactttagaaattgaaatgtaaatatttatctgcagataggaaagctgtgatatcacaaggaatgctgaaatgtgttggttcttcaatgttcctcaaaagtaaatgggggatcggctaccgcctgaggtatcattcatttttattgacattattctatattatactcttgctatactgttattatgttggaggcttgctgttatatgctttgaccatcatttatggtactaaatttaatttaaagccttcataatttacttttggctgtttattgtataatcatta

SEQ ID NO: 18862 - DNA, 2300 bp, Homo sapien
ataacacttgttctgagccagcaaacagaaagctattacaaagaattagacagaatttggagtaaatgttttagcacacataaaagtttgtttcatctggaggatgcttgcctgccttattcctgccttctcttgctctcatctcctctaccccctcccacttccacacatacattaagagccatcacagtgatctcttattccttccctaccacccaagaaggcacaaaattaaaacctttccctcaagaatcttgttacctgttgttttcataattatatatgagtatatgtcaaaggcagttccatgctaaaggatcatttttaaagttgatattaaaattatttaaaaacctatgttacttaaatatctaacacattaaaacttaaaatatttaaaaagtaatattgataattatataaatggtatgatttttaaaataacattgttcatgctttacttttacaggtgcagaaggttttactagatttagacatgcagactatcaaagataaccaagctaaaaaattaagtggtggtcaaaaaagaaagctgtcattaggaattgctgttcttgggaacccaaaggtaaataaatattacttttacagatgagctcattttaaattatgtcgaattaaaaagcaggttgtagaaagatataatacattatgtaaaggttaagtgtacataaaatgctgtatgttattatggatataatcatagtaatgagattttaaaagtgaagtcagaaagatgtataactttttttaattttagtagctgtcaaggtactaaaggtttttggttacatggatgaattatatagtggtaaattctgaggttttagtgcacccatctcctgagtactgtacatggtactcaatatgtagttttttttattcctcacccccttccaccctttcctttctgagttataacatctttatgataactggttacttttaggaaggagaatggaagaatagactttagttatgactgccatgttttctttctttctttctttctttctttctttcttctttttttttttaatttgtagagacgagaccttgctatgttgcccaggctggtcttgaactggcctcaagcgatcctcccgcctttgccttccaaagtgttgggattacaggcatgagccaccacgcctggcctccatgttttatttctttaaaaaatgatctgaagaaaatgtggccaaaaaataacattgctgaattggaatggtagctataatagtattactctcttgttctctatagtttaaaaaatatttgttatagttaataacaaaagttaagaaatagaacaaaatcaaaggagtgattcagtttatcactgtcctgctttgattttgtatgtatttgttttatgctgttctctgtcatagaaacagagaaacaactgatgtaccactttacacagggcatcaaaactgacaggtgcatgcatgcagctaggatgatctcctattgatccccaccatcctgccacattcccccttgctgttgcagctggggaatgattctggatcctggctttatgttcattagtcttcctctcagccaccaccaccatgttcttttttatattaaaaatagtcttgaaacaaattgcttcccttgaactactataaaaccatatattcttctccaaaaaagcaagtgttacatctacaaatttaattgttaaggataatagcaatatacttaatgttttgtttttagtttgtttgtctgactgttgttatacttttgtcttgtgtattacaggcagtcttttagaattaaacctgggaaaatattcacatgtcaaatttataattttaaaaatttatgtgaactcaattatgaatgaaaaaatctgatctaatatatttctgattgaaaataataatttgaaatggggcagttttttagtgtccacatgcctgtttaatatttagtttttctgaggattccctgcccttcttcacctcttttcacacagatactgctgctagatgaaccaacagctggaatggacccctgttctcgacatattgtatggaatcttttaaaatacagaaaagccaatcgggtgacagtgttcagtactcatttcatggatgaagctgacattcttgcaggtgagatttttgttttattttcgaaggctgagatcatgggccaaaaggaagatggatatagagatgctaattcctgaggtataaatagagaagcttttacctagtggtatgtttccttcacaaaaaaagttctaaaaaattttaaaa

SEQ ID NO: 18863 - DNA, 2300 bp, Homo sapien
tttttctttgagacagggcctcactttgtcacccaggttggggtgcagtggaacaatctgggctcactgcaacctcctcctactgggttcaagcgattcttttgcctccccagtagctgggattacaggcgcccaccaccacacctggctaatttttgtatttttagtagagatggggttttaccatgttggccaggctggtcttgaactcctgacctcaggtgatctgtctgccttggcctcccaaagtgttgggattatgggcgtaagccagtgtgcccagactgtctcacagttttctgaagcactgttaattttttaaaaatcttttttctctctgttgttcagattggataatgcctattgataatcttcaagtttcctgactttttttctgttgtgttcattctgattttgagccactccatgagttttatttattattgtgtttttctgttctaaagtttccatttgtatttatttcttattgtgtttttgtgttctaaaatttccatttgattctgcttaatgtcttgtttctttgctaagattttctatttttcattgctttcaagagtactttcgattgtttgctgaagcccttaaatagctgctttaaaagttttatcagataatttcaaagtctgtgttatttcagcattggtatctttgattttattttcttagtagagttgctatttttttttttttttgaggcggatccttgctctgtcacccaggctggtgtgaagcggtgcaatcttggctcactgcaacctccgcctcccgggttcaagcagatctcctgcctcagcctcctgagtagctgggattacaggtgtgtgccaccacacccagctaatttttatatttttagtagagacagggtttcaccatgttggtcaggctggtctcaaactcctgacttcgtgatctgcccaccttggcctcccaaagtgctgggattacaggcgtgagccaccgcacccggtcagctattttctacatgcttcatttgcagtgtaatattggattgtatgagactttgggttttgtgttaatacctacagaaaatgttgatattttctcttagcaggctgtcaaccaggttaggttcaggtcataagtttctacccacattctttgaactgtagttgtcattttagtttatttttcaaaaacttttgcagtacctttttggtctgtcttgtgtgtgccttgcagtgaacagtctggatttggacagtggtctgtctgttagttcagtttctcaagcctttgtcacactaataggattggatttatgtatgtccagcttgggaattattacaggaattaaaaacaactttttagagtgctttcctgagctctctttctatttgttcccccttctactttttgcttccctgtggctgctgtttctatcctccagccagagagctagtgtttattttctccattgtgttacacacttgtgcagctgcaaccaccatatccagggcccaatggtaggaggtagagaagaaaagcaaaagggattggcctcatcctcttacaacgatagttccattgaatagagagaaaggttttcctgcctcagagtgttggctgcactaggcttttgttactgtagtctggccctgttaccatgggattgcttgcatgtggggatacaggagaattcagaaaagaaaaaaagatttgctatttctacattctccctgagcattaagacttcccttgcccattcctcaattcaaagctaaggcttcttctggagctgcctctgtgggcggttcgggagataccaaaggagaaaaagtaccactgttgatatggtggtatttcaaattctggtctaccctatttcacatgccttgtttacttttcagagctgacagattgctgctccatgcattctgtccagtttcctaagagagacagcttggagtatgcttaatccatcttacctgggactgaaacagctgcttattttgccgttaaaaattacatgcagtttactgcgtggctccgggtttgtttgtttgtttttcctctttaataggtttattcagaaaacatgtccactgcaattagggaggtaggagtttggagacagaccagaacacttctactgaagaattacttaattaaatgcagaaccaaaaagagtagtgttcaggtaagttaaataactctttcttatgcttttttgcagtttattttgcttgatatattctatcttgaagtgatgatttattttgctaaatatatttttattataattttatttttctttg

SEQ ID NO: 18864 - DNA, 2300 bp, Homo sapien
ctggaagagggatactggacctgtgataggtacaatgatttagatcattcaatgttattttttgaagtaatttattaaggtaaaatttatttccaaggtaaaactccttaccttgtaagcagtttctcctcattctttactctccctggcctctgacaatcaccagttggcattctgtccctacatttatcttttctggaagtttcctataaagggaatcatataacatttgacatttttagtctgactttcacttgacataacgttttgtatgttcattttaattgtagcatatagcagtacttcattcctttttttttttttttttttttttgagacagagtcttgctctgatgcccaggctggaatgcagtggtgcaatctcagctcactgcaacctctgcctcccagatttaagcaattctgcctcggcttcctgagtagctggagttacaggaacgtaccaccatgcccagctaatttttgtatatttttttttagtagagacggggttttgccatgttggccaagctggtctcaaacccctgacctcaagtgatccacccgccttggcttcccaaagtgctgggaatacaggcatgagccactgcacctagccacttcattcctttctatggctgaataataattgtatgtatatgccacagtttgttcatttatctgtcggtaagtatttgggctgtttctacctttctgctattctgaatagcactactgtgaacgtgtgtgaacatgtactcaattgagtccttatgttcatttcttttgggtgtatacctaggagtggaattgtgaggtcatatagtaaaactgtttttctcagcatctgaaccatttgctttcccgccagtaatgtattccactttctccgcagtttcttatgagaagtctgctctcattcaaattgttactctctgtaggtaatacatcattgttctctgactgctttcaagattttttgttgtcttaattttcagcagtctaattataatgtgtataggcatggattttctttatgttttctgggcttcaccaactttcttgaaacttatgtgtttatatcccttgctaaattggaagttttcagccattaagtctttaattttttttttttttttttagcattaatactctttctcctctccttttataaatctgataatatgaaagttagactttttgttattgtcctatagttttcttttttcttctttttttttttctttgagacagggcctcactttgtcacccaggttggggtgcagtggaacaatctgggctcactgcaacctcctcctactgggttcaagcgattcttttgcctccccagtagctgggattacaggcgcccaccaccacacctggctaatttttgtatttttagtagagatggggttttaccatgttggccaggctggtcttgaactcctgacctcaggtgatctgtctgccttggcctcccaaagtgttgggattatgggcgtaagccagtgtgcccagactgtctcacagttttctgaagcactgttaattttttaaaaatcttttttctctctgttgttcagattggataatgcctattgataatcttcaagtttcctgactttttttctgttgtgttcattctgattttgagccactccatgagttttatttattattgtgtttttctgttctaaagtttccatttgtatttatttcttattgtgtttttgtgttctaaaatttccatttgattctgcttaatgtcttgtttctttgctaagattttctatttttcattgctttcaagagtactttcgattgtttgctgaagcccttaaatagctgctttaaaagttttatcagataatttcaaagtctgtgttatttcagcattggtatctttgattttattttcttagtagagttgctatttttttttttttttgaggcggatccttgctctgtcacccaggctggtgtgaagcggtgcaatcttggctcactgcaacctccgcctcccgggttcaagcagatctcctgcctcagcctcctgagtagctgggattacaggtgtgtgccaccacacccagctaatttttatatttttagtagagacagggtttcaccatgttggtcaggctggtctcaaactcctgacttcgtgatctgcccaccttggcctcccaaagtgctgggattacaggcgtgagccaccgcacccggtcagctattttctacatgcttcatttgcagtgtaatattggattgtatgagactttgggttttgtgttaat

SEQ ID NO: 18865 - DNA, 2300 bp, Homo sapien
gatgtgaacaagatggtagtatgtaggcaattgggaggagagtgagatcattttgtccagggtgatgagatttttggagaattgggttttggtcatgtcatttagaaacaagagtaaaagcatgagcagacagaatgaatgacagagaacattacaaggataagaaatgtaagaaataaatgcctagaatagtagtagaaatgagtagacttctgaagttaaggcaggttaaggctactagtgagaagtgttggggtgaaagtatggttcagtaacatgttaaccaagtttatctttcatgtatatttctttacttggccccaaatcctaggccattgagaatttgtaactaaaatgttctagatgtttccaaaagagacagaatatatcagggatagttttcattacatgccttctttagtttcctggtgtagttttttgaatatacttatctccctttcccccatccccattgctagatcttttaatccaggggtccccaatccccaggccagagactgctaccgggatctgtggcctgcgaggaaccaagcagcacagcaggaggtgagcggagggcaagtgagtgcagctttatctgtatttacaggggccccccatggctggcattagggcctgaactccgtttcctgtcagatcagcagtggcattagattgtgataggagcgagaaccctattgtgaactgcgcatgtgagggatttaggttgcgtgctccttatgagaatctaatgcctgatgatctgtcactgtctcccatcacccccagatgagactgtctagttgcaagaaaacaagctcatggctcccactgattctacattatggtgagttgtataattatttcattacatattacagtgtagtaacagtagaaataaagtgcacagtaaatataatgtgcttgaatcatccccaaaccatcctccctcccccagaaaaaactgtcttccatgaaactggtccctggtgcccaaaaggttggggaccgctgttttaatcatcaaggattctgacgaacctctttgaattttctatttaattcatattccataagtaaaacttgattccttgtttgtttgtttttcccctaagaatttagaaagcagagtgcatgttggggagacctggtttaaattcgagaagcagataacacaaagacaagtaaaaaaaaaaaacatgatgtacacaggattgacagaataaaaaaaaagtctttgtgcaagggaatgtgactatacagaaatgtggagaggaaaatacgtaatgttagtgttaataacttttgaccccatttaggtcactttgagtaatgaagctcaaaacactagattatatttttagcaaagtaagtgcagtatccagtctctcacagatgtcatgtgtctcaggccgtttggaaaattcagcatctgccgcattcccagtctttgatgaggacactccgcgaactacaagcaccctcagtgggaggacctcccaggtcggggtgtgagggccaatgaggaggctggggaggggaggcaagagttacggaaacggggccacagcactccagatgccgcggcgggaggaagcggggctgcagaggactcaaaacgcgttcagagaggcccatccaaatgccaggagacagacggcaaggatgcttaagaggagacgtgactgggcgaggcagatgaggagagggccgtgggccaaggtcacccgctaagaggcggcaggtttaccactgagacacgaggccgtggtttttgcccgtgcctccagaaagagcgtggcgagatccccgcagaacccaggcgtgggaggccctggggaagagccacgaggcccgactctagtggctcaggggccctgggcagcggcgcgccaccgctcgccccaccctcagccgctctcctcttccgggcgcgctgcttgcctgcgtgcgccgggacgcgcggggccgagcgtctgaagcgcgcccgtacgcggagcggcgctttctaggagccccgccctcaggtgcgctctgcaggaggcggggcgcgacttcggcgccgccagctctgcctgcgccaggagcgcgcgggtgcgcgcggccgcgccctcgcacagatcccagctgggtcacccgcactgagtcaacagactgagcgcgtccaggcctgacagctctgcggctcgggccctgaggtgaggcgggcgtcgcgggcggcggcggcgcttgaggctagcctgggacagccgtccctgggggagttgaggggacgaggaggggctggccagcgagggacg

SEQ ID NO: 18866 - DNA, 2300 bp, Homo sapien
gacttaggaaaccatgctggtttgagggggtgctgagcttgtgtgtatacgataggagggaagggacaacatggattagcctagaaggacaataaaagagttagaaagtccttgcacctgtgttcacagaccagcaatgccttcctcttaggggcagaagctaatatggagattagattgccttcactaattgtcaagaatgtcagtaaaggggaccaacttaagtaaattaatgttagtctcacaacctattgcatatttaagatttgatttgctggtttgcagctgaaataagacggcttccttccctctaatgcatcccttatgcagatggtcctggcttccagcatcctaaatacaattccaatagttttcattagtaatcatcaaatctagctgaatcttctttcaaagtgcctctttttgcctttcactactgacctaacctatctctagcctctcccagttccaacccaccttgattgctgagggcaaatttactttcttaaaacaatgcttggattaagttacgcccctttgcaagaccctttcacctccccgcaagtacctgcagaataaagtccaaacctctagcccaccttttaaggccctgtggagtcctcacctgtaaatctcccccgccctcaccactcctgcacacaaggcaacaaggtctccttggcagcttctgagtaaggttgtccttatttctgccacagtgctttgtccacacctccttgaattcctcaattcctccctctgtcttaaaagaacatttctgagtctgtctgctccatgaagtataagtccgagctcatttttgcccatgccctgctcactcctctccattccttgcagtgaattgtgctaagcatctctggcttccttgtgaaaaaggtgatgccgttctccatcagggtgctgtgtacccactatgtgtgagcggtacagaatgaatgaacatcccagggccctagaaaggcgcctggcacatcctggacactcaacaagtatcttttaattttaatgaataaattcaagatattcgactgtattcattttccacccactttccccctaggccagggactctcctcccaggtgagaaaaaatcatctagataccttaattttgataaagttagcgttgatgtataaaaagcagaacttcctctgtaaccctgtgagaaatgagaagcctccaatcttcttccccacacctaccccctactgagtttcgggttccttggaaataactgacctggattgtttctgacaaaataaaactttgcatcttctccacagagcaaaggtaaccttacctccagccaacccaatcatccatacatttttcttactagaaaaaatgtttttaaaaatggaggtgtggccgggcgcggtggctcacgcctgtaatcccagcactttgggaggccgaggtgggcggatcataaggtcaggagttcgagaccagcctggctaaatgttgacaccccgtctctactaaaaattagccgggcgtggtggcgcatacctgtaatcccagctacttgggaggctaaggcaggagaattgcttgaacccgggaggcggaggttgcagtgagcagagatcgcgccactgcactccagcctgggcgacagagcgagactccctctcgggaaaaaaacaacaacaacaacaacaaaaaaacccccaaacaaacaaaaaacggaggtgtgagggtaaaacgtctacaggcaagaacagcacaacaggtgctgagctgcaaaatcaacacactaaactcccaaacagaccttctcgacaagccaaaagctctttagctaacctaatattctttagctgttgtttcagaggcttttcgagaacaaaactgccgccccgtcttggccttgccgcttttcacccatcactctactgagtgtgtgtctgacttgtttatctggacgcaatctttgtcgcacccagttatctcgctcagcgaccggggcgaccacgtttccttaaatcagagccccgtggactccgccggagaactacattacccagcggccttcgcgcccttcgcaggaaggacgtctgcgcactaagatactcagttccaagtttggagcttttagctgccagccctggcccatcatgtagctgcagcacagccttccctaacgttgcaactgggggaaaaatcactttccagtctgttttgcaaggtgtgcatttccatcttgattccctgaaagtccatctgctgcatcggtcaagagaaactccacttgcatgaagattgcacgcctgcag

SEQ ID NO: 18867 - DNA, 2300 bp, Homo sapien
gcagctactcgggaggctgagggccatgagaattgcttgaacgtgggaagcagaggtttcggtgagcctagataggaccactgcactccagcctgggtgacaaagtgagactctgtctcaaaaaaaaaaaaaaaaaaaaaaaaaaaggccggccatggtggctcacgcctataatcccagcactttgggaggctgaggcaggtggatcacgaggtcaggagttcaagaccagcctgaccaacatggtgaaaccccatctgtactaaaaaatacaacaattagttgggcgtgatggcgggcacctgtaatcccagctactcaggaggctgaggcaggagaatcacacaaagccgggaggcggaggttgcagtgagctgacattgtgccactgtactccaggctgggtgacagagcaagattccatctcaaaaaaaaaagaaaaaaaaaaagaggttttcagcttttcttctctaaactttctgtaattccagagagatttgtcttcagtgtttggaatctcagtggtatataagagccagtggttttggaagattggaggatggcagagtccctgttcacttttacattgctgttgcaaagccagctttcttcctgcatgcctcttcccctgccctgcttcgttcgttgctttgcatatgatgattgcaatttaataacactgaatgatacttcactgctggttttattgccaactacccttggaacgtaagcctagatgcaagtagtaaggagagggcagccaaggcctctagattgccagttacttggctggaaatcccattcatattgggaaacagatttttaaaataaatttggcactggaaacactgccatccttttgtgaagctgtgtcaataatcataaactctcatagtcgtgcccccaaccctcggccaagctaacaaatatttaggcatcagcatatcttcacgatgccaccttctgttgaccgcgtgggcttctcatgctgtttgggttggcagtggaacataatcttctgttttatgtaatgaggaacatcagaggagtgctttgtgcttaccctctcagagtgtgtgcaagacctctcgtgtaccccatcattttcggtgcagtcaaagctagcgaacatttctgtggcctggtaaatattttctaactattggcaaggctttttaaatttttttttccagtgccattttgctccaggccaggattataatgacccagctttgctttggtttcagatgaattttgcaaatatatgtgtgtggtgggattacactattttcagagaacacagtcatgcgggtaacagggtctgatgcaatatagtgctgcatatgcccaatcaggccgacgaggcttaccctttgcagactgtgccaataagcagtcgaggcttgttgcgatctgcagaaatctacagaattctctgtttccgagaaggcttgttgctagcatatgacatcatagaaagcctttttttttttctgacattttttctgctttgctttagaatatcaaaggcaaagactgttgaacatagttggccacttagctttattattcatagtgctccctcccatgtttttttttttttttttttaacagtgttcaatgttagcgtcaggtgttggctgccttcctgggggaacagattgctgtgaagtaaacacagctggaaactgaccacatattgtttttctttcttttaagaaatcaaagaggcatttatagaaaagctgcagaacatggtactgtccagatttatagatttattcctccaagtctggttaatgattaatgtcacgcctgggtgtccacatagacccacttcccttctcccttcctgaagctgcaatttcctcggaacaatgagcttgcagaggtttgctgcaatccgaacttgaggagggggtggagtctgttcagttctgtttctccttgccgaagtgtggtctttggagctaagtgaagaatgacttctgttaggttttcctctgctggtcttccttgcagcctcgaaaacctcaccagagtcgcctctgctggtctcttactgtgctgctctgtcagagatgggcaagtaagcgaactgcagagtgttgctgtgtgtgcttgtgatttgtattttatttgatgtaaacgtgaaggcagagtattttctaacactgtaattcaactaggttttgtgtctcctggatctatttttttttcttgttgttctgaggagctgatatacttggaaatattaggtttaagatatgcagatgtccaacttatatacatagtcaagg

SEQ ID NO: 18868 - DNA, 2300 bp, Homo sapien
tttgcatttctgagattcagggtctttttcaaggaaggaggctaatgtttaaggcctggaggctgaattcagggagcgtattggcaagtttaggcacttacttgtgtcttaatgtgggaaacagaactttctaagtaatctctggagtttgtagcttagaccaggccttcaaaagtcttttctgttttcctttgctacaatttgcttgttatttctctgccggtcacagatgacctggactgactgaatgcttttgtggtaaggaactgatctggccattttcatataacaaaaatcaaagtcaacaattttgtatcaggctgcctaaatgaaccctattgtttccagttcttaaaaatttaagggctatctaagaaaagtttaagcaaaaccctcattccaaacatgcgaccttataataagaacttcctttaaagatgagcagcaaggttgggtatctgatttcactaagtaatattctattgtggtcagaaatgggtaatttgcatcatttggtcactatcaatatttgtgttggagtctgcaagatatttcaacaaagtaagccaaaccactatcttaggggattgttgctggactttggaatataaggctgaacagtgatgtgaagtcatgtttgggggctggaagaagtgataaatgcaaaggttggtgctaaattaggaaccccttgaaggagcaagctgattaaaaaaaaaagctggcagacaagtatatcttttaatttatttgcagtgttgctatattatagagatgatttcctatgggaaaacccatcaaaaagccaaacctttattgttatttttccttaaaaatactgagctataagaagattcagagagtggcattaatttgggcatcagaacattttcttttgtatccctagtgttattgatttgaaagagttaccttttcagacagatggctgaacaaaagtaaatgattaacgggaaatttgatggttgagaaaaaggaacgatatgcctaaagcattttgagaatatacccctcatccatcagccacctctgggtaaagaaacacaaataccaaagcctgagctccttaaccttttgttccagagggcagacatttttaagaaaggtgaatgttagagaaggttacctgatgagcaagcttctttcccataattcagagaactgtgaatgtacttagaaatacactacaggtcttcaccagatgaactagattttataattttaaaatataatactgaaagctagtttgaagtttcagaagccatgaattatggggaaggagtagttttttattttattttatttttctgatctcaagttgtttgtcctgttgtatgttcaatacttggggagataagagcgaggtacagctgtggttttcagaccatattcagtggtgcccctgagggtctcttgtgaacagaagggaaaaagagtgtgatgaaggtgaactctgcctatctgaacctctgtcaacctccagtcagaatatctggcttctagtattgttccttttaactggaagtctctgtggccattaaaaacttgggaacgttggattaaatgaccactttaggactttaaacagtctcaaatatgggaaattttatagccaaccacggctgtgagtccctggcttttgccgtactgagtatgctcacagagatagggagataggtggccagaagacagggtcatttaattttaattgagcataaatcattttgaaagaaaaatgcaaggaattgttgtatgacagccatgcattatagatccttacatgcgacattttcctaaagtggttgagaatgacctgatctttgttcaccgtctcagtgacaaggcgtggagtgactgggctcttcatatgcagtggaatttttgcatctctaggtttgcagaggcaggagttaccgtttttgttcattgacctatcagaaaaaagcaaatcctttggacaatgttgacacagacaggggtacggtctgagactcaagctaacagagctaccccttgctgccttttgcaaaggtgttgtaggtggagaagggtaatggaaacctggtacagcctttagaagttggaagctatggtggtgtatctgtcatgaactgcacacaagggaatgcttaaacaccagctgagtcatatcaggtgccttgtacacacacataaagagtctggtgaattctgacagtgttctgtttgccactagagcaaatttaatagctggggtttcacagcaactgttttagaaaactatatgtgccaaaaatttacat

SEQ ID NO: 18869 - DNA, 2300 bp, Homo sapien
acaataatctttaccatctgccacactaaatatatattaaaaatatattccagttaatatacagtttgtgtgtgtatgtgtgtgcatgtgtgcacgtgagcacctgcactgggactcttcaaattttaatgtaagtgggactttttatttttttttgagacagtctcgctctgttgcccgggctggagtgcactggcacaatctcggctcactgcaacctctgcctcccgggttcaagcaattctcatgcctgagcctcccgagtcccttggattacaggcatgtgtgaccacaccgggccctaagttttgtatttttagtagagacggggtttcaccacattggccaggctggtcttgaactcctgaccacatgatctgcctgccttggcctgccaaagtgctgggattacaggcgtgagccactgtgcccggccataagtgggacttttatttatactgatttggcagcttaaaaccaccctttcccatagaaatgaacatatataaaaggagaccatttgactttcaagacaaagcttgctttacttcctttgctttcgtatgatattagttctattaagagttgtcttttcagttaatctaattattcttcagtaatgacatttcctcatttttgcacctttgagttaacaacattcccaggatttttctcttatggtcttcattatatatagtgagcaatgtgtttgttaggaaatcattctgtaattctagtgtttacctgagttcaataacccctcagcataatatagtattaatgaggactttcaaacaagagagctaaaatgttgaaatcttcacgtgcttgtctgcagcttttggatacaggagatcatttaaaatagactttgaattttatttatttttgagttctgataactttctaggtgaccttggtgtgtatgaacagcatgggccaaggaactgttttttttccggctttcagacgtcagattgcttcctttcacaccttggaatgtcagaaatttactgacttctttctccctgagatgtttttctcttgcagtattattacggggacagcagtattctgtttacttgttgccgggtggtttttgagacctctgttgcaattgaaacaagaagccaaccaacaaaatcaactcttgcaatcatttctgtcacaaagaaaatgtcacatgaaccttctcaaagcctggagatttagtgccaaaatgcattgtgacatttatagggtttaccttaggtttagaacagagacctgagtgccctaaaacttagtcgtgtggctaaggatcatttgagactaaatgccaaggaaatacttttcaattggtttctatttcatgacttgaagttgggggtaggggaaaggatggattgttacagtagtttaagatcctattgatcacatgtcagtcagtttgtcctattaaacacagtacatgtgtatgggggagtcttggtatgtatccaattccattctctattaaatgacaatcttgataaaagtttatgggtttttactaaacaaaaaccagaagagatttggtggcagagatatttagtgctcacaaaatatcagggcttccttgccttcctttctcagccttgcttgcgattaagttcgagctgtggacccgttttggcaaacgggttgtgagcagaagtgatgtctgctcctttgatttctgccccccaaatccctccatgactcttgggttctttcctcctgtgctgcagaggccttgggagctgagatggggaaatggtggcaacatgagatggagaagtcctggagagaattttcctgtaaaaaattctgcactggacttagcatgagcaagaattgaacctttgcggtgtagagcacccctccccccatattttgggtttctcttgttaccttaccagagggaaggttaatttttcaaatttgtataatatcaggatgactgtccaaatttttatcatagttctgaaatgggagagttccctgaccccccttgcaggacatgtgacaggggtgtggctcatctgttcggtagctgccactgctcaaaccccttatgggagggggagcacacagacagataggggcaggagcccaagcaggtgtgtgttatagtgagctcttttaaccttgccgtccatgtgaagcttaagtattaaccagttcagtggaccctctgcctttttgcaaggatggagggccagagtgacagctttctgtattctgagctcttgtccagcatcccagaaaaattgggtcacagacggatttgaaggatggtg

SEQ ID NO: 18870 - DNA, 2300 bp, Homo sapien
tattttagatggtaaaaatttaagagcacaatttctagaatcagacggtccaggttcacaccgtaattcttccactttctggctgtgtgacctttcgcaagttactaaaactccctgtgcctcaacttccacattgctaaaatggagtcactaagagtatctacatcacgttcttgctttgagaacccaatgagaatagcatataaagaaatcactttacacattacctagcacacagaaaatgttcaataaatactacctatgagaatggtagtgaaggtacatttccgtcatcgcttaaatggtcactacctatctggtgatcaaatacacttttacctctattttatttgaactttattatggtttaatttgaaaaatttctttggatgttattttggtgtatagtatagagacagtgtctaaactggtttattttctaaatagctagtcaattactggatggacatggtagctcatgcctgtaatcctagcactttgggaagccaaggcagttggattgcctgagctcaagtgttcaagaccggcttgggcaacatggcgaaactctgtctctataaaaatacaaaaaattagccgggcatggtcgcatgtgcttgtaatcccagcttctccagaggctgaggcgctagaattgcttgaacaatctgggaggtggaggttgcagtgagtcaagatcacaccactgcactctggcctgggcaacaaagggagactcttgtctcaaaaaaaaaaccaataataataattaatagctaggcaactactgcaataattgttattgaatatacattcctttctcattagtgggcactgtgatctttatcaaatattttcctattccactttttagaatttgcttcagggaaacctagtcttagaggtatctgccggtataatctggcttcttcatcattgacttatttgttatgactttataatactttagcacccaataattcaactcacttgcatgactctaattccccatgtttttcttagacatcctaatagatttattcttttatttgaattttgcagtcatgttgtcaatttcccatacttaaatttggttacttaattttggattactgttacttaaacttggatcagaagtgaatgacacttacgaaataacctgagagttgacatgtgtaataatgagcattcttcacatcccctgggacataatgtgcatctgcatttttctgattcttttttctatttttcaataaatttttgtggttttctacaccactaaaagaactagtaatacatagaggtgctcaatgctaatgctgggtggataatgcagcattgctggagggattaaaggcaaattacctcttagcctttgaaggttcttctaagtagagggatctgttgcttaattcacattttaatgcatttaatagctctaaaaatattttatctggacctcctatttgccagacattctaataggttctatgaaggatttagacaaagactcagccataggtcctatcatcgagattcttccagtctgtgaggaggcacaaacctgcataaatgtaattacattataatattgcaggtgtaaaataaaagtatgttaagagcaaagagttggcatatgattaacagctatgatatgcaggcaagacttccagatgagttgctgatgaaacttgtgtgaggcacaaaaaagatggataagagtttcacaggagtgtaaaatggcaatgtgcattatgtgtttgttaaggggtatcaagatgtggaagacatcatctgtgattcttcttgagtcttggactctgtaaaatccacattgtcaagtcataagtcaacttgaagctcagaggctgcctgtgttgggaaaaagggtgtgaatctccagggcaagacaaagattaagtaatggatgctttgatgttgtttccttgaatgcgtctatctcatgtgtgtttctccccaaatatttggtgataatgtggtttggctgaaggagagaatgtttgttgaacattatgtcagcataatatcagctttagaatttcacagatatctaagtgtcctaagagaccaactggactggatatcagaccaagattctgataaaaggggataacagagattaaccggagcagaaaaagtacttttctgagccagagataacaagagaaacttaaagaaagtgctgaagcaagaaactttaagcctgtgagtaggtaagtaaaaacttaaattttttgcaataataccaaagaagatttccttttctatcgtattaaatt

SEQ ID NO: 18871 - DNA, 2300 bp, Homo sapien
cttcctcttaggccaatactaaaatcacagaacagcaatacattacagatttttgaaagagataattatttatcacttacattcaagtaacaaattcttgtaatttgacaaatcttgaacatgcctcctcaacttgcctcagtttgtctttctgtttgggggaggattaaagttcacaaaagttgaacttcaatgaagttaattatcagttaaggtagactgaggaggcagagacatgtaacagaaaagccaatccagatatcatttttatttatttggctttagaaagtgtttttctacttacatgtgagtatgggtgtgtctgatattctgggaatttacttcaaacaaaggaatgaagccacgcaatggcgatctgactcagctggagttgggaatccatctagtttccccatcttgcctcccgtcttgctcttctccatggtctgtttttacgctgtgtttagatgcctcgtcttctcagatcaatctaaatgctcacccacataaaatcacctttcctgaaattgtatttgcagagcagatggagtcctgtccatttttgcgtgtgtgttttttttaagtcttttgagatagaactctaacaaagtgtgctctgctttcaaacaaggcagtaattgagcagcattaagtgataatattgaacaacatcatggataaaccacaatgagagttgctgcaattgttatggaaatgtaggcatttgtttagtcttcaatttttttttttaacagaaaaggcaacctctgcattcactgcttacctgagatttatggatgaatgaaaagataggtcccttggagagttcaaactcttctgcagatattgtgtaacagattgcaaaataggtcttcctatcagaatatgtataccttagtgacagctatgagtttggaacacgaattatctatctgtggtaggtgttgtcgttgttgctattatcatccccatttgacagttgagaaaatggagttgcagaaaggttaagcagtttctcagtgtcacacagctagtaagtggcggtgccaacatagaagtccacttcctcaagtgttcatgcttttaaaaatggaaacaaaactctaacaaccgtcaaacagcaacgattgtcagaacctagaaaaggcctcttaaatttgcagtgttaaccaagcctgatgtggttccctagatcccctggctgccaccgctctgtgaagcaaaggaaaaactaattccttgctagcataacacttctattgagcattcctggacacaactcccccaggttctgaagagcctagggttgctatttgtttagttccccatggctgcttttcacattttctggatctttctcttgattctagcattataagtctacctcttccctgatcactcacttttctacctcctggagagcactgaccacgggatcacctcaccattttatttaacccattaggactcaatgccaggcaaaacctataccacagcctgcattgtattcaccatctcaggctcgagctctgattcctggggttgaggaaaggaagactttccaaccccaatttctgccatccatgttgattagtcagagggctaatcaactgtgaactcatgttctttggaactaggcagcacaggaaaaataatcattaaaggtttggtaaataaaagactgaatggatgcttagctacctgtcattatcctgtctcgcttttcgtcagcatgcaatcccaatcctcagctgttaagatgtagacaaagagttctgatgaaagggatttatttgtactattccaacagagtctgaaaactagcaggagcatttccataggtcgtctctcaacaatcctgtctgtaaatatttgagtcacttacaggcattgttgagcatagttctggcccagcaaatcttcctcctttgtatccctgatcaagtaaaaacttagtcaggatatacttgggtgaccttcacactgtacctcctccagaggtacagaggtggtgacgtaatcactgccacagctgactggctatggcttgcttgataagacgccaggggctacctatgtagattcccagggaggaactgtaggaacaaaccggtgtcaatggttaacccaggttcttggtgtctggagcttttctttcctttattattaactaaagagcattctctaccattgcccagctgaaagcacctagctcatagattctctgtggggagagtgaataaaggtaagtgctattattgctatggatacaatgtcattcagcctatgttttgctcttg

SEQ ID NO: 18872 - DNA, 2300 bp, Homo sapien
cacttcctgtcaccgtttttactcgtccctagtcaaatcaggcatttatctccaaaactctgttgtgacatctttcatcaaggtcaccagtgacatcacactgctaaatccaatggtcaattcttgtccttatcctgactgattgttaatatctaacacacatgatcactgactttttctttttcctttccttttttttgagacagggtctcactctgccgctctggctggagggcagtggcatgaccagggctcactgtagccttgacctcctgggctcaagtgatcctgccaccttaggcactcaagtagctgggactacatgtgtgcaccatcatccagcttatgtatattatatatatatatttaatatatatatttatatgtgtatataatatatataatttatttaatatatatttatgtgtatataaatatatatgtgtatatatatttttgtgtatatatatgtgtattatatatttatgtgtatatatatatttatgtgtatatgtgtatataatatgcatatatgtgtgtgtgtatatatatatatatatatatatatacacacacatatatatatatttttttgtcaagacagcgtctcactattttgcccaggctggtcacgaactcctgggctcaagcaatcctctcgccttagtctcccaaagtgctaggattacaggggtgagacactatgcccgaccacactgccttttgcttgtaacactttctttacttcgtatcacatgtcacaatttttcctcctacttcaagcaattctttttctcagtcttcttagttatagcctcctcattttcccagacttaaattaggctgtcccaggccttcgtcattggaatccttctcctttctaactactctgactcttgtattgtttcatccatgttcatggttgcaattactctatgtacactgataacttccaatcttatatttccattctgaaattctcccctgagctccagactaatatattgtctccttgacatgttcatttggctgtcagaaagcatatcaaattttgcacaataaaacaccaattattgatttcctcactccaaaactccttttctaccagctccattatctgagtaaacagcacaagtatttactgtgctatttattgggtaatggttcatttttattttattatcttttttttttttttttgagacaggatttcattctgtcacctgggctggagttcagtggtgtcatcctagcaaacttgcagcctcgatctcctgggttcaagtgatcctcccacctcagcatcccaggcgatcctcctacctcagcatcccagatagctgggactacaggcacatgctactgtgcccagctaatttattttttatttttagtagagatgaggtttcactacattgcccaggttggtcttaaacttctgagctgaaaccatcctcctgcctcagcccctcaaagtgctggaattacaggaatgagccactgcacctggcaagtaatgcttctttacaagaaacttgctccctctctaatctgaaatttagaggaagcaaatgaacaaacagcaaaacaagaccagcatgttgaaagaacatctaaactttgtccttggagtcactactgaggtggctgatagtctttctgggggcatacgcttccttgaaacccaaatgaaatgatgttgggcaagatgctgtttgccataggtatagggttacatagtcagacaaagtgtgcatttgcatagaaaaatctttgctgtcacaatcacagagcacctacacttaagaagcacacacttggaagaggttgtacaagacctagaggtgtcagtaagagaaaatgcagccttccaggacaataagaaatttaggggtaatgtgtggccacttttgtgatatggaaagatttttattattatataagcttccagaggtttgatcagaaaacaaagatgtaaataggcatggaagaaggctattcttggttcttgttttctgtccgccaccattggcaagactatctactatgcgtaggcatgggaaccagttaaagaaagtgtcgattcactagagcgaagctgagaactcagtggcctttgtctgtggtgaatgtatccggaaaggcaaagaagagagagattctcctgtggggtttctcatctccatggcggtaggtgctgacagcttcagaagggtactaacagggccaagagaaaagggccctgagatgctcagctacggtgctcttacaagatgaaaaggacatggggttcagatctg

SEQ ID NO: 18873 - DNA, 2300 bp, Homo sapien
actatttcggcctgtggtgtattctttctaattagagtagaatactaaagcaaaaccatttcaatccaagttgcataaaaatgccatccctttccgagtgactggttttcaaagcgagctcattacctggaaaaacaacaacaacaaaagtgttgcctctctgaattcacgtggtttggaaaattcttagccatctacagatgcaccaactgaatcataataaagaagagaaaatctataaatgattaatttcctttttctatttaggcttaacatgttttaagggataattaaacttttggcctgtttcttagaagtccaggaggaagcatatttcagaagaagcttattgaactgagcggtgaactcattcattatcctttggttaatacagagtgaacttgtctaccctcaggttcatttagctttaggctacagcctagattcttagacatccgtctattttacagtattaattcaagctgtttataaataacacatgactaaatagatgttaaagaagacctcccttggggcaggcattattcccacgtgcatggcaacagagttcgtaacagggcttggtgaacagtataatctcaacacattaactgggaccacatcgccatttggctatcagagcagccacaccgagtgcatcatctcttgcacacccttttaatttaagtaccttgctcagtgctaagaaaaaaggcacacttgttaaggcaggagtaagtgcggatctgcgaaacctaagcaagcatatttcaccagcacctcctaggggccacgtgtggatatgaggatgggaggtggggactcgcacagaacctttccttgaattgtcagtttcacctctcctacacacaaaaatccaccccgactgcgccgtccacaataccagctagtttgctgaattagttcagcgactcaaggaggccttacgaggtttaaataaactgcacaaaagacacatttgatcgctcgagaaaataaacatttaaaaaactcagtggaaagaaagactcctaaaatatatcctgtcctttaggagcaaagcttcgttaggacaccgaagtactcagaaataataggcacttactcttcggtttacacacacacacacacacacacacacggattagtttataaagttccaggatccagacccggttaacactgaagttgctttttaggggtctgcgcgctctcgcctggctgctgggaaggagggctgggaggcgctgaagcgagggcagatctgagtgtctgtaggagttgctattccaaaaaaaatcattactctctaattgttctgattttagatcagcaaagcgtgccgggcggtggtggagagactgagggcggacaaggcgagagggaacgagccgtccacccttcggagaagcctaggcgccttgtaagtaattcgcgaacagtcgggagaacaaacagccaagcggcgctgcagtggccgcacttgcgcgcgtctcaatcctgggggctctgcgcgcccgccccagtccctcgccccattgactcagtggcttctccgggcgctgcagcctccgcggggggcttcgaagggccgaggggctccggcagagagggagtggagagggagacgcgccgggaccgacgaacaatcctgcccctgcggcaaaggtctctacccggcgctggcacctcgcaggcccctcgaggagcacgcagggcaagcggcccaagagcgggggaaccgggaagtgtgtggggctccagacggagtaggaagctttgcccaaggccaggctgcaatcaggcagccgcaacagccgggcgcggagcttcccacctgctgctgtcccagctgggccgcaacttcctcctccccggcccgggcccgactccccggccgggctccgagggtggagggggacgaggcggcggcaggttccctccgctggcaacgcctcgcagcatcctcccctccccgccgcggttcccggggccggccgcgcggccaggcgcgctgcgattggccggcagcggccgggggcggggccaggagagccggtgtcgcacggaccgcctcaaaagagcccaggatattgcagagcgcactggagccctggccagcgcgcagccttcccggcgccggcgggctgggtcttgggaattctggtttgctttggctcactcgctttttacaaaccactggatcttacatgcctctgtaccccccacttccactccatgtccccatgctcctgcgccagcaacaggtaagggctgctgtgttttcttccttttcgctc

SEQ ID NO: 18874 - DNA, 2300 bp, Homo sapien
gccaaaatgtatggctgctgtttctactggaatttttttctgatgttattattttgtctggtttttatgtttaagccttttttcctggggtggcccggtgtctgcacagtttactgttctgctgaagattagttagaggttacattcaaacagctaaagccaggaaagctttccactgcctgctgatgactctgtatgggctggagagcacgttcaaacatcaggctgttttaagaagtctgcccattttactttccatcgagctcacttgtgtgtctcctgagcatgtgcactggcttcataagccagggatatgtgagttgcttgagttcactctagcctctactgcacacgcacacaacttctggttaaagctggttatgcagaacatttaccaatcccattaagtctgccttacttactggagctccttgtttaatgtctagctattcaaatttaagctagcagagctactggccctcccttttcacttgccaccaagataaccactcacattagtcagggttctcagagaaacagaaccaataggagatagctagatggatagacacacagacagagagaattcattgtggggattggttcacacaattatgcaggccaagaagtcccatgatatgccatttgcaggccaaagaaagaggaaatctggtggagttgtaattcagtccaagtccaaagactttaaaaatggggactgggggaagcactggtgtaagccagagtccaaaggcccaaggaccgggtggttcaatgtccaaggaaagaagaaatggatttctcagctcaagaggagagagagaaagaggatttgtccttattctgcatttttgttctatttgggccctcagtagattagatgctgcccatcagtattggtgacaacagatcttctgtactcaatttactgactcaaatgctgatctcttctagaaacacgcacacagagatacttagatgtaacatttttccagccatctgagcattctttagccccatcaaattaacacataaaattaaccattatagtatgtacacatatatgtgtgtatgtatgtgtgtacaattatgcatcatttaacaacagggacacactctgagaaacgtgttgtttaggtgattcccttgttgtgcaaacatcatagagcgtactcacacagacctagatggtatagcctattacacatctaggctgtacggtatagtctatggctcctaggctacaaacctatgcagtacgttactgtactgaatactgcagacaattgtaacacaatggtaagtgtttatatatgtaaacatatcaaaacattaaaaaggtaaagtaaaaatatggtataaaagatggtacacctgtatagaccacttaacataaatggaggttacaaaactggaagttgttttgtgtgagtcagtgagtaggtggtgagtgaatgcgaaggcctacaatattgctatacagtactgtagacattacaaacattgtacacttaggcaacactaaattaagagtatttttcttcctcaataataaattagccacttgtaatagtctgttttcatgctgctgataaagacataccgagactgggcaatttacaagagaaagaggtttaattagacttccaattccacatggctgcagaggcctcacaatcatggtggaaggcaaggaggagcaagtcacatcttacatggatggtggcaggcaaaataggagcttgtgaagagaaactcccatttttaaaaccatcagatttcatgagacccattcaccatcacgagaacagcatgggaaagacctgcccccatgattcaatcacctttcactggatccctcccacaccacgtgggaattatggaagctacaagatgagatttgggtggggacacagagccaagccatatcactactgcaacttatttttactttatcaatgttttaatttttaaagctttttcactcttttgtaataacgcttagcttaaaacacaaacacatggtcagctgtacaaaaatattttctttccatatattgttattctacaagattttgtggggggaggagccaagatggccgaataggaacagctccggtctacagctcccagcgtgagcgacgcagaagacggtgatttctgcatttccatctgaggtaccgggttcatctcactagggagtgccagacagtgggcgcaggccagtgtgtgtgcgcaccgtgcgcgagccgaagcagggcgaggcattgcctcacctgggaagcgcaaggggtcaggga

SEQ ID NO: 18875 - DNA, 2300 bp, Homo sapien
agtcactatcttccaaatctcggaagtattctgacgacagaggcataatggaaaagttcctgaaaagtgatggagaaaaaccgggagaaagctgacttctcaagcatttgcaaaactgattaaataaggctttttttttctttctgattcaggggctgacacctttaactaacgataagggcatcttgaatacagctctgacaaatgacacttaagatccctgttattcctgtaattggcattctatgatttcttcaacctgttttctttagtacgatttttaaaaaatgtaaccaccagagggcgtaggatattacatttcaaagggcttaaatttgtgtttcagccactaactccatctccctaagcacgcttgaaagggggaaccctctgctatgcaatggagagggttcttcttgcccagcccttccatgccaaacacaagtccttcaccaaatccgctacctctttaaagattccatcagcaacatcatgtctgctgtttgccaaagaggttttcttaccaaatagactgaacttttttttttttttttttttaccttctactttcattaaattaagctatcccttattccttgatttgggtcacctaaagttcaaggcaatagtgaattacttcagagctctttggtttgtatgcttacaccaacaagacattcctctacctaaaactcagggaaagcatttgtaaagccattttgccaggtgctcactaaccacatttccctgttgctttatgaacattctcacccagctcctgtgtgtgtgcacgtgtgtatacagctttacattggctcatcacttctctgttaacccttcagacttagtgccccaggtcaaacttaacagcctacattttgacagatttgaaaattcttatttgcgtcgctacatcactcaaaagtgactctcaactcttagtttcatataatctcctccagagcgttgaatgcctgtgtctagcagacctatgccttactgaattcatgtacccttactaggcaatgggctctttaaaaagctcaaatatggcatgcaaggtggtgctgctggtctatgttactttaaaacctttaagtaataatgctttggtaaagtgtcataggcaactgttttggggcaaagaagagcttgagtgacttgacaggcttcttcctgtcttattttgaaggtactcctcctttaaatcatatttactatgttacattattatgacgttatccaggttacggtggacatcatccctgtgtctgctgtcggcatcaagacccactactcccattctcccttgtaaggaatgatggcttctgcctctaataccttctacttctcagcacatcaatgctctggaggaggacggtacattgatgatccatgggttgctgctccatgacaccttatggagcagttgtgtccaaattcagggtacattagaatcatttagagtacttttaaatatgtagacagctgagcctaattcagtaatcctggggaagagttaagggctctgtattttcaacaggcatacaaaaattgttatgacgtactgtgggagacactttctactattgttataatatctatacctggtaacagaggctcaattaataggttaagagcagggagacatcaagaacttaaggaaaataggccctgtcactctactttcagaggatgaatcatgactggcctaaaccagggtaccatttagggtaagggtagctactataacagatggacccctaaaatctccttgaattaacaaaataaaaatttcacttactcttcacacagcaacaaaagcgggtacttgtcaggtaatgctcatgaacatcttatggctctccaccttctcccctggcctcagctttcttccagcttccatacacacacacacacacacactcacacacagtgagatacagagagagagggaacaaggaaaaaggggacacccactcattcactgcttcagcctggagaacccaataactaccatgcatattctattggcagcacctagtcacatggctctacctagattcaagaaaggcttggagagggaggagccaagatggccgaataggaacagctctggtctacagctcccagcgtgagcgacgcagaagacgggtgatttctgcatttccatctgaggtaccgggttcatctcactagggagtgccagacagtgggcgcaggccagtgtgtgcgcgcaccgtgcgcgagccgaagcagggcgaggcattgcctcactcgggaagctcaaggggtcaggg

SEQ ID NO: 18876 - DNA, 2300 bp, Homo sapien
aatatgagaggctattttggtaagtgtatatgggggcagacatttttccttttgctttaggctccaatgtggctacacagggtgttgctgagagtctgaccctatgccagcagcattccagcttctgagtcaaccagttcatcactgaaacaagatctgggaagcccattagcatgtcctctacaacttcctataatctgaaagattgacaatatctttcaacggtgaagttttgatttatagtaaataataaatataattggttctagatttcaaaatttatcccatttaaaacagtgaccaaacttgtttatcatttagcagtgtcattttttaatatattcgatatggcttgatgttagctttaggtgataaattagtttccctttaaaaaaattgattgaatgtacgttattcacttagtggtctctcagaatttcagttttctgctttgtaaaatgaagaaactatactaggtaatttttaaagtcttactctacaactttcagttttaactactttattacttactttttttttttttttttttttttggacaagtctcgctctgttgcccagtttagagtgcaatggtgtgaacacgggtcattgcagtttcaactccagggctcaagcaatcttttcatctcagcctgcagagtacctgggaccacaggcacataccatcatgcctggttaatattttgttttatttttttgtagagatagggtcttgccatctttctcaggatggtctttaacttcagggctcaagtgatcctcccaactcagccttgctgcttacatttttggaggtatgcaaaggtcacccttcatgaacagaaattcttttctgtcatcgtgaacccagcgaagaattcataactgaacttcatagaattgtttactaccccaaatgtccccaaaccatcacacattatgaactactgctgtttattttagttctcttatgatagggtcatcaggatatcagctgttattaactggtggaataattactcctaactctaatgatcttccccactgatctaccttattttcttccaaatgtcttgagattggttaatcagcttcttataattgcctaaaaatgtgttcactaaagaggtaagagagttctggaggggaaaaagatccaaatgagttctgaaacagtaacttactaatatcctcccagaaatgccagaaatgtacagagtgaagcaacaaattaaagcacctaagaggagaaactaagtggcgaacagacctgttaaaattttgtttagtctttcattttctgtgtgtgttctccaagtggattctttgctaagtgaattctttgctattatgatacacatcaagagaatctagtataaagtgaaaatatataacatttgagggagggacttggaggctctaatttgagtgaagtatatgaaattcattgtgcaaagagtcatctttactccatatttattggatttgcttaggatcattgagatgacctgaaaattagcctccaattttgtaaaatacacaggactcaactgtcaattttattataaaaagctaaagtatgaaaatcggattagcaacaattggtgactaatgcctcttgcattacttgtgtaatctgtgcttgtcagaattgaatacccatcaacaagaattgctgtttttaattttacttgcctcaaaatatcatcttataacttatgaatgtgttgactccatttgttcccattccctaatctgaagaagaggaaaaatggttgatttcacaagtggttttagaaggaagcgcaagagttaattgatgaacagtattgagttcgtttgtaggagaacttgtcctactcattactgtgcctgagtagaatgctttgcagagagacaggcaaacaacagacacatacacatacacacaccgacatacacacacttgcatacacacacatatacaaggaaagtgtcacagggtaatgtccaccaagaaaatcatatttgggagcccactgttgtgacttcacagtcacatcataatctattgtatgactgttcaaaacatgatgtatggagtatgttttttagccctgggcaattcaccttttctttaaatactcatgtcacatttgtgctgttgccaatgcttctcagaccctccagatgaggtaagaaaataattacaatagataaaaatttttctgttttatacaaataatttattgtggggaaagttacaaaattaaatatgtatgtatttatcagtcaaatactcatttcatagacgaaagcac

SEQ ID NO: 18877 - DNA, 2300 bp, Homo sapien
agattaaacagcataccagtacagtctacagactcaggaggcaaaatgctttactttgaatcctggatcctcttattcttagttgtataatcttgagcagctgtgcctcggttttctcctctgtgaaatgggtaagttaatgaacgtgcttacctaccttgcagtgttattatgatgactaaatgagttaattcacgtcaagcacttaaaactgtacctgcacagagaaagcattcaatgcatgtaaggtatcattcttattaccattatgattaccacatgaaagaaagtatgagtgactgtcattccttgccttctagactataagtcactttttagtaggaaacttgttttagacatcttttaaaatatatatttagatattaagactctgaacttattaaaggcaaattctggaatttactaaacttaaggtcccatgggcccagcagcatgcctgtggggctcacacctaactggatcttggtgttaaaggtataatgttttatgcttctgcttttagatggagatatactctctctctctctttctctctctctatatatgtatatatacgtatacatatccatatatagatatatatacacattatatattttatatatatatatatatataatacatatatatatagagagagagagagatagtattaaacaactactgaatgaatagaagctggaagtaatttcccacttaggaagaagacattttgactatgagactaagcccctaagtgaactgtgattcccacacagagttactgtagaaaggatttccacatcaagtagaaggctgaaccagacgacctttaataacttttatcagttgagactgtgagattcaatgactccatgacacttgcagattcagcttcagatttcagccactttacgggaaaaagagacacatcgaaaacttgatcctgggacttgcaaccccaccgtggcacttctccaagaaatggatggttttcacctgtgggaaataaagtaagtatgaaggtttttaacaatgggaaaaaagagaaggatcatctagcagtgattataacctagacggcctaagacttacctctaaaaggacccaaggcaatgaactttctcctcgtgtacaaaaaaggcctttatgccctatattctcatcattgaaagaggtagacaacaggaggggggcaaaatatggccttccagatgtgtcagggttgtgataagtcatgtttaaactttacccaaagtgaaataaagtgtcaacagaaactcctgtccaaactctctgatcaggtcaggcaaacaaccaatcgaaaaaaaatcaatcaaatgtgaaaggtggcccaaaggggtgggaatgcttaactccgggattcccatagaagccaggtctatttagcaacatgtttcttgcgagctgctgcttcttcttgtggtcctgaaacagccagaaagcacaccagagggtgtcctttcatgagctggcttgaccctgagcaggctgagaagttggtggcatttgccaatgccatgaagaaggaaggattctgggacggatgagctcaaaactgattgtctgatcagccccagggtcagtgctttgagaagagagatggtctacacacctaagaggaatgggaaatttagccttgatctggaattctataagtgctcaaagaaattagttagttcttgaaggtgaaagaggagagcaaaaacttctaagtacacctggcagagtggtagcaatatgcttccacatggcctgtccagttggaaacagactgcatttccccaggggtaaggagtcggcaggaaccagacagaagcttgaagcccagccaaacagactagtgtgtaggacaggattacaattgcaagaaggaggtaaagtatatataaatcagaaatgggagaaaggatccaatcttatgaatggaataaatatggcacaattcaatgggttttgtggacaagaaggtgtttggatcttaccttccacaacaaatcaaattctagatgcctagtgcagatggaactcttaaagcatcaccattctatctgggtacgcccaggaaccaaatgggctgatggtttcagctagataagactggaagacagcaaggacttggaaatgtactcacagaccctcctacccgtgataactgacttcagagcacaccttcattcccacctttctatattttaacatgggattgagactgggacagaggttaacaaggcatctcaagccaatcaagaactagatgcacataactgcatttgatg

SEQ ID NO: 18878 - DNA, 2300 bp, Homo sapien
caggagacggagggcgcttctccgtgttcgggacgtgctttcggatacccgctcttgagcaagcgccgcgaggtctgccgccgggagcggagacacagaggtgcgagtggctccccagggaagccctcgggaaaccgaggtctgggatctccccctttccccctcttgcacgtcccggaccggcgccgggctcaatttccccagcgggggccgccaatctctcctccgcgtctacgcgggagctgagaccggagcccagagttgctggcgcagggcgagtttctcgcaaacactcagtgctcaggatgggggtgagggatgcgagctgatggggttccttttacctggcgaattaaggaccacaacctccctatccaaacttccttagcaaaagtggggacggtgtttaaatccgttttcggtagggacgcttttctgtccctagggaaagtttggtggggtgagcagcggcgtcccccaaatatctcagccccggacaatgttctcattagaggtgatgggagaaggggttaccccttgtctattccagttccccaggccgggtcccttgcaggtagaagactcctatccctggagggacaggtccccgtgtcgcgggctcccagccgctcctgtaattagtacatttcgctgggcttggagagtgtttatcgtccgctcttcacgccggacacgagtttcttgtggaagggagcggccggtaagcccgtctctggactggcgctgggctggacagcaacagctaaggggaaaaggaaagtaccagatagcgtcgtaggtgcgcaataaatatctgttgactgatcgaatagatgtcacctgtggacgtgttgcccgagtgagtgcatgtcccatcacagccgccagacctcccagcgacagttgcgaacacgcgatgcttgtgcattcctgcgtgtgtatttctccccacacgggagcccgactttgggaagttgaccggcatgtgccactcagggctgtggaatcccgactccgctaaaactgcagaccaagaggcccgtttcagttttcttccctttcctgttttcgaaaaaaagaaagatgaggtggacgggaggtgtcgggtgagggggcgcgaacctccaatctgccctggtgacctggccgggtctgggggcgtcgggcggctgtaacacagcagggcgccccgggggtacggaccggagcccaagtcagagaccagaccagctggcttgtcgtggagctgcggagccgatcagggaaaaaggaggggtgggagtggaaggccccagtcccaaagggacagcgctcccaaagggagcgtgctcttttttcattctgggttttgcgaaaatatctgtccttagctgtggcaccggggagccgcgcgtcatgcggcttccctcaactcatccctagaacgccctgcggaaaatttcctaggccatctcttccccctaacgcccactcccactattttaaaaagtctttcaggcatttttagctgaaggtgattttgccttggtgatttaaaagtaaagatacagtaagcgctcaacgcagtggtgcctcctttgcgacatactcggccggggccacttcggccccaagagcttcctccgcacgagcaactgctcctccccttcgatcacctttcagtttaggtctatgcagtctcaggtaccgaccaaagagggctgagattctcaggatggttttgtggggtttccctaggggagggcaggctcaatggcgatgattgcatctcagcctggagggattctaaccagcgcttccctctaagagatcccattgggtgggtgattattccggatcttaatcagagaaagtgtccccatcaagccacggaaatagaggacatgcttgtaaggtgcaatttcgaaggtaacggtcagagttaaagaccaattatcctgtcttccctgcgatcctttccgtctcaacaggacccgggaagtcccgggcagagcgcatctccctggctcctgcaagctacggcttcacccagcttcgtgttgggctccgttttggttttggagcggcgtgagggagtctcgggggctgggtcgactgccactggcctgagctccggactccggggacagcgcgtcctgtcccgagggcctcccgccccccgggaaggccaaggtcatgaggtcaaaccccaacttttgggcttccgcgagagtaaagcccccggatggtcctcggagctgtgacgtcacaaaaagtgcttggggtaggcggacccacggctttgttaaacagcccagggg

SEQ ID NO: 18879 - DNA, 2300 bp, Homo sapien
ctacatattagtatcttattgcataattgcattaaaagtatatttatacatatacgtatatatcttgacatatatttagtgaaatattccaaaatatcttaaagtcatagccctcttcactgactttattccagcaaacatggtaattacaatatcatacaactaagtacagacgacctggctaaaatgtctgcccgatggtctccgagtctcctgaatcaggtgtctgagaattacacagttatactgtacacacaatgcccttctacccgggacacagaaataggtccacactacgcggacttttttctcctaggaaaggacgatgctgttcttacactttctgaaagtaatcacagagccctggatacgaagctattgtatgcaaatctcttaaatttgtaaacgagctatagggcaccagaaacatcccatttgaagaagttacattcgttaaaaaaaaaatgctgttgaacaaggctgtaacttactaccttatgaagagttccatttcctataagaaatgtcgggcttcttccgaagacaacgagagaaaacaagattttaagaaattctcccggaaggacattgatttggatcttgtgatagtgtcctcacttcgcaaattagaaagggaaaaaaaaactagtttttattatgatgtgggccgattcaccacaacaataatttaattgaggcgaatttttgcaagagcccaaaagggtggggggggggggggagtttaaaattaagagtttcccaatgctgtgcgtttatttgggattctgaaagcacagaacccgcaagcgaccaagacttttcttctatcccagagcagatagctccgcacttacccaacctggctctaagcatttcgtgtaaacacaaaggttgtgctcaaatcacacttgaaatacatgagagacaccaccaatgcctcccccagaactcccaactacatgcaggtctgaaccgaccggactagagtcagaagcaccggcgcttcaccccttcaggtgtttcgtaaatgccagcaaaagcaggcaagcagcatgactccgccagagtggagcgttttgtctgcggtggtgcccatttgtttggtcttttacaaaccaagtgaccggcctgggcctcgcggcccgggacagccgcattggcaaacttctatctctcaaagccagagcagttagcaaactctcccccagacagggcgactcggctgacgtttttgacccggccaggaggcaaagaccaaaacgtcagagcagtagccctgttactgaggagcgtcggcagggtcgcgggtagagggggctggagaatgacttgtcagagctcaaggtcgatgtggcgcggggcggcctcgagagcgccgggctcctgcgtggccacggccgccgctgccaaccttcgcggggacttagctttgctttccattgactccctttgcaaaagcgcagcagaatcctgaccagccgcaccagccccggcgaacccgagcatgttaatctatttatatggattattacggaggaacagcgggcgttgagtcaccaaaacatttgcttcaaaagactatttctaagcacttttgcaggcaggcaggctcgctccaggcgcgtaaactcggctacgcattaagaagcggctgcttttcgaatactgcaaactccagctaagtccccggtgccgcggagagagcagtgaaaagaaatgtcggaggtgggggtagatcctagtctagacacacacacttgcgcgcacacacacacacacacacacaagattcgcgcggagaaggcactaaaattctggcattccgagagtacgacaaacttacacacttggaagtcccgggtcccccgccttccccgcagcaccccccgcccccccaccctaccgtccgccctttggctgcgatcccctcccctctcctcccctcccgcctcgtcacccagcccagtgccacaatcctcctccctccccaaaatcgggtccaatcagctgcctgccaaccctgggactgctgtgctgtgattggcgggtggctctaaggtgaggcggagtatttattaaagagaccctgggctgggagttggagagccgaaagcggagctcgaaactgactggaaacttcagtggcgcggagactcgccagtttcaaccccggaaacttttctttgcaggaggagaagagaaggggtgcaagcgcccccacttttgctctttttcctcccctcctcctcctctccaattcgcctccccccacttggagcgggcagctgtgaactggccac

SEQ ID NO: 18880 - DNA, 2300 bp, Homo sapien
ggcgttgggggagatgtgcgtctgctccgtggcctcctctgcctccgcctgcccgttcttcaccgacttcctccgccgcggctggtacttgtaatccgggtggtccttcttgtgctgcacgcgcagccgctccgcctcctccacgaagggccgcttctcgctctcgttcagaagtctgctcggggcggggcggggggcacagagaaaaagagggagaggggtcagtgaaatccgccaaactgtcaggtcggcggggaggaggcggcgacccagaccactcggcttcctctgcacacaactccatcttccctcctgcctgcaaccacagctcataacttttcttaaaaataaataaataaataagttattgcagtctgacctgagcggtcactccccgccccctccctcccctccccttctatttctattttggaaacgctggagatgaaaacgactcccggtgctgccccctaaacgcctttgctgctcgacttaccgcccccaaccccaaccccctttgaaaactttcccccaaattacttaagctgcaagaaggtccccaattctcaccccccaccatacactcccacctatttccagtagcctccctcctcccgcctcccagttcctgccaagggtctcctccaacctcggtttctcccttgccccatctccgtggacagtggggctgcacgagagagtgcagttttaagaggccgggtaggagggaggcaagtttcacttccccgccccgattgagcttccaggcgactggagagcaggctggcagccccctccttccgtctcccaccagtcttcgtccatcctccagctacctccctcacctcttccacttaccacccccctcctccgcgtccccgcgagcagcccaagaactttgtcaaactctgagccacagttacaccccattcccactcccaaccccatcccgccggctcccggaacggcaactcccgggcgatgggaggcggggcggggcaaatcagccctgaccagcgcccccagccgccgcgatgcccaccctgccgcgccgcccccgccgggtcctacctccagagcttgcccagcgtcttgctgagctcggcgttgtgcaagtgcgggtactggtccgcgagcttcctgcgcgccgcctgcgcccacaccatgaaggcgttcatgggccgcttgacgtgcggcttgttcttgctggagccgttgacgcgcaccggcatgggcaccagcgtccagtcgtagcctttgagcacctggctgaccgcctcgcggatgcacacggggaacttgtcctcctcgctctccttcttcagatcgggctcgcccttggggaacgtgttctcctggggccgcgtgttctcggtgtccgagccggagcccgacgggcagggcgagcccgcggagtcctcggacatggtggggctgggggcgccggacaggcccttctcctgctcgtcggtcatcttcatgaaggggtccaggagattcatacgcgggcccggggcagggggctggtggccgggaaaggcgagaagccgcggcggctcggggactcgaggcgcgggctcctctcccctcggctgcccggatgcggagcaagcggctcccggggaagctggcgcgtcggccggctaccgcggcgagcacttaggaaggcgcggggtggccagttcacagctgcccgctccaagtggggggaggcgaattggagaggaggaggaggggaggaaaaagagcaaaagtgggggcgcttgcaccccttctcttctcctcctgcaaagaaaagtttccggggttgaaactggcgagtctccgcgccactgaagtttccagtcagtttcgagctccgctttcggctctccaactcccagcccagggtctctttaataaatactccgcctcaccttagagccacccgccaatcacagcacagcagtcccagggttggcaggcagctgattggacccgattttggggagggaggaggattgtggcactgggctgggtgacgaggcgggaggggaggagaggggaggggatcgcagccaaagggcggacggtagggtgggggggcggggggtgctgcggggaaggcgggggacccgggacttccaagtgtgtaagtttgtcgtactctcggaatgccagaattttagtgccttctccgcgcgaatcttgtgtgtgtgtgtgtgtgtgtgcgcgcaagtgtgtgtgtctagactaggatctacccccacctccgacatttcttttcactgctctctccgcggcaccggggacttagctgg

SEQ ID NO: 18881 - DNA, 2300 bp, Homo sapien
gttatttcaagctgttaaggtttggggtcatttggacattagcaatagacagctaacatgtatgccttgtggcttaagctggccctgggatttttccccaatgttttatcttaaatataggtatgtgtgccgggtgcctagtgtagagaactggcttgtgacccatccagcattctaatgggatgatgcagtcagtgattgtattagtctgttttcacactgctgataaagacatacctgagactaggcaatttacaaaggaaagagatttactggacttacagttccatgtggctggggaggcctcacaatcgtgaaaggcacatctcacatggtggcagacaagagaatcaatgccaagccaaaggagtttccctttataaaaccatcagatctcctgagacttattcactaccacgagaacagtatgggggaaaccacccccatgattcagttatctcctacggggtccctcccacaacacgtgggaattccagatgagatatgggtgggaatacagccaaaccatatcagtgattattttaccgctctccctccctgttcttatttcttccttgaacagtttttatccagtttctagattaggaaactgagttttgaagtgaccagtccagaattgtggaacgacatgcctcctggtgctggaatctgcacttggagctcctccactctgtggatcaacaatcctcacgtcaaaagcacgaccttccttcagcaaggaggacatgatcacattccacattgaagtggagacttattgcatctggggacggaattcgctctgctgagcccagcagcagggccctctcagtaggcagtccatccatgttaataaatgtctcacctaccagacagcttcaataaggtgaactgtgcaggaggggtcatgcttgtcagtttagttttactgagacatggagggcctgtctgatgaggctctgggattcagctgttgtcctggagggaagacagactggcagtttcttccccaagacctggcctcctcccttcccagacacactcttatttcatttccattttcgaagtccagggactgctgggttcacatcgccctgcgtgtgtatgtgttgtatgtgcatgtatcgcactcgtgtgtacaattatgtataatgtatgcgagctttgttctatgttaaaaaaaaaaagtgcttccatagcagctgtctcaaatgctgtcccaataggtaagctgtgcaggcattattttccccgctttgcaggtgggtataactgagtcttagaaggtacctggttccctcgaggttaccctgtaaaggaggactgcttatcctcagccactaggattcctggtggctaatcctctgagaggctgtgtcctcccgttagacgtcatatctctttgcatcaactgcaaagaaattcacaggactcaggagtttcctagggattctcagagtgtcagaatttcaccaaaggaggtaaatggcaaaacagcccaagcttgggcatccccctgttccacaggaaggaaatggaaggcaaagcagaacagtccaaggtcaaatttgacaacatgagggaatccaggaagcatttgggtcaggcccttcacttaacaaacgaacaatgtgagcctatatgggggagtgggtgcccagagtcagaagccagggcaagatggagacgtgggtctgacacctgtgttcctgctcctgaaccagaggttctgacggtctgaaggagctgcagacgcagctgtgtgtctgtgctggtgatgaatccccttctgcttcctattccctctccccaggagcagcttcccccttaaactcagctgagccagcagggtgagctcctccagagagccggctgtgtcagtctccccttcccacacctgtgccccctctccatctccgccccggattctcagaggctgcacctgccgcattaggtctctcttcttctccggggcccctccttctctcttttgattctgtcaggacatgagtaatgggccctctccttcaaagaggaaacaagattgatgacagaaaaaaaggccagtgaagatctcctgctccagcagaaaacatgcttgttccgtgtggatttatgaagtggtcacatctccccttccagataaagcttggcagagactcggccacccagggtcacatttcctctgcagccaagcgcagagggaagattctccaatgtgggtgtgcaaataggaccaccagtggggagcagaggccgcttttccagaccaagaggagtctagactatcactcacacat

SEQ ID NO: 18882 - DNA, 2300 bp, Homo sapien
aatcttggattaatatccacttttcagtttagatgggaggaggatggattagaaggctgcccgagatcacctccattcctggcactcagaggagctgcgtttactctaaagcagagaaattaggccaaggcagaatgaagaggagccacaggactccagagaggttcacgtcaccaccccacaggggacaaacgcataccttgttttctgagttgacagacatccggttacttcatcttggaagttacattcatctgccctttggaacatcctgcccaatgaccgattttttaaaatagcttcttttccctgattatatttgtaatacctactcactgcaaaacatttgagaaagctcaaaaacagaaataaggaaatgcaatcacaaagacacacacacacacccacacacagagacatatatgtatatatagagagagacatgcacgtacacacagacccgcacatgtatgtgtatgtttgtgtatagtgtatatagttttcatccattttagctggtatttaaaaatgcacttttagctgacaaaatctgtaagaataaacaagaagataacaatagccaacatttattgagttgttagtatgttgtagacatagggaaaaaatatacaccaatctctgcacacacattttaaaacaatctgttcctaaaatgcatctattggctctctccttattacccaacattcttcaacactcaggtacgtgcgggtacctgtttaacatctctttttgccatgtgcttattttccttctaactagaaagctgtagtttcagaatcacctgtaacagcctcagaggcagcctatgagaggccaagaagagacagagttgggggttgacacatcattagggatccaaaaaagcagaatccctgccaggagtccccgccaatattctaaacctcaaaccttgaattgctgaatctaaagaatgccctggacaagaaaatcaacattaaacacacctagagaaatacaataaatagacacatatgaacagtgcaagcagagagattgagtgcctctggaaagagacaagagtggggaaggcgtgcaaggaggtaggacaggacccgggggaatttgtgagctgctgtctttaacctgtcccagggaaataagaattgaaatattccctagtgaatatgattggcatatgcagttcatccacagatcatggaaacacacccagatacagacacacaccacatacaacctcgatgggcaatgcttccctcccaccttggtctcctggggataccaactaagagactggtgcttcattcttggagacagccacagtctttgtttctggaggtgggtggatcctcatctggttcattttttcaagaaactgcctgctccctgagaaaagcttgctggggagagagttgtctcactggatacgtctgcggaggggaagagaagggatggcctttcctccaaagataacacagcagcccctgacctcctgcgagtctccctccaaaaccttcctaatgagctgtctctgggagggggtggatattttccacactatcttggcctctccttgggtttttttttgaatcttcacttttccatgccataaacaccgtttgccatgacctctccctcactgccatctcggacagcttctcatgcgtgaaacatatttttgttcattactttgttgtccacgaccttccttcccaaccgtccagcccgggtctccctgcacccttcacccccacgtcacacatataatgaattgctattccttcagacaacggggtggaaaactgtggtctccaaggcaacggggtatcctggggtggggtgctggggaggggggccttgcccggccaggaaaggactggaagtaaaggggggtggggaggcacaagccgagatgatatcattcctgaagcctgcaagcagccaatccgctggtgaggatatgatgtcatctcccccgcccccgcccctcttagcctaggtagccccactgagaattctagacaagtattgaactgaagttgtattactgtgagagaaagggggcgggggatggcgatgggagagagaaagagatctacggaccctctggatggccggagcagacactacagtcttcaccagaggcagccccataaaaatgtcatcgtctcgggctctccccgcattacaacacaatgatttctttggggaggagaaaaaaaaactaagatttattttgcaaccacacctccgcctcccttggaagagaaatactgaccaacaacaagttgtgaatg

SEQ ID NO: 18883 - DNA, 2300 bp, Homo sapien
ccacactggctgtcaaggtggggcaggctaaacagtaaaaaatagttagtatgtaaattatctagtatgtaaggaggtgatagtgttatcgaaaaaaaaaacacagaggcaggaaaggcagctccagtgtgcagtgcagggagagaggtggagggcaggttgtagggctgaatggagaaggtgacatttgagcacagacttgtaggaggatgttttggggaagagcctttgggacagagggagcaggtacattggggcccaaagcaggcaggagtatatggtgtgcttgagaatcaagctcagtaagtgctgagcgccgagaggggcggtgaccgtcagaccaggtcaggcccagaggccttgggccttccctctgagggacctgggagccaggcagggttttgagcaaagcatgctgtgatccgactcattgtgaaaaaggcctctttacagggaagctgagagcaacagggcggccagtgggaggaggggatggcaggggaagggtccaagcaggaggggtatcgaaagtgcctgtttgtgtcccaggcacacaatggcacacatacgttaccatagaatgacatcgatggtggtgataatgtcaaacgccacggtgccacatctcagggactgattctgaacaaccgtgactcccagattcaggatagcctcttgcattggggtcgtggcttcatatgagggtcactctcctcaccctgctgcctgcagagccaccagggttcacactggcagattgcagccccagcagtaaaaaaaaaaaaaaaaaaaaaaaaaaaaaagaaatgaaagggagtggggaagatgggtaggaagagagagacagcaaatgcccccttcctcctgttctgatgaagttagggtatgaggggtacagagtgcagggaacacccaacagggacattatcatgccatggagcagctaatactgcttgagatcattcttcgtggtctccctgatgctctttgaggggtccccttgttgtctcgcagcctcttagcaccctcccgtcttcctcctccctccaagaaaggacaacttgacaacggcaggaatgaatgggtcggccgtctttcctcttgtctttctcgtcctgcagccacaatgatcctccaggcaggacaggctaagggtgcttcagagctcgcagaaccagcgtgtctttctaagaatgcttctgggacggccccgtcttggtggtgattagcagctgtcccgtgattgcacgtaacctgaaaacagaacctataagggaaatgaatgcctggtgcccttggttgggggaccttgctgttcatgcacacggtggagagctagctgggggccacgccagaacccccttctacctgataaagccttagaattgtggacatattgcagtctgctggaagcgcttagagcaggaaagggcaatgggagtggtggggtctttacctgtgtgtttctcccaaggttgagtgtgtttctgagtgatcccgccaggctcctgggcaacatggacactttcctccccaatgccttgcattcttccgctcccagaccaatggcccagggagatggagcaagatggtagcctcatggccaggtccctggagccaaagttttaaacagtgatattacaatgttactgccttgtgtggatttcacatacttccttttaaagaactgtcacattccctaccatatagctccaagagcttctgtggtgagatcattaggaggaaggactgtttttaaaggtgaaaactctgacgctccaggaggacacgctgtctccccaggtccatccatcgtgtgtgtgtgtgtgtgtgtggcgggtaggggagaggtgctgcggctcgaatgttggtttctgccataaccataattgagagtgaaaaacccgggccctgggagaaagaagccagtcctggttctgagtgtcagcggcagtgcagatgagctcacccggggaccagagccatttagaggatttgcagatggaacttcccctcggggtccaactgtgagtcactgtggttcctgtccctgcagcgggctccatctccaggcctcccacttcaccctgggacattatggtcgctggtcagacctcatgactcacttggactcttgagccacctctgggggtggagtctctctcctggcatctggacccttggtgctatcgacgaagcttggctggcgctcttagctgctatgtgcaagacgtgtgtcccagggaaagcccctctctctctgcagaggtcaagtgaaagccacggccgcagccaacaga

SEQ ID NO: 18884 - DNA, 2300 bp, Homo sapien
atgtacacatacaattcttatttttacctctatctagctatgtatgtatgtatgtttgtatctgtcatctctatgttatgctaaacatgggtttatacctctctggatgttttaggagcaaggaagagacatgattccagctttacctggggaaaatcaatctcacagcaatgagaagaaataaatgatgagttaaaattaatttctatatttttctaattattcaagtgactaatgtttggtgtgcagaaatttaagaagactgaggactagaatgaattataacgcaggagaaaacaataaccatgcatagtcagcaagaggcactgataccattttgagacgactggatgccctttcgtatgctaggaatatgcagcccgtgttctggaaagtggggagaaggtcaggcggctcctagcagcaaagctgcgttatcctcaatatcctgtaggggagggtttagggagttcggatatccctgcctttgacattcatcttggcctcagtttttctcttacctggaagcaagagaggagttgattgtgagttcagagtggaaatggtggccaatccagaccctgcactgccactgactctccgggaatgtcagcgccaggtgagagccaggattccagggccagacctgagcttgtccatagcctgggacttgaatggggggaaacttgggcacagtggcaggtggaaaatcaagtctgtgcttcaggggcatctaggaatgccctgtctatcttctcccctccccaaccccatttacccaggtgcctcctgttactttcaatactaatgccttctttttttttttttgagacagagtctcactctgttgctcaggctggagtgcagtgacgcaatctcggctcactgcaacctccgcctcccgggtccaagcgattctcatgcctcagcctcctgagtagttgggactacaggcatgcaccaccacgcccacctaattttttttgtattttcagtagagatggggttttgccatgttggccaggctggtctcgaactcctgacctcagtggtgggattacaggcatgagccaccacgcccaacctgatgccttctttttctgaccatttcctctccagcaatcccaccgtggccacaggaaaacctggcccaggagattccaatgttcttggcttcccctcctgtcacagcctcagtgattttgtgatttcatcttgcttctcagggcttgcttttatcaaaagggttggttagtcacaatggctgttaataggtgcaacaaggcatagaagacctgttaggggttgaacttttccccctacaactccaaaatattaatatattgcagtcctaatcttcaggacctccaagaatgtaaccttatttggaaatagggtcgttgcagatgtcattggttaatgatgaggtcgtactggatcagggtgggccccttatccaatatgactggcatccttgtagaaacaccacagtgtgaagagacagagattcacgcagagggaaaactatgtgaaaagatacacggagaagaccgtgtaaaaggtggaggatgaaggtaaggcagttgcaagccaaggaacgcctaagataaggaacgcctaagatagccaatgaccaccaggtctcagagaggcccgggacagattctccctcactgcccctagaagcaagcaaccccgctaaccccttgatttcggacctctggtctccagaagtggggcccagctgggataacctgactctagggccaccaaggtttgtcatcctgggcggcattcggggctggtgtgacccaccttatgcacaaaggccagaatagacctagcggcattgacaataggactggaatgccagctttgtctgtgaaggaagggcgcaagggaggacagctgtggtgggcaaaccctaaccatttccatccttgtttagcttttgttctgactacgacaggactacgtagtcgaactacgactcccaggaagccgttcggccttccccaccccctccccgcccaccccgctccgccccgtcccggcgcgggtccgcctggtatataagggccgaatggcccagccgactgcagggcgcgcaggcggcgcgggtgcgcggtgcggcgctggtatccagaggacgcggtcaccgcctctggcatttgtcgttctgcgcttctccgcaaggaccctctgttaggcaggcgcccaccgtaagcctcccgggccttgtgaacctgcaaacccaagtctgagagacgatccgccttcagcgctttccagcttggcag

SEQ ID NO: 18885 - DNA, 2300 bp, Homo sapien
ttattaagcacccttagttaggaaaatcccaaaatcatgttggtttctaatcttgatcctcgctggtttgagcttgccattgtccttctttctgaagtgctgggatctaactgtccattctggagacagtcgagggtaatgcatgagaactggcttgctcttgcagtgagactgcaaaggatgcaaagaaatggcagtgtcgttacgaagtgtgtcagaagactggagaagagggtttccgctgacgaaggaggctctttgaggactgggtgattcagagaacttcaggttttccaaatcctctcatttgtctccatttggattctctgggtcttatcccttcctgatcaatgcttcagcaaggccatgattttaccagtgtagaaatgtggccagtcctgtggatcaaattttacctttggttttccctttttgttgttgttttttctttttgagacagaggctcgctctgtcacccaggctggagtgcagtggcacgatctcagctcactgcaacctccgcctcccgggtcaagcaattctcatgcctcagcctcccgagtagctgggactacaggcatgcgccaccatgcccggctaatttttgtatttttgtagagacgggctttcaccatgttggccaggctggtctcaaactcctgacctcaggtgatctgcctgcctctgcctaccaaagtgccagaattacaggcacgagccacggtgactggccgttctattttctcagttgtatggactcaagagggaagagggtatttcagaactgtcataggaagcccttggtttggtttaagtctcttccttcagctggtaacttcgggacttgagcttgccagtgtctttttttaagctgtgtggcatggcttaacaggactgcctggccggcgcatctgtaatcccagcacgttgggaggccgaggcgggcggatcacgatgtcagtggatcgagaccatcctggccaacatggtgaaaccccgtctctactaaaaatacaaaaattagccggcgtggtggcgtgcatctgtaatcccagctactcgggaggctgaggcaggagaatcactttaacccgggaggtggaggttgcagtgagccgagatcacgccactgtactccagcctggcgacagagtgagactctgtcacaaaaaaaacaggactgcctattgggcctcatatgcttgactgtttgatggcagaaacaactcattggctacaggctttgctttgaatggacccttcttccaggtgaccggtatgatgagaagtagagaggtaggggcaggtgtcagcgtctggatcttctctgggatcccaacagaagacattttcgtcctgctgtgctgaagacgggaccggaaggccattgctcaggtattcactctaccagacggggctttacgctcccaccacttcctcgaatcccccgtgaggtagatattattatcctgactttacctgtgaggacaggaacgcagtggcggggtgggttctcactgtgcgtggaggcagcaggacgcagaaatcgacctcccccacgcgcctcgccagcagctttcagtttcgtggcccaacgccctgcactgcacgcctctcctctgggataattgatagttgaatctgtgtaagctggaagcaaatgagagcccagcggctgttctttcccattccttttagattgaggcaaagggacaaatctgcgatgtgaataatacagctccaggaatttttatcagcgcgccccacgcccggccctgcctgagggtctttctaagccacaggcgtcccttcccaggtcttgtctcttcccttccgcgaatgccctcggctcacccagcaggcaggtgtgatccggctccgcgctggggccaggtgaggccgggctgcctgccccggtgcacgttcccagggcgcggcgcccagtcggcggggcctgcgggctgggcctccccggggcgccgggcgtggcgccgggggcaggtccccgggctgccctgcagggcggccggccggcggccagcggctgtttacctgtgcagggcgaggcgagactcgtggcggtgccggggctttgcacgcaaggggcgatgcgccccggagggggagggacgcaaggggcgactactgttacctcgcttggagataccaaggccggtcggaccccccgctggccgaatgtgggtaggctgcccccagtttgtcccttcccagggtggatccagatttgggggccggaagtgtatacaacgtggggagcgccctttgggaaaaataataca

SEQ ID NO: 18886 - DNA, 2300 bp, Homo sapien
aatatcgctgcctccaccatacggatttagagatgaaccagttttttaaaacactcataggtgggaattgaacaatgagaacacttggacacaggaaggggaacatcacacaccggggcctgttgtggggtggaggaaggggggaaggatagcattaggagatatacctaatgttaaatgacgagttaatgggtgcagcacaccaacacggcacatgtatacatatataacaaacctgcacgttgtgcacatgtaccctaaaacttaaagtataatttaaaaaaaaaaaactttacacaaaaacgttctctttttacacatctcgtggtctccctcacatctgcatctctgtagtttgctgggtcctgtctggagtgcccttaccctcccgacctcccttttcctgtcagcctcctcgttctccttccgctcgcccaggcaatcttctgtccttcctaggagaggcagtctgattctgattcttctgtgaagaccaccctgagcacatcaaacaaaaccaaaccccacctcaaccattctgagcccaggctggagtacaatggtgtgatctcagctcactgcaacctctgcctcccgggttcaagcaattctaccacctcagcctcccgagtagctggaattacaggcacacatcaccatgtccggttaatttttgtatttttagtagagatggggtttcaccatgttggccaggctggtcttgaacttccaacctcaggtgatctgcccgccttggcctcccgaagtgctgggattacaggcgtgagccactgcagcctggcccagtttggaaatttctaacaagcagttgaaaatgcagggctggtgctcaagaaggcgttctgagcaacgtgatgggatttgggatgcacaggcacactcctggtgggcattggtgctgcaggcatgaaagatgttacccaaggagcgtgccaacaccaaggaaaaggaggaggtttgaagagagccagacctgggtttaacctctggtttttctagctaataaatgagcagctaagtaagcctctctgagccccaatctcctcatctctagccagtccaatcctatgatatggaccctgcagaagcctggagagctggaacttcacgatgtctacagaggacctagtgcagtccccaccaagcaggaggcattacaacagaagccacacacagaagacctcaaggcaacaggggaatctggagaaggtggtgccccaagtcagaagagaaagtggctgttaacattatttacattcttaggacaatatcttttttttttttttttaagtgatgggggtcttgagccgctacccaggctggagtgcagtggcatgatcacagctttctgcagccttgaattcctgggctcaagtgattttcccacctcagcctcccaaagagctgggagcctgccaccacaccaagctcaaggtcattaaaggtgcaagacaggatccttaatggtggcaacttcagtaggctgacggaggagaacctgagggtacgggggtgaggaggaaacaccggaccagaagcatcgaccagagcagagcatctcacttggtcctgcctgtgccaaggacaagctgacatggagaaggcagaagatggaatcaaaatgtcagcaattggcatgatcttacaccccagccctacttgctcatctccttgcccagaccctgagctgcgcccccttctttgaccttctccccatccctcttgctccattggcaatcggctcaagagtgctgactcgagagacagctgaaccccaagagctttccccagatgtggtgtcaggacggtagcaaaatatataccatttctgcttttttaaatatgcttgggtattaaagtaggaataaaacaatcctgatgtttccagcaatttctaaaaagtcctgatttatactctgaatgccaaatgtccagaatataatatgccatattatatactggtgtagactagagaaagttagataggaggtaagagggcaggaggaaagaaattggagggtgtaggggcaaaaaaaaaaatccttttttaatttttttaaatgggaagccttgggcatctttataagctgaatgaaagaagtcgacacagcggacactgtcataagtggaacaaaggatgaagctaatcatggaggcaagctccctggagagacagggacaaaatcaagaatgagctggagaaattaatcctggagaaagggagggacctgacttccttgaaggcaggcagccaggaagtaaagaggaaggaaaaatca

SEQ ID NO: 18887 - DNA, 2300 bp, Homo sapien
agcctcaaactcctgggctcaagtgatcctccccactcagcctccctagtagctgggactacaggcccagctaccatctgccaccatgtccagctactttttaaaaactttttgtagcgacgagatcttgcttttttgcccaggccggtctcaaactcttgggctcaaacaatctgcccaccttgtcctcccaaagtgctgggattacaggtgtgaaccaccatgcccagcctaagaatggttaattcatggccaattttgtttaatctctactccatccacttttctcttccatcatattttgaagtgagtctaagatattgtgtcattttatggctattgcagcgtgcaggaagaggtatgacattttggaagatgagttgatgggccgtgccacatgggtattgtgtctctgtgtgcctgtacatactctcttatgtggaattgcaatggctgatttgactcttccaagttgggggtcttttaagggcaaagaccaccctccagtggccaggctgtcttctcctccccatggagtgcttggtatatggtgcgaccgtcagtgtgaacaacctagttccactggaagaaagaggcctgttattggaccctttgggctatggccatcgagaccacgggtagcttttctgctcaggtcacgctctgatatgttgtcaaataaaacacaggacactcagctgggtttcagtttcagatcaacaacaaatatgcctgtaacataagtatgtcccacacattgcccggggcatatttatagtaataaatgacgttatttttctgaaattcaaatttaatcaggcttttttttttttttttgagatggagttttgctctgttgcccaggctggagtgcagtggcgtgatcttggctcactgcaagctcggcctctcgggttcacgccattctcctgcctcagactcccgagtagctgggactacaggcgcctgccaccacgcccagctaattttttgtatttttagtagagacggggtttcaccgtattagccaggatggtctcgatctccagacgttgtgatctgcccgcctcggcctcccaaagtgctgggattataggcgtgagccacagcgcccagcccaggcatcttgtttctatctatttatttattttgttttgtttttggctaaatctagtcaatcctatcctctggtcttttcacagaaatcctgcagatcaaagcctttgacctagggcagtgcttttcaaagggtggtcccaggacagcagcatcagcaactcctagctcaaaacaagatctcaggccaggcgcggtggctcatgcctataatccagcactttgggaggcccacacgagtggatcatttgaggtcaggggttcgaggccagcctgggcaacgtggtgaaaccccgtccctactaaaaaaaaaaaaaaaaaaaaaaaaaaacaaaaattagcggggcttggcagcatgcacctgtgatcccagctactcgggaggctgaagcaggagaatcgcttgaacataggaggcagaggctgcaatcacccgagattgggccacggcactccagcctgggcgaaagagcgagactccatctcaaaaaaacaaaagcaaaaacaaaaaaatcccaaaatgtcagccccacccagaatgacggaaccagagcctctgggggtgctggcattttgtgtttgaccccctccagtgattcttttgagggtcattgactggagaatgatgccgatgccatcacattacccgcccccagcctctcccgcaacacacacacagcacatcctgctctgctgcgcacccagtggcatggacctggctgccaaaggtgtagaagcataagtaacatcaggggtgttacaaagggctctttccttgggtgtttgtagcttcccttagggctgcagtcactcgcagactgctgggctcttggcctcagggctctgttctgcccgcccagatctgttcctgagcctgcagacggctgtgaaccagagaatctattcttcaggcgggagttgccagttgcggccaagggggcggggcccggaggcgggagggccacgtgtgcgggagggaagcaggaagtgactgcgggagtggagccggcgagagagtggcagcgggggctgatggaagtgcagtgggggctggagagggcaccctagtgagttggcttttctctccttcggtgcctttggttgggctcgaggcccggggtcggaggccatcaggacaagagtgtgggacttggaagggcagccacctggagcttggaaggggg

SEQ ID NO: 18888 - DNA, 2300 bp, Homo sapien
ccttaaaagggttagctttccaccacaccagcaaagaccctcaggacacacgattcatattcccagctgagcatctacccggaggtaagcagacgctcaggcacctgggccgtccttgccctaatccctccagtggtgtccacactgagtcctgcagcactggtagaaggtggtcttcggctcatctgcagagtgggtctgaagctacatgtagtaagcacaaggaggttctcattgaggacatggctctgcagtagagtcaacatcctcccaggcagctgctcccccaagcccatcatccacttctttcagctttgagtacttccaatttgttaccttgtgggtgaagtgcacacagaggcacgtgttgcaggcgagggagtggcagcggcagcgctgtccctcctccacgatcagcccatccctgcagccagggtagaacagcagcatcatctcggactctgctggctccagttattattttttttaatgaaacgtaaatctggtattaacagtttgagaacttttaggaaaggaatttgagggcagagtgggcacttcctggctcttccttcttttcctggaaaccagtcagattactggttttaaactggaggtggcaacaggcattgtagcaactgtgtggccagaggatgccgagttcccctgagcacaattccacgatgccctcctgatattactattacctctctgcctctccctcttcccactgacggtgagcagacacagccctcttccagtgagctagccaccccagcccttccacttgcatacacatgtctaaaagagatgctggctcccagattgactcctggaacttaaggcaattgcagctcaatttccatctcaccctgagctccaggatgccaagatttaagccctatcatgaccaacgtctcagagagagatggaaactcctgatccccatctcacagtgggtaccccaagatacagcttggcccagatagaagagagagctggctgctgctgtacctggtggttgcttttccatgtcactcatctatctctaaggctcaccccacctgccacacagcttctggacttttacttttccctggtgaattggaaatcagataataggatggacaaatcaaggcagctcagctcacagagaaagctagttggggtttgctttctgttttcacatcctctaaaactgtactgaggatggtgtgtgtgtgtgtgtgtgtgtgtgtgtgtgtgtatacctatgtacttggaggagggtgaggaaggggaggctgcaggattgattatgacttattaaactattggaaaagaggctgaatcatcacagtcaaaaataaacagctgcaactccatgcgactcccacttcttgcctgctcccctttgctccctcacagcatgtaggagagactgtgctgggtcagaccagcaggtgctgactgacgtggctacagcaaggggaccacctgtatggccgctgcacctccaagctgtgggacgcagggacagctgggaccagtcgacgtccactggccctctgatggctcctaggactgaatcttggactccaggtgcgggtttacactccctgcgctcattgggaactgcatggagaagcgctatcccctgagccctttttctccctactcttagcctggccctgcgccctgcgcccggggctggcccacggtaaacacagctttgctaacttgtttggctaaggaaatcacagaggtcccggtataagtctgggtcaccccggccgccactccagctgcctagaatatatgggtggaagggaatcgactctgtgaaatcagagggaaaatagcgcttgtccttgccatgagtcttgaggagaccgaaaacgcttaaccttttacgcccccgcaggcgggtcccctctctccccgctccccggctgtctgtaagctctgcctgcggccacccgcaggcgtttcagccggtctcacccctgtccttctgcaggacccgggaggaggggttgggggggcggagcgaagccgctgtgacgtagcgggaggggggcgtggggaaatgtgccgaggggcccgggctggctgggccagtcccagcggcgcagccacccatgcgcgcgcgctcgcaagaccaccagcgcccagagccccagtctgaggcttggcgccgggggtctgcgggcgaggggagctctctacgtgcgaggggctagcgggagccggcacaagagggtcgaggagccaggaaccccaaacgtccggcgccaggcgctagccaagctgctgcgcgc

SEQ ID NO: 18889 - DNA, 2300 bp, Homo sapien
aaatctgatgctataattccatccaaatacacagttaggtttctaccatagggaaagctattctctactttttgaagtatctgtttcaaagataacttgctctctggttctcttttatctaaaagagagaatcaacatgctaatttaaaggttaacatcattttaattcaaaaattttagtctccattccatatttaatgatgaagacaaatctgctgggtgctgggagggaataaaaagtaatgcaccccattgatttcagagtatctgatcacttgggttatgcaagctgctacttacccgccattagcatgggtagttaagtgctgattaaacctaagtggactcagtgaaaaagatattgggaaaaataatatgatattgtggcctatgttgaatgatgttagcttgtgtttcagtaacagagttgggtaatactggacgtgtagatgaagctttagcagggctgggcacggtggctcatgcctgtaatcccagcactttgggaggctgaggcgggtggattacctgaggtcaggagttcaagaccagcctggccaacatggggaaaccctgtctctactaagaatacaaaaattagctgggtgtggtggcgtgtgcctgtaatcccagctactcaggaggctgagacaggagaatcgcttgaacccgggaggcgaaggttgcagtgagccaagatcgcgccactgcacttcagcctgggtgacagcacaagactccatctcaaaaaaaaaaaaaaaaggaagaagaaaaagaaacttaagtggggttcatacatagcatggcagagggacactggagaataaaatggcatgcagagaggaacacgcgggccagtggatgaggcttctagacctggcagtgaactggagtctatttgcttacacaaatttaaccttctctccatgatggaatacaagtgtttcttgccaaaactcgcagccccagctgccctagatgaggagcaccgtgctggaaaagtgcacaggctgatcacagagacaggtaggaagcaatggactgttaaaatgcatgttccgggctggggatggtggctcacacctgtgatctcagcactttgggaggccgaggctggggaatcgcttgagcccaggattttgagactagcctaggcaatatggtgagaccctgcccttaaaaaaaaaaaagaaaagaaaagaaaagaaaaaaagattcatattcctgatcagctctgaatgtgactattcaatgaagacagtaaagttacagtgtaaggcacacatgacctttggccttgctaaagaagagtggctgaaggtctagcaaattaatgcttgtcttaggttacctgttgatttaaaaacaacaacaacaaaaacccataaaaatagtaaaatataaaaacaaattagtgttttatagaccctggggaaaagaattttcagcaaagtacaaaaatttaaagcattcctttctttaattttgtaattctttactgtagaacagctcaaaatatcagttctgttttaagtaacagaattgataactgagcagggaaacgtaatttggattgtaaaattcttgctttaataaaaattctttaaacagtcaaaatagaaagaaagaaagaaaggtggcaagagaattatcaaaagtttccatagatggttgggaagatctgattagtgtttccaaaatgcttatcattctaagaatcccaatagctggcaagccaagcagtggaacttatagtaacaacaatcaatcacttgtctcatcccacatttttgccaaattcaaaaacaccaaatttcccatcaaatgttctgtcagagtaaacctttacctaagtgcttgttttgcttttaatatgtgaatttctgggaacattcccatgggcagcctctaattttttttttttttttttgagacagagtttcgctttttcacccaggctggagcgcagtggcacgatcttggctcactgcaacctccacctaccggattcaagtgattctcctgcctcagcctcccaagtagcagggactacaggcacgtgccaccacgcccagctaatttttgtatttttagtggagatgggtttttgccatgttggccaggcaggtcttgaactcttgacctcaggtgatccgcctgcctcagtgtcccaaagtgttgggattacaggcacgagccaccgcgctcagccaatttttcctcaactctctctttcctggacgggctgcgttggggggaggtgcagggaaagaacacctctttgcttagacattggtgtc

SEQ ID NO: 18890 - DNA, 2300 bp, Homo sapien
ggcaggttcaggggacaggcaggaaggaaggaagggaaacagaacatttaaaacctagacgagcacaccacatggtgattctgtcgaggacgtcattgtgggtgcccacggctgccaccagcaccaccgccagcattagcagctgggagctggagctaagttcactgcccttgctgtccttagggagtggatgttgccggtgatacctgtgccaccaccaaaatgcaatcgcccctgtcacctgcgatttttttttttttttttttttgagacagggtcttgttctgttgtctaggctggaatgcagtggcccaatcatggctcactgacgcagtctcgacctccagaggctcaagtgatcctcttgcctcacttgcctcttgtcaagtggctgggactacaggtccacaggcccacaccactactcccggctaattttctttttctttttttttttgagacggagcctcactctgtcgctcaggctggagtgcagtgtctcgatctcggctcactgcaacctccgtctcccaggttcaagtgattctcctgcctcagcttcctgtctgctgcctcagcctcccgagtagctgggattatagatgtgcgccaccacgcccagctaatttttgtatttttagtagagacagggtatcaccatgttggccaggctggtctcgaactcctgacctcatgtgatccgcctgcctcggcctcccaaagtgctgggattacaggcatgagccacccggcgcgcgcccctttttttgtatttttttgtaaggacggggtttggccgtgttgcccaggctggtcttgaactcctgggctcaagggatccacacgccttgggctcccaaagtgctgggattacagcctgcttcttaatgtcactaactcttcacccaagtcctaggcgcttgtgcctgctgtgccagtcccaggccgcaggctggcaccgtagctataaagggcgccagaaaaaaagattttgctagatagcgatgaattccccaatcacagaaaggagatactgcggatgcttatcagccgaataccagtaagtgtcccttgcagaatgggattagagactgcaaactgcaggcctgccaacagagggtgctctgtgggaaattatgtgaaaacgtagaaaagagcgcgagccagtaatttaaaaatcgacgtccaaatactcactgggtcacctatcagctatgtaatttgggcaggtaaataagcttttgtttcttttttttttttcctcataaatggactaggaatattactcctacctacctggcatggccgatgtgcgagaaaatgagataatctcgtggacaggctctgaaaactgcacttttactgagtaaaaaaccctttgcctctccgggcccccgtttccccatctgtaaaatgagtctgtaaagtgagaatgatactccctacgccgcaaggctcttgcgggttaaactggaatattataaatgcaccatttatttgcagattgaaattctgtgcgtccggaggtggcgggtgggagagggaatgagcagggatgcagggtaggccctgagttgctgggggctcagcatggccgctgcgcacattgcatcattttgtcgacactggtgtgggtgaaatcttccaaaagaaattaaaacagaaaaaaaaaaaaagaagggtctgggacttagcagaaacaagccacaatctccagattctactattcctgggccacgtgaggagcgcccacccgtctggcgctgcgttccccggggcgtcccagcctctcccgcccagcccgccgccctcctcccccatggccaccaaggtcaggctctcgcagggaaaacgtcttcaggggctaaacatcggttttaaacgaaatggaaaacctccaacacgaatcaacagcagaggaaaagcagacgccaaacaagcgctcagaaccccttcaggggcggcgtggtagctcttcccggggaacagcgaggggcgcggatgtccctcttcctaaaactgcacgcggggtgcgatccgagacccagcggcggcgagcgcgcccgagtctgctcgcgggcgccaggcgcgcggagagcggcggctgcgcctgcgccaacgccgtcagtccgcggggcccgatcccgacacctaactccacagagaagctctgctcctaagggaaagggaagacttcagccacagtttcgcagccaacctggcgacctcacctctctggcgacctcacttcccagccggctccgtttaagaaaaccccgcgcaggaccgcgcccgccccc

SEQ ID NO: 18891 - DNA, 2300 bp, Homo sapien
acattacaaagaaacagaagtcccccaattcctgctctgaaggagcttacaacctggtcgaggaaataaatccatggaaacttgacgagaaaaaaatgtaaaaaaatttagaataacaggtcaggcgctgtggctcatgccagcactttgggaggccaaggcaggtggattgcttgatcacaggagtttgaaaccaacctgggcaacacggtgaaacaccatctctacaaaaaataccaaaaagtgagcgggcatggtggcacatgcctgtggtcccagctacttggaaggctgaagtgggaagatctcttgagcccaagaggtcaaggctgcagtgagccatgatcgcaccactgcaccccagcctgggcaacaaagtgagatgctgtcccaaaaaaaaaaaaaaaaaaggctgggcgcggtggctcaggcctgttatcccagcactttgggaggctgaggcggtggatcacttgaggtcaggagtttgagaccagcctggccaacatggtaaaaccctgtctctactgaaaatacaaaaattagccaggcgtggcgacacgcacctgcgatcccagctactcaggaggctgaggcaggagaatcactggaacccgggatgtttgattcccaaaataattgtgtatatttaccctaggagttctgaaggaagtcagtttaggcttgggttgttcttagtaaggagggaccttaagggcatgatgagatttggaatttaggtttcttagtccatttgtgctgccataacaaaatacctgagattgggcaatttataacacaagtgtatttttcacagttgtgggtctgggaagtccaagattaaggcactggcctttgatgtctggtgagggccttcttgctgtatcctcacgtgggggaaggtagaagaacctaaaagttgcctccagcccttttatgaggcactgatccatttgctgtggtttggatttgtgtcttgcccacatctcatgttgaattataatccccaatgttggaggtggggcctggtgggagacgaaagtttgcctcttcgtggggctgagcaaaaatgcacgcgtgtgtaggaaaaaccatgggatcttacaacactcctgactctggcaactcttctacactgggctttgatgacttgctgagttgtactgaacccagcttaatagaagttttgtatccttaaatacccccagatttcttcctaagcctacagaacactgagattgcttttgttcgttcttctggtttagttctgtgccttcccctgcagccacagcagccatcccaggagaagttctacagcatggctgcccagatcaagctactcttagaaattccggagaagatctggagctcgatggaagcctctcagtgtctccacgccacacagctctacctgctctgctgccacctccacagcctgctccagctggattcttctagttcccgatacagtcccgtcctctcccggtttcctatactcatccggcaggtggcagccgccagccacttccggtaagtggatccagcgcaaagagctgctctggtggtggccaggcttcacattacgggtttatggcgtttgtcttctttcctgatgtaccaaagctctttacccaagatgtgaaaaacaccctggcgacttctgtcatcatttttctaggtcaactattctgcatgaaagcaagatgttgctcaaatgccaaggtgtgtctgaccaagctgtggccgaggccctgtgctctataatgctcttagaagagagttctcctcgccaagccctcacagacttcctgctggccagaaaggcaactattcagaaacttctcaaccagccacaccatggtgggtgtggcttctggccaacatttggtccttaaatatgggatggagaagggtgagctgcgggagactgaagcctccagagcgtcctctgtctttcactttgggaaaggtaattgtttcaaagaggatggtttcttcttttaggtgctggtatcaaggctcagatttgctcattagtggagttgctggccaccactctgaagcaagctcatgcccttttctacactttgccagaaggactgctgccagatccagccctgccatgtggcttgctcttctctactctggagaccatcacaggccagcatcctgccggtgagctcttagccaagctttttaaattctggttcactcaactgataatttgctcagcgtctaccgtgtgccagccaccatgctaggctctggggatggagcagtgaactggacaaatagaggcc

SEQ ID NO: 18892 - DNA, 2300 bp, Homo sapien
ctactagaaggtgtaaaagatgcccgctgacactaccaagtagcctcttaatagaaatgtagaaaatatacaggacagggtggagatgagctcttgaatttagtagggtgaaagagttaactgccaacccggcactatcattgtacttgtttggagaaaatctgttttgttctggtgatgatggttttatcttcccttttagttgggtgggaagtaacagaaaatttgtttccccaaaagtttgacattttcttgttaatacacgtttcatttcagtacgatgccaactgttaagcctgcaggaatcctcctgggtatttctgaattgtgctgtgtgcatgtgtgtttgaaagctcaaacagcttgtcttcttacagcatcgagttgtttgctttattgttagacacaatattagcagtgtatcctttccgtattccctaccatcgaacccattaagatctaaaatccttgtcaagtatctggctttaaaagttgggagatggtagtttaaaaaaaaaaaaagctcttgcaaaaaccatccagtccctaagcatgggctatgttgcagcctcttccagaacagtttccactgcagtgatctttcagttctgcccacattaggttagcaggctgtggagagaagtgcctgtgtctacccttttcccaagacagtcctcatttccaaattctagttttgtcacaaaggctcatgctgttccgtgtcctcttcaaatctggaccgacagcaaagtcctctgactagagccatcgtgcttctcagctccgcttgtgtgtgccgtgtggactccgagtggcgtcgcgcggagggcgagtgggcaggagggctcaggccaactctaaggcacttttctctacatccaatggcaggttgtccccccggcacgctccacagctggtgacccgacagttcctggctccttgttcagacagcttgtcagtgaagaagacaacacgtctgcaccttcattattcaaacttggctggctctctagtatgactaagtaacatggcaacacatctgtctctccctaaataaatactaccacattatttcttctaaaggtgcctctgctcatctgattctcagccacaccaatctttccagtttcactgatggaatgtggccccctagttactgttgggggttactttaagcatcaagttaatccttgtcccaaaatttcacaatacttgttgctttagacatcagttcaggtagcttacattttatcagcgttcaacaacaccttaattgttgacactacaaggtggaattgtcaatgagatcatgtaagctgctgactgaccaagtttgtaggacaaaaagtcattacatattactttacttgcagaactgtgccatgtttcctactaaagtctgaggtgcagactctggtggaatagtgacacagaagttatctgggtatacaagaatctaaaagacattctctctggaaatacaaatatataacaaagagtagagactattattagggagtgtgcttcactgacagtctgaattggatctgattgttctcctgttacacaggagagagtactttcaatagaacatctacatactgagaggtagtatggcagttaatttcagtgcaagactgaatcaagcttcctatattttggaaaaaaacttatgttttttcatggaaactagatactctttactagtttattgaataaaaaaaattgaagatcccgcatttttaaaaggccctttacataaagtagagtttctagttgacagatttggaaatcagtctgaatgggacatactatggattcaacacacagaatgagttttcctcaaaccactaccttgacatagatttgataccctccctcaaaagaatcctataaaaaattgcttcaaagcccctttgaaattgcaatagtgcagcaaaaccacaagtaaacaactgcctgttaacctgttatttcaaatatagactgaaaagccaacaggcatttttcgtgtgcaatttttcttttaaaacaagttgtaagttgaaatatcaaatctgcacagcgctgtcccttcacagaaggcaagaaactgccggcacatcatgtcagaggccgccctcggtgctgtaggctgtggaagtgggcctccctcagggtctggttgatgtggaagtagaggccttggcacagcgcggactgctcgggcacgggctgaggcgtgttagggctggatccggccatggtctggctcaagctgccttccggcccgctggccctgtccgggctattgatgctgc

SEQ ID NO: 18893 - DNA, 2300 bp, Homo sapien
ggtgcccaccaccaggcccaactaatttttttgtatttttagtagagacagagtttcaccatgttggccagagtgatctccaactcctgacctcaggtgatccgcccgccttgacttcccaaagtgctgggattacaggcgtgagccaccgcacccagccgaaaaaccaccgtcttagaccatcctagagctggcagagctggcccatcatactccattaaacactggcaggaaaagcctgtccaaatcaaataacttctttaaaacatgttgagattatttgtgtacaagataaaaggaatctactgccagtataaatgcattcagattagttatgtacagtagaatttttatttgtaggaaatatttagattttttttcagatatgtgagacaccccaagagaatatcgtaagtataaactgggtttgggaaagaataatatggcagtcgggtcagattcactgtatctaaagatcttgctcctaattccgatggcatgtctgtaattgggcccccaatttcaaatttagtccactcttcttttctatacaaggagaggctttatgctccacctgctacatgacccaaatcaataatccaatgcagcagcttggggaaccctaggttttcactatgggaccaaataaactcagaatacttttgagaacttcaatcacatgaaataattatttcagagaaggatccttgtggaaagaccgtaacaggaagagcattctgaggtaacctttcccaactttctcctccacacattcttgcagaggaaattaagagagagaaaaaaattaagaaatcccaacttagtccggactctagtagtacatgtcaagcacagaacccctaatttaagacccgcgtcccgaggccaggctccctcgggaaggtagcgagtgcatcgcgataaaatctttcctcccgccttcggagtcaaacggccccgcaatccaaacagtttagaatccagcttgttcttaatgccacagtcaagagaagatccataacccgccttggtcatctgcccttctgtgttcacaaccgttcagggcacaagttcttcggtctaaccgaatctttccctgctgcggggttaagcccaacctttctttctgaccttggggagccggcagctccccgcccggtgccctcacaaaagcctttgggggctccctctccaagatgagacgtttatcccatccccccaccctcctaaatttaggacaggaaagctttagggccaccgtctctcttccgggaccgatcacacttcgttccaaataggaaaagacaggggggaaaaaagatggaggggcgggagacctggaccccggagagtcaccttccagctacccacaggaaccaagcatccgatcactcgcgcatccctctcccctcctcccccggcccgcagtgcaccccacagggagccccgccgggtccactcttgctccgacccccatttcgcgcgccccctcggctctatctcccagatcctcaggcgacgaatggaaagggggtcccttccctctcacctgggacggaggcgctcgctcatggcagctggcggatggaagctacgcggcgccgctccgcgaagagagggaacagagggggttgtgtttcggcggccgccacgcccaccccctcgggccttggctctcgcagccgctcgggtggacgcagccggtggcgagtacccctcagtcggacccgtaccaccactacttccggcgtctgctccgcgcccccccatgtcgctgccgccgtggtaccgccctctcgcggctgcgcagtggcaccatcccaaccgcaccgactggtaaccccgcccacgggaagaggcgggctcggagcgggaggagcgactaggagcttctgggagaaaggacctcccctggggtggcagaagcgctcgcctgttcacagccaacggagggtacggtataaaagtcaagccaggtttcaaataaattcaattatgtcataataatatcatacaagtatttgagttgaatccgtgtaacatattttaaaacaggcggacctatccggcagtggtgcagacggcctgacgaggttccttggccgggggttgggcaggggcctggggggcttccctggggggcttgtcgccggggccgcctgggctttcaggtcttccgaggtgaggacggtgctctgtggggagcttgcaagggcgggtttgttttccgcggcccacgttctaagtctgggggagactctcctgagcggagagggtagggaatcgggtgccggggccgg

SEQ ID NO: 18894 - DNA, 2300 bp, Homo sapien
tgacccaaatcaataatccaatgcagcagcttggggaaccctaggttttcactatgggaccaaataaactcagaatacttttgagaacttcaatcacatgaaataattatttcagagaaggatccttgtggaaagaccgtaacaggaagagcattctgaggtaacctttcccaactttctcctccacacattcttgcagaggaaattaagagagagaaaaaaattaagaaatcccaacttagtccggactctagtagtacatgtcaagcacagaacccctaatttaagacccgcgtcccgaggccaggctccctcgggaaggtagcgagtgcatcgcgataaaatctttcctcccgccttcggagtcaaacggccccgcaatccaaacagtttagaatccagcttgttcttaatgccacagtcaagagaagatccataacccgccttggtcatctgcccttctgtgttcacaaccgttcagggcacaagttcttcggtctaaccgaatctttccctgctgcggggttaagcccaacctttctttctgaccttggggagccggcagctccccgcccggtgccctcacaaaagcctttgggggctccctctccaagatgagacgtttatcccatccccccaccctcctaaatttaggacaggaaagctttagggccaccgtctctcttccgggaccgatcacacttcgttccaaataggaaaagacaggggggaaaaaagatggaggggcgggagacctggaccccggagagtcaccttccagctacccacaggaaccaagcatccgatcactcgcgcatccctctcccctcctcccccggcccgcagtgcaccccacagggagccccgccgggtccactcttgctccgacccccatttcgcgcgccccctcggctctatctcccagatcctcaggcgacgaatggaaagggggtcccttccctctcacctgggacggaggcgctcgctcatggcagctggcggatggaagctacgcggcgccgctccgcgaagagagggaacagagggggttgtgtttcggcggccgccacgcccaccccctcgggccttggctctcgcagccgctcgggtggacgcagccggtggcgagtacccctcagtcggacccgtaccaccactacttccggcgtctgctccgcgcccccccatgtcgctgccgccgtggtaccgccctctcgcggctgcgcagtggcaccatcccaaccgcaccgactggtaaccccgcccacgggaagaggcgggctcggagcgggaggagcgactaggagcttctgggagaaaggacctcccctggggtggcagaagcgctcgcctgttcacagccaacggagggtacggtataaaagtcaagccaggtttcaaataaattcaattatgtcataataatatcatacaagtatttgagttgaatccgtgtaacatattttaaaacaggcggacctatccggcagtggtgcagacggcctgacgaggttccttggccgggggttgggcaggggcctggggggcttccctggggggcttgtcgccggggccgcctgggctttcaggtcttccgaggtgaggacggtgctctgtggggagcttgcaagggcgggtttgttttccgcggcccacgttctaagtctgggggagactctcctgagcggagagggtagggaatcgggtgccggggccggcggagggtcttcctggaaccgcaggaggaaatcctcggtggggctgcgggaacggctgtccctgacccaggagctgccgggccgaccccatccactccgcagaatcagaacagctggcagaatcagaacagctttcagggaaaggaagggtgcggggaggtgggcaggctggtaacgcagcgggaggagggaaaggcggctggagagcgccggaggtgagggtgaggattagtggaactattgaggtcctccttgagcccggaggctggggaggtcttaactctctgctttccggaacctgtgtttctatttggttcagtatcgtgccgcgtttactcactgtgcatgctgccaagtcacctgtctgatcgtgtcctacacaggctgacattcacgtttcattctgccacactcgggaacggtgatcggggaagcatggggatccgggagaagcacccacaaaactagcatcctcctggaggagctcgggtaagaaaacagacacccacgtatagacgttatcgtgggaatgtaccgggatctttcaagtagggttgagtgtgaggtggagtggaggcagaa

SEQ ID NO: 18895 - DNA, 2300 bp, Homo sapien
tacttatagtttctagtacaacagattactggcaaattagtttgacatctttgttaaacatatacgatgtaaaaaattaaaaaaaaaacatttataccatgtatatttgtacctgttattctttagagtccagaaaagaaaatgtttaattccaatgtttagttgaaagttatttcctttctacatctcttattctttctataaagttccagagggcaggaaacatatctatcctgcacacagctgtatgtaaaaacctagcactgagcctggcatacaatatttgttcacttaattctttagatataaacgtttaaatattattcagtactacaactgataatatcttctgactaccaaagagattaaaaagggtgactgaaaccacttacaaaatagacacaatcttcaccaatccattcaataaagcaaccaacccaccttatcctgtacgaagtccttcaaaacaaaactgttttctgccaacagattacagtaatcatttttactttgttgttgtttggtctttttttttttgagatggagtcttgctctatcactcaggctggagtgcagtggcgcgatctcggctcacagcaacctcagcctcccaggttcaaacggttctcctgcctcagcctcccgcgtggctgggattactgggattaagggcgtgcgccaccacgcccagctaattttagtatttttagtagagacggggtttcaccatgttggccaggctggtcttgaactcctgacctcaggtgatccacccgcctcggcctcccaaagtgctgggactacaggcgtgagccaccgcgcccagcctgctgggattacaggcgtgagccatcattctttctttctttggaggtacacactaacaggatgaaagccacagactgtttgtttacaataatacacacaaatgaagccagtccatggaccttcggctaacaacgttaggaagggcttgacacctgctagacgtttctgcctccactccacctcacactcaaccctacttgaaagatcccggtacattcccacgataacgtctatacgtgggtgtctgttttcttacccgagctcctccaggaggatgctagttttgtgggtgcttctcccggatccccatgcttccccgatcaccgttcccgagtgtggcagaatgaaacgtgaatgtcagcctgtgtaggacacgatcagacaggtgacttggcagcatgcacagtgagtaaacgcggcacgatactgaaccaaatagaaacacaggttccggaaagcagagagttaagacctccccagcctccgggctcaaggaggacctcaatagttccactaatcctcaccctcacctccggcgctctccagccgcctttccctcctcccgctgcgttaccagcctgcccacctccccgcacccttcctttccctgaaagctgttctgattctgccagctgttctgattctgcggagtggatggggtcggcccggcagctcctgggtcagggacagccgttcccgcagccccaccgaggatttcctcctgcggttccaggaagaccctccgccggccccggcacccgattccctaccctctccgctcaggagagtctcccccagacttagaacgtgggccgcggaaaacaaacccgcccttgcaagctccccacagagcaccgtcctcacctcggaagacctgaaagcccaggcggccccggcgacaagccccccagggaagccccccaggcccctgcccaacccccggccaaggaacctcgtcaggccgtctgcaccactgccggataggtccgcctgttttaaaatatgttacacggattcaactcaaatacttgtatgatattattatgacataattgaatttatttgaaacctggcttgacttttataccgtaccctccgttggctgtgaacaggcgagcgcttctgccaccccaggggaggtcctttctcccagaagctcctagtcgctcctcccgctccgagcccgcctcttcccgtgggcggggttaccagtcggtgcggttgggatggtgccactgcgcagccgcgagagggcggtaccacggcggcagcgacatgggggggcgcggagcagacgccggaagtagtggtggtacgggtccgactgaggggtactcgccaccggctgcgtccacccgagcggctgcgagagccaaggcccgagggggtgggcgtggcggccgccgaaacacaaccccctctgttccctctcttcgcggagcggcgccgcgtagcttccatccgccagctgc

SEQ ID NO: 18896 - DNA, 2300 bp, Homo sapien
cctcgggatgctgaggcaggacaatagcttgaacctgggaaatggaggtttcagtgagccgacactgcactccggcctggtgacagagtgagactctgtctcaaaaaaaaaaaaaaaaaagtataagtgaaaaacaggactgtgtccttggccatgtatatatttgtgcattatgcatacattttatgtatatctgtgtgtgtgtgtgtgtgtatatgcatattactaaatgttagtagagcttcatttctcattctttgattgtggtaattctaatattttcttcttacaccctagtgcatattctatttatcactttggaaacctctgctgtaatcagtaacctttggctgggcgtgggcgtggtagctcgcgcctgtaatctcagcactttagggggctgaggtgggtggattgccagagctcaggagttcgagaccagtctgggtaacacggacacggtgaaaccccgtctttactaaaatacaaaaaattagtcaggcgtggtggcatgcccctgtagtcccaactacttgggaggctgagacgagaattgcttgaacctgggaggcggagtttgcagtgagcagatattgtgccactgcactccagcctgggtgacagagtgagactctgtttccaaaataaataaataaataaataacctttggttcctggcctaagttttttattctttaccattctgtccttgaataacgtgtttaagggtttttaaacaattttttatactcatataatgactagttgacttgctgtaaccgtaagtagcaaacatctagcttgttccaaatgaatttaaaagatacaacacataagtaaaatattggtatgtacaaactatgtgcttctcataatctcacatttacctttttcaggaataggatgagtgataatccacccagaatggaagtgtgtccttactgtaagaagccatttaaacgattaaaatcccacttgccatactgtaagatgataggaccaaccatacctactgatcaaaaagtttatcagtccaagccagctacactcccacgtgctaaaaagatgaaaggaccaatcaaagatttaattaaagctaaagggaaagagttagagacagagaatgaagaaagaaattctaagttggtggtggacaaaccagaacagacagtgaagacctttccactgccagctgttggtttggaaagagcagctactacaaaggcagataaagacatcaagaatccaatccaaccatccttcaaaatgttaaaaaatactaaaccaatgactactttccaagaagaaaccaaggctcagttttacgcatcagagaaaacctctcctaaaagagaacttgccaaagatttgcctaaatcaggagaaagtcgatgtaatccttcagaagctggagcgtctttactggttggctcaatagaaccttctttgtcaaatcaagatagaaaatattcctcaactctacctaatgatgtacaaactacctctggtgatctcaaattggacaaaattgatccccaaagacaggaacttctagtaaaattactagatgtgcctactggtgattgtcatatttctccaaagaatgtcagtgatggggttaaaagggtaagaacattattaagcaatgagagagattccaaaggcagggatcacctctcaggagtccctactgatgttacagttactgagactccagaaaagaacacagaatccctcattttaagccttaaaatgagctcattaggtaaaatccaagtcatggagaaacaagagaaaggacttaccctgggagtagagacgtgtgggagcaaaggaaatgcagagaaaagtatgtctgcaacagaaaagcaggaacggactgtcatgagccatggctgtgagaacttcaacaccagggattcagtcacaggaaaggagtctcaaggggaaagaccacatttaagtttgttcattccgagggagacgacttaccagtttcattctgtatcgcagtcaagtagtcaaagtcttgcctctctagctacaacatttcttcaagaaaagaaagcagaagcccagaatcatcattgtgtccctgatgtaaaggcattaatggagagtcccgagggacagttatctctggagcccaaatctgatagtcagttccaagcatcacacactgggtgccagagccctttatgttcagcccagcgtcacactcctcagagccccttcaccaatcatgctgcagctgctggcaggaagactcttcgcagctgcatggggctggagtggtttcc

SEQ ID NO: 18897 - DNA, 2300 bp, Homo sapien
tgggtggggttggatttggggggtccttactctttccccgttggtctctgaggttcacctgagaaacctagggccccgcagggcacttcttgctttaaagatgttctgtgggccctttctgtctaaaggaaccaggaactacttctgggtaataatttggtcatttaaattcagatctcagtcaccattttccaaaatgggatgggacccaaagccttctggcccgatgatgtcctggcaccagccccgccacctgccccagcgggtccagagcatctccctccacgtcccccatgtggatagggctgtgcgcccgtttactgggcacacgccgctctgcaccgctgtgatacgggccatatgtcttagcagctatgaccgccatatgctaggcattgttctttgcattggcctcagttcattctcataacaattccgtgaggtccatgccattcatatcacccccattttacaggggaagcagctagaggtgaaagaaccagcccaccccacaggtctaggaaacagaggagctggacatggaatgacaaggtggggccggtggcctggcttggccaagcagcacagagacggggctatcagcctctcagagtggggcatgcccatctcccacggttctgtgtgcccaagggaagtgtcagggaggcactggctgctccagcccccttcagcggcagctgctgcttcccataggtcacctctgcccaccaggcggccaaggccctgcccttctcagggttgctctgcctggcctctggctctgctgggcaggaccagggctctgggttgggccccttgcctctcaagcctgcagcctcgggcctgtgctcctgctggcatccaggctactcctgcgtggtgtccatctttgaccccagagttacacacgcccagccactcctcctctctccaccaaggtggcaccacattcccagaagaaagtagaacaaagggacagaggctgtcaggacacatgaaggcagcaagggattctcaggatcctcaaagtttaggatctagtttcctctccctgctcattttattttactttatttatttattttattttatttagacggagtcttgctctatcacccaggctggagtgcagtggcatgatctcggctcactgcaacctctccctttcaggttcaagcgattctcctgcctcagcctcccgagtagctgggactacaggtgcctgccaccacacccggctaatatttgtatttttagtagatatggggtttcaccgtgttagccaggctggtcttgaactcctgacctcaagtgatccgcctgccttggcctcccaaagtgctgagattacaggcatgaaccattgtgcctggcccctgctcattttagagataggaagactgaggctgggaggacaagagattagctaaagtcccacgagtagagcagagcagagcagagcaggtggaattctctgggctggcctgggtgctgcagcctgggaggtgagggacaggttgagggatggcgtgagcagcagactgcgtgcagagctgggagtggtatagctgcaggggtggctggaagatccctgaacgcagggcgagatggaggggtgggactttccaggtgtgtgtggcactccccacccctgcctggctcccctcgaccctcatatgacagactccccaaggcccccactccctccacacttgggcaggtgcccttcctggccacccttcacccgcagcacttaacacgtacacgatctttccctgagccctgagggccctgatttaagatgccagaaataaaagttaggaatgaaaatgggagaccttatctttattcttcccctttccgatctcctctaggccccgtggcttcctgccaacagacagatgggagactgggaagaatattttggtgggagggagtggtgcttgcaggcagatggatactggctctacctctaaaacctgttgctctaacctactgagctgctgttctccacagagactcccaggagagataggaggagccaaggatagctgccttccctggccagaatccaaccctaaatgacacttggcatgttaaaacacacttgtcaaggccacagggttctgatgaatcttgttttcttcttctgccctgctttcttccaaaaaggattagaggcagcttacaaaaattcataaaatacaataggataaaaatagatcagagagaaaacaacactggaacacatggtacaatgaaccaagagggtaggacacagaaatgttctttggctgggg

SEQ ID NO: 18898 - DNA, 2300 bp, Homo sapien
gaacctgggaggcggaggttacagtgagctgagatcgtgacactgcactccagcccaggcgacagtgcgagattccatctcaaaaaaaaaaaattattttttggtagacatgttgtctcgctgttacccaagttgatctcaaactcttggtctcaagggatcctcctgcctcagcctcccaaagtgctaggattacaggtgtgagccacggcgcctggctcccagcaaatcttaacagagctctgtggcctggctggttctgcgtgttcatctcatccttgtctcctgggtccactgaacccccagccagaaggtatgctccttaaagctgtgaatcaagccaggtccccgggtcttcttgaatgctcagagcttttccatcaatggtcaagaaacagattctggggctcggggcggctggtttctctgggcccctagggagtccctggttagtcggtgtaggtacagtcatttctctctcttgggaggttgcactgtgtctgggaggcacagccccttctcatctgcctggtcctcgcctgaacagtaccttcctctccccagtcatccctgagctagactgtagcccctagggacccgtctcccaatgggccccagctctcctccctctctcttcttcccttggggcagccagaagtccccgctcataactcccacacgaatgagcctgtctagggacagagggagggacctgagtgacattttaattatgcctctaattgctttccagggagatgagtggggaactcacatttctctgtgggtgctcaggggagagtgcagggtttccaccaggaactcagccacattgagatccccaagatttccccagatttcctgagagcaagcgggggcttcaacaagcagtgagccagccctacgcagaccagggctcccttctgaagctgtccagaaagaggggaacatgattcaagggaaggaggtggtagggcaggggcagggcagtgggttcaggggccactagaccctcaccccctgactttatatcccgaggttttgatgtgcccaggagtggtggggtgagaagggcaggagttttgaatgaattctgggcattagagaaggcggcctcgaggcttatctgatcatctttctccatctggaaaatggggatgtggagcttctatctccctgagaagtgaggttgaactgaggacctgccacttgtaagctgattttccaggcttaacggtaaaaggggaaagaggaggtggtagccccgctcccagcatcatgcagaaactgccttcagggccagccactttctggtggtgacagttccgtgcaccaggacaccagggggctggggagaacacagtcactctcatcctaatcacaactgtataaaaagcccatgtcgaccggcacggtggctcacacctgtaatcccagcattttgggaagccaaggtgggcggatcacttgaggtcaggagttggagaccaacctggccaacatggtgaaacccagtatctactaaaaatacaaaaattagctgggtgtagtggcgcacgcctgtaatcctagctagttgggaggctgaggcaggagaatcgcttgcacctaggaagcggaggttgcagtgagctgagatcacacccctgcactccaacctgggcgacagagtgagactccatctcaaaaaaaacaaaacaacaacaacaaaaaaaaaaaacaaaaaaaaacaaaaaaccaaccccctcccccacaaaaagcccatgtcactgtttctgtgcctcaaccctctaagagtggcaggatacccattttacagagcaggagagggaggcacagaacagctaagcgaccaagtgccaagggcttccaagagatggcagttagggacacctgagtccccagactctgaaggggcctgcccaggcagacagcatcgcaggaagggcgggtcctcacggacagagagacagaagccacctcaggcccccctggacagctctaggacctgggtccagaccccacccccatcctgaaatagccctcccaaaaagcagagacagacaccaggcgtgctttagggctttttttttaatgtttcctcactgttttgacaatatcatgaaaaaaatcagtttagaatctggaattggcctggacgggattcgagggcagctggcgggggctgcatagcccctgaggttcctcccccaccatgggacctaagctattggaaacaggagcaccaacagggcaccgaacctggaactaagttagtgtctagagtcaggcaagagaggaga

SEQ ID NO: 18899 - DNA, 2300 bp, Homo sapien
tggccaaaccattagctctcaagagctggttgctgtcgcactgcagagggaaacggaaatgtgctgtccccagaaagcagaatgttcctgagggcttagggacctcgcagccatggggaaagtctggggccttcaccctcacttcctttaaaaaccgagggtggggttcagctagaggcaagggaacttttcactttgcgccttgtccactttagttgactacttcgcagctggcattctaccttgataatgatcatttcaactgaaactattcctctaaaaagaatagagtccaaggcctgggacttggattcaggctctgggactcaggagttgatcctccttgacgttcacctggtgcaaatttagcctcagctgatacttaggaggcaaaggcacagacggggatgcggggagctcaagggctgtcaccctgtagaaacatttctgacgcccagtccaagcctggcctcggggctggccggctcctccccgctccctcgtttacagcgagagtctgggatggcacccacgaagctggtggcgccagccctcctgccccatctcccgacagtactgcagccaggtggttagcaggtccgggagggagcaggaacgaggaacgccacccgggctggagttcttggtttcttgccccggctcgaatggggaagagcctcaaaagagcctcgcgccaggcccccggagggagacgcgcccctggccctgggggccccagtgggggttcgcggccggagcgcaggctggggcgggagtgtctcccggaagccgggcgggcccaggctgccccatacggagttgggaaagtctcaggctttcagtttgaaccgaggaggccgagcagtcgggcagaggttcccgacggccattggctgctgcggcgccgtgacatcagcgcagaggggtgcgcggggagggttgcgcggggcgggcgcgggcggagcctggaaggggagtgtcctggaggctcccagccctgaaagcccgagagccagagggaaacaaacgccggcgctgacaggggccgccagcccctccgccgcgcggagcccacgaaggggacagcgcagccggcccagagctcgggtctccggggaccgaggtaggcgacgggcaaccgcctctgtctgtggtagccgccttcgcgctgggtgccctgggtgggcttgggggtctcgagtccccctgtggggcagagaggatcgaagctggggatgcgaggccgcggcgcggggagaagggcgcggagcccccacttctcggcgctcgcgcttttcaccgcgcccaccgcggtgcctgggaccctaagctgcgcacctagtgtcctggcagagcgggatgtgtggaggaggaggtggcagggagccgggcgcagcgttgccgggactccatttcctctctccacgctggaactcccggccctggccaagggtgccgctgagggggttgggggccggttttaaagggcctcccccttcccaggaatggggtgtgtgtcggtgtgggcaggagcgcagcaatcggcggcgcgcggcccgcgatctccgcgaggggggcgtgtgtgcgcccggagttctccatgaataagaaccgaattctccgcctgtacgggcagaggcgtgtacacatctcgctctcgtacacacactgcagcacacgccacccaatgtcacccggccgggaagccagagggaaggagctgtctggaagggaatggccgaaggaacaaatggtcctcctttcccctactcccgccccgcgaacccttccctcccccgccaggctcccgccccgcccgctccctcggaagcccgggaggccgaggcgcctcctggcggggtgcggggggagggcagtcgagccacccgcccccttggagccggggagacggccgctcctgggctagtgcgccccgagctcagcgcgctcagcgggatcgcaggcgggagcggtcggttaatgatttaatcgcccgcttggggcgggtgcgcgcggatcggccgtccctggccccgccccctctccggagcgcccccagccggggttacaaaactgccccctgcccccggcgcgtcccccaggagccatcctgcccgcggggatcccgtcagccggtgagtgccccggccgggagggctggagagctgggcgggagccggggctgaggctgagccagcttcctgggagaggactgaagtgcgtgtgtgtgtgtgtgtgtgtgtgtgtgtgtgtgtgtgtgtgtgtgtgtgtgactgggggaggggtgctcgctgctaact

SEQ ID NO: 18900 - DNA, 2300 bp, Homo sapien
ttgcttgagctcaggagtttgagaccagcctgggcaacatgacagaaccctgtctctacaaaagaaaaagtacaaaatatgtagctgggcatggtggcgcacacctgtagtctcagctactcaggagggtgaggtgggaggatcgcttgagcccaggaggccaaggctatagtgagctacgattgcagcactgcactccagcctgggcaacagagcaagaccctgtctccaaaaaaaaaaaaggggcggggctgggggggacgttaagcttggaaaccacagaagctgctttccttttgttcccagatagctgcagtttcacaaccctgttgacacagggtttcctttgctccccttagacgtactgagtaggagacaatgcatcattgactttttcttctattccctttcacatgtaaaatgtagacttacagacactaaatcagagcctcacacgcttgtgacctcaatgcctttcctccctctctccctcttcttttcctttcctgcttgctttttctcttttaaatacagaagttcccaaaacctttttggaaaaaaggtgatttttccccggtggatcctcaaccttggctaactaaacctctatttgattgagatctgccttagtcactttttggtttacatccatgataaccccgccagggtttgaatccacagtgtctgcctcccaagtggctccaaaccctacctttccctccagatgtccagttcagaatttgattttacttattattcatttatttttttttttgagatggagtctacctctgtcacccaggctagagtgcaatagcgcgatctcggctcactgcaacctccacctcccaggttcaagcgattgtcccgcctcagcctcctgggtagctgggattacaggcgcccaccaccatgcccgactaatttttgtatttttggtagagatggggtttcgccatgttggccaggctggtctcaaacttctgacctcaagtgaccccccacctgccttggcctcccaaaatgctaggattacaggcatgagccactgcgcccagcccagaacttaattttcacagcaggatggagtggccaaaccattagctctcaagagctggttgctgtcgcactgcagagggaaacggaaatgtgctgtccccagaaagcagaatgttcctgagggcttagggacctcgcagccatggggaaagtctggggccttcaccctcacttcctttaaaaaccgagggtggggttcagctagaggcaagggaacttttcactttgcgccttgtccactttagttgactacttcgcagctggcattctaccttgataatgatcatttcaactgaaactattcctctaaaaagaatagagtccaaggcctgggacttggattcaggctctgggactcaggagttgatcctccttgacgttcacctggtgcaaatttagcctcagctgatacttaggaggcaaaggcacagacggggatgcggggagctcaagggctgtcaccctgtagaaacatttctgacgcccagtccaagcctggcctcggggctggccggctcctccccgctccctcgtttacagcgagagtctgggatggcacccacgaagctggtggcgccagccctcctgccccatctcccgacagtactgcagccaggtggttagcaggtccgggagggagcaggaacgaggaacgccacccgggctggagttcttggtttcttgccccggctcgaatggggaagagcctcaaaagagcctcgcgccaggcccccggagggagacgcgcccctggccctgggggccccagtgggggttcgcggccggagcgcaggctggggcgggagtgtctcccggaagccgggcgggcccaggctgccccatacggagttgggaaagtctcaggctttcagtttgaaccgaggaggccgagcagtcgggcagaggttcccgacggccattggctgctgcggcgccgtgacatcagcgcagaggggtgcgcggggagggttgcgcggggcgggcgcgggcggagcctggaaggggagtgtcctggaggctcccagccctgaaagcccgagagccagagggaaacaaacgccggcgctgacaggggccgccagcccctccgccgcgcggagcccacgaaggggacagcgcagccggcccagagctcgggtctccggggaccgaggtaggcgacgggcaaccgcctctgtctgtggtagccgccttcgcgctgggtgccctgggtgggcttgggggtctcgagtccccctgtg

SEQ ID NO: 18901 - DNA, 2300 bp, Homo sapien
gtgagccaagatcgtgtcacggcactccagcctgggtgacagagtgagactctgtctctaaataaataaataaataagttagccgggcgtggtggcgggtgcctataatcccagctactcaagaggctgaggtaggaggagaatctcttgaatgggaggcggaggttgcagtgagctgagatcatgccatcacactccagcctgggcgacagagtgagactccgtctaaaaaaaaaaaaaaaaaaaaatatatatatatatatggaggtgtaggaggcagaggctcaaaaacaagtaagaccaacagtgaggccgaggttcgggaccccggagccttctgcaaggacagctctgatgtagactgggtccccatggccttccccaaattggaaggatccacactggaagtggggagacagccccctcagcagttcccaccactgggtccaaaattcagacaggacgccagggtgtcgaggcgcctctgctgcagtgctcgacttacacggctgggtctatgagaaagtatggtgaggaaaacaaaaccatcagccctggggaagggcggccttgaactgggcacacctctggcgggagagcagcttcaaccagagggtgcagaagcagaacggcgagaagaacgggccctgcatgtgagagactggaggtgcttggttggggcaggctaggggaagttaaggccttttagtccctggtggcagcggcctggaagacccactgttggccactgggtgacctccctggagcaggccagacagagaggacctgcgagctggcctcactgacgtccttctactgtgaagaggggtctggctaggcccagggtggcttggatacctcagtttccaaatcagccccgcactgccaccagcaggaagacgcaccctctctcagggccaggctgaccccatcagccccacccagagcatgcagccagggcccctcctggccttcccaccaacatgatggatgccccaaggctatgtcaggggcttgcctcgtccctgacccaggcagcacccgcaccgctctgactgaacagcatgaaggtgaattatgtcccacgagggcaaggcccagagagccacggataaagaggggaaggggatctgagggaagctcaggtgcaaaggacagaggtggctgacgccagcacagggtggagaacagacaggaaacccaaatttttcctgttggctgagcgcggtggctcacacctgtaatcccagcactttgagaggctgagatgtgaggatcgcttgagcccaggaggttgaggctgcagtgagccaagagcacaccactgcactctagccttggcaaccgagcgagaccctatctcaaaacaatttttttaaaaccaaatctttcctgcagctgttactaaaaagaaaagaaaaagaccgggcatggtggctcacacgtgtaatcctctttgggaggccaaggcaggcagatcacctgaggtcaggagttcaagaccagcctggccaacatgatgaaaccctgtctctactaaaaaatacaaaatttagctgggcgtggtggagtaagcctgtaatcccagctatccgggaggctgaggtaggaaaatagcttgaacctgggaggcggaggttgtggtaagctgagatggcaccactgcactccagcctggatgacagagtgagactccatctcaaaaaaaaaaaaaaaaaaaaattggccaggcacagtggctcacacctgtaatcccagcactttgggaggctgaggtaggcagatcacctgaggtcgagagttcgagaccagcctgaccaacatggagaaaccccgtctctactaaaaatacaaaattagtcaggcatggtggatttggaaagctgaggcaggagaatcgcttgaactcgggaggcagaggttgctgtgagccgagatcctgccattgcactccagcctgggcaacaagagcgaaactctgtctcgaaacaaagaaaaaagaaaaatagcgctcttatttttgtctcctgccaccattgtgtatgttttgaattaggaaagggggttagttaagtaaagaagggtattcccatatgataatgtcttaggcagtcacttaaaatcatgtttccaaccatttttaatgaagtggaagacagaatccatagtgttctgcttgcacaagtgctaattccttgagcctgtttctctggacggtggttctgtcattggttgtgacagtactttctgcacagtacgtatcttttaatgtagtacagatattttaataaaaagaataa

SEQ ID NO: 18902 - DNA, 2300 bp, Homo sapien
tcttctctacctaagagaatccattcattctcccagtgtgcactcacggaagaccacctgtgtgctaataatggcaaacttttagcatcagccatgacctttccaaatccaacaggaactttgttaactgttgtacccccattagtatgaatgcatgagtgaatgaatgatttcatacatgactgcctctgctttcattcatctatccatatgagaagaatctgcttttcgttatttttatgttattttagagatggagtcttgttctgttgcccaggctggagtgcagtggtgtgatctcagctcactgcaaccttcacctcccgggttccagccatcctcctgcctcagcctcccaagtagctggaactgcaggtgcacaccaccactcctggctaatttttgtgtttttagtagagacaggggtcttgccatgttgcccaggctggtcttgaactcatgggcacaggcgattcccctctctcagcttcccaagtgctaggattacaggtgtgagccgctgcacccggccctctccccctttctaaaaaagaaatcactacaaaagaaatccccatctctacgaaagaaatagccaggtgtggtagcactcatgtagtcagagctacctggggggctgaggcgggaggattgcttgaacctggaggtcaaggttacagtgagccaagatcatgccactgcaccccagtctgcgtgacaaaatgagaccctgtcttgaaataaaataaaataaaataaaatgggagagagggccgggcacagtggctcacacctgtaatctcagcactttgggaagccaaggtggttggatcgcttgagcccaggagttcaagaccagcctgggaaacatggcaagaccccgtctctacaaaaaattaaaaacttagctgggtgtggtggtgcacacctgtagtcctggccactcaggaggctgaggtgggaggatggcttgagcccaggtggttgaggctgcagtgagctgtgatcgtgccactgcactccagcctgggcaacagagtgaggcctgtctcaaataaaaaaataataataaagggggagagggattggagaaaagcaaggatttcatggtaacaagatgtcctaactgccacccatacatgccagtggggacacttttattagctctttctcactttatgggcttcctccagggaaatgagaaattgaaaagccggtgacatgcagaaacctcattggccagcagggggcgccaaatgacctccaattttgcacgtggctgggcccagctggccgctatctggatggcctcagtcctggaactagcagaagtgttaacctgtgctacagaggaaatgattgaaaacaatggctgggcttggtggttcgcgcctgtaaccccagcactttgggaggccgaggcgggcggatcacaaggtcaggagatctagaccatcctggctaacacggtgaaatcccgtctctactaaaaatccaaaaattagccgggcgtggtggcgggtgcctgtgtcccagctactcgggaggctgaggcaggagaatggcgtgaacccgtgaggcggagcaagatcgcaccacagcactccagcctgtgtgacagtgcgagactccatctcaaaaaacagaaaggaagagaaaacaccagggagcatctgttgtgttcctggcctaaagccttctgcagccacggggttccttaggaaactggccaagtacctgggtgaaacccttagaacctgcacccctcacacggaccccaggaagtacgtgtccttaacctcactgaatgtacgacaaaactgcagctctgggaagtcagctggccaggtcccgctgctgtatgcggtgcagctgggattcagcctcccgctgcccgccgtcttggccgaggccttcctctgcagcgggccttgttcctgttaaccagcagctgctggtgcagcgggcccggggtggccctgagactctgcatccctcaccagctcccaggtgacatgaggccaccagcacttgcaccacactctgtctggatagactccacactgccttatctccccagctcagcctcccgtaggacggatttgctttattcctccaggaactgtactaagtgctgatgtgccagcgctatggtaaatcctccaggcatggcgggaaacacagacacttgggggccatgccctggagtttactgtctggcagagaccagggtcttggctgtgaaaaggaaggttccagaaaggtttctaaaacagttcttaaattcttttttttttttt

SEQ ID NO: 18903 - DNA, 2300 bp, Homo sapien
cagggagcgacgggctctcccctgtgcgctactacaccatccagacccgcgagctgcccagcggcaggtgggcactgcactcggcctccgtgagccacaatgcctccagcttcattgtggacaggtaaggctcgggtccatgccagcatccccactgcccctctccccgccgggaccagcggtgctcctccactgggtagggggccttctgaaaacacctccagcctgcccccagctctcctcctacatgcaccacccaggcggcccccgcgtccactctcaccctcgcaaatcagctctatcctgctcttcctcactctgttccctctggaactctgttaggttgcctcttaattatctatttctggagcctagaagtccccctttagtgaagtgcctgtcatccttcattagtgattcttccagccgggcggtatcttcctctccagctttaataggggagtggagcgtcactccgaaattctagcttcaatttaattccgagtgggttgaattttttatattccagttgatgtgaccgggagttttgagcaatactttcttccccacctctcccaccccccataaatctaaaagagagacgtttgctcccagaggaaataaggcttatagagatgaagtactgcttaactcttgagaacctcagctcctccctaatttactacatttaaaaaagagaggccaggagcggtggcttacgcccggaatcccagcactttgggaggccgaggcgggaggatcacttgaggtcaggagtttgaaaccagtctggccaacatggtgaaaacctgtctctactaaaatacaaaaattagccaggtgtggtagcacatgcctgtaatcccagctattcaggaggctgaggcacaagaatcgcttgaacgcgggaggcggaggttgcagtgagccaagatcgcaccactgcactccagcctgggcaacagagtgagactctgtctcaacaacaacaaaaaaagactccatctcaaacaaaaaaaaagaaagagatggcagtttgttgggggcaggggaggagtttgttccgagtggaggtattggtgcttttgtgactgcatggttctgcgaagtggggaagctgcagacatttccttctcgggatgctatggcttacaactggggctaaaggcaccccaagctggcatggtctggaggacctggtctaggtgcttgggacccctggggccgggtcccagtttgtcctctttgcagcaaagctcctttctgagcctcagtgtgcccttctgtgtagtaggctggcaccctgccccctttcccgagcagggccagatcagggagactccttggtgggagcatggggcgaggcctttaaggagcaccttggctcattggccctgatttctccctacaggctgaagcccttcacgtcctacaagttccgagtgaaggcgaccaatgacattggcgacagcgagttcagcgaggagtcggagtcactgaccaccctgcaggctggtcagtaccccttccccagcagtctctctctcagcccactggctgcttcctgggcatggggcattttcttacggggggaggggcctccaaagatgagagaggcgtgggacccactgggcccttcagctcccggggtagggtctcagggaggtttgggccagagacacttttgccaagggctcagggtcccaggcccagcctggcctgtggcgtattcctcctgtcccacaagctgccagtgagcgggacaggagttctcagcagcagcagaagtggtctatggctctgaggagcagagcggagggggctctgggacccttgggtttgggctgagtcagctcacagtccctccctccctcccctttacaccagccctttgttctgcagaaatcgggccagcaggcatggagggcgatgcgatctggacctgccccgcagtccagtattagcagaatctggtctcagtgggctcctggggaacttgaagctgcggcccccagaacccacctgtctgcttctctccacagcccccgatgaagcacccaccatcctctccgtgacgccccacaccaccacctccgtgctaatccgatggcaggtatggcccagcgggcaggaaacctccgtgaagacccagacgagctctgctctgggactggaaagccagcagtccccaccagggctgcgtggagcccccaagttctctgcccccagagcgcctgggaagccatgagaaatccaggcatgtgcatgtcacagaacattctatacaccgtgtgcccaca

SEQ ID NO: 18904 - DNA, 2300 bp, Homo sapien
tttgaaacagccacaggaacccatgaccctgctgccatcttggatccaggcgtcaagctgtaggataatgaagtcaagagcgtgactccacaaaccacactgccattaccctgtgcacttcctctgggtcatttttgtgggtaaggcccagtgatattgttttaaggcacatgtaaagacaccctttttcctttatttaaaaaaaatggtagagcttataattggcctaagcccaggaagataatatttacccagattttatacttgctggggaacacaccacacaattaattctaacagcataattaatttgaatgtacattaattaaattaaattaaaacattaaacttgtttcttaatctactccaaagaagttcggcaacataattgctatgaaacaagataatcgaaatacggaggatatttaacacacttattaaatgccacttagtatttctgtttagtattttgagggtctaattagtgtctaattaacttgctataggctatcttttcacaataccaattaaatttcaaaacatcctttataaatacacagccatgaaaaggagaagattaagcattgttataggcatgagttaaccgggagacattggcgtggtattgttttatatctataaatacccgtgcttattaaaactcatcaagtgttgcttttcaccattaattgctatttaatcaacttcaaataaatgaggaaatctctgaaaccagctgtcattattggagacagatgaagggcctagaaacaggagcgtgaggtgagagcaggaggcgagacaggcgggagggggcgggggccaggtgtgatctgcagaggggagatgagcaagaacttgagggatttccagatgggactttcttgccgatgccccgcctctacttgatatttaagatggaaatcccaacttagaaggagtgtaagaggataatagttacccacaaactgaagttcccagctctgtaggaagtaacccttggagagctccaaagacgaagctgccccagctcacatggggcaagatgtaggagctcagggcttggaatcccagaaccagcttccccctacctgtgtgagcctctttgagcctcagtttcctcatctgtaaaatacagggttgggctgggcacagcggctcatgcctgtaatcccagcactttgggaggccgaggcgggcggatcacttgagatcaggagttcgagaccagcctggccaacatggtgaaacccccatctctactaaaaatacaaaaattagccgggcatggtggtgcatgtctgtaatcccatctactctggaggctgagacaggagaatcacttgaacccgggaggcagaggttgcagtgagcctagatcttgccactgtactgcagcctgggcgacaaagtaagactctgtctcaaaaaataaaaataaataaataaataataaaataaaatacagggctgggccgagcatagtggcttacacctataatcccagcactttgggaggctgaggtgggaggactgctttagcccaggaggttgaggctgcagtgagctgtgatcatgccgctgtactccagcctggacagcatagtgagaccccatctcaaaaaaggaatacagggccggcttcatgggtgtgccacctgtgcagtcgtccagggccccacgtttggaaggaccccacacttagttaaatgctctgatgctatcatcttaaaattcttagtcgtttttgaacaagggctaaatttttcattttgcactgagcctgcaaattatgcagctgttcctggtgaaatgcctccctcctgggtctctgtgagaattgagtacgaggcgattcctgggaagcacccagcacggtgctttgcataaagtcagtggctcaagaagtggagaagcgccccaaagtgaaccccagtaccccgcaggttccctgcactgcctgtcccttccctcggaggaggcaccacagggactccggtccccggacaccatctgttgattggcccagcctgtgggagagggcttggcctcctctggaaccttcctgctgccctgtgtgacttgctcgcctctccgcagctgatcgcctgggagccggaacaggaagaggaggttaccatggtgaccgcccggcctaactttcaagacagcatccacgtgggcttcgtgtctggcctgaagaagttcaccgagtacttcacctcagtgctgtgtttcaccacccccggggacgggccacgcagcaccccgcagctggtgcgcacccatgaggatggtag

SEQ ID NO: 18905 - DNA, 2300 bp, Homo sapien
cgagaccatgtcactaggcagagagtctgtctggctgtctgagcaggcaccccaggaaacaaacaggccaaattaccataatctcaggctggaaatcaacctttacggtaccaaaacttgagggttacaaatgaacccaacttacagtaatttcaggacaggtgacagacccaaatttcccaaaatttgagagctgtagacaatgacaaattaccgtaatgccagaaccagcagcccccgggtgcatctcacctgagatgtgtcttataagctcagcctgtttcctgggccattttgctccatctcctctgccagctccctccgctattcctacttaaccccccttgaaagagttcctggagaatttctactttccccttccccaccgtccttccttctgattcatttccgccaaaagacagcccgcagccagggtgaaatccgggatgataaagagagaagagcgtgcacagtgggacacgctgagcaaaggggcaaaatgtgtctctgcaggaatgaggactgtgctggaggggatgagtaatgacttcccttctgagactccacaaggggaaggcaaagatccatccattcaggcagcaaatattttttgagggcttaccatgtgccgatagtgtcctcaggagtggggagatacataataaaccaaacagccagatccctgctcgcgtagaatgtaacattctcgggagggagatgggcaagctgataaacaaataaagagaacttatttcatctcatctaaaatgccatgggttgtaagatgccccattattttatggaccactaagaaagaaaaaaggcagccaattaaattatgacatgctgttgattataagacacatcctgatctcggagacgtgaccatgggaaagagagcgcatggtggattggatgaaatgtggcatcacaggctgtcaggatcaaagggtgccgggaagggaaggcaagcaggcttagtggggacagggccgtggggtgctccttggaatagggtgtggccaactcttctggggaagtcttttttttttttttttttttttttttgagactgagtctcactctgttgcccaggctggagtgcagtggcacgatcttggctcactgcaacctctgcctcccgggtacaagtgattctcctgcctcagcctcccaagtagctgggattacaggcatgcatcagcacaccaggataatttttgtatttttagtagagacagggtttcaccatgttggtcaggttgatctcaaactcctgagctcaggtgatccacccgcctcagcctcccaaagtgctgggattacaggcatgagccaccacggcccagcccagctgggggaacttatgaaaacaatgtgccaggctgagagcgaggagaggagcctcctcctttcacctccatgtgcaaagccggtatggggggcttccaagtgccccccagggaacactggaccctctacgtgctcttcgacacagggcgccattcgtttgggaaagcatcccccacttggaggttcccagagcacacatacatgtctgctaagtactgcaataaaaaataagaaattaggccaggtgcagtggctcacacctgtcatcctagcactttgggaggctgaggtgggaggaacgcttgaaaccaagagttctagaccaccctgggcaacctagcaagactccatctctacacaaatagaaataaaaaatagaataaataaattagtttgtccaatccagtttccatgctaaactgattcccggatctttactctgtcccaaagactttgagaattaccactcaaagagcatcttcctcctctccctagacccaaagtggcacctctgagaaggttctagacaccaagattcaccagggaccccctcgcagatttccgggcccggcctcctcccaagcacccctcctaggcggagaggaggcaggaggcaggttgacggtgggcccacgtcttgcccacaggtgtgccgccgccctccatcacctggtacaaggacgcagccgtggtggaggtggagaagttgacccgcttccggcagcgcaacgacgggggcctgcagatcagcggcctggtgcccgatgataccggcatgttccagtgcttcgcccgcaatgcagccggcgaggtgcaaacttccacctacctggctgtcaccagtaagttgggccttcccttgtgctgcccgtgagcccctcttcccaggacgcagctttcttccaaggtcttccgaggggcctcttgtgcatagcacgttccattaa

SEQ ID NO: 18906 - DNA, 2300 bp, Homo sapien
gattgcaccattgcactccagcctggtcaacaagagtgaaactccatctcaaaaaaaaaaaaaaaagagtatgggctttggagtagggcagatcaggggtcaggagccacccgagcccttcccagccatgtgcggccctcacctctcccacacaggaaacaattatgaaacccctgagcctcattatgtgtggctaagtgccttccgtgccctgcatcctgctaagcaccttcccacaagacctctttcctcccaaaacaatgtatggcataggtgtcaccacttcagaacccagagagggcaagtggcctgcccaacgtcacccagctggatgatagctgagttgaaatgcactgccccctctcccccaggcctgtactcactgccgccctctgggcctcagtctccacatctgtaaaatgggaatgatctgagcaccaaccccagcggaaggcgcataggcagcgcgctgacccagcctgacctgacccttcctaagtgcactataaagttaaaccaatgggatgggcagggggttagactgatgatccccctgaggtccccttgacctgaaacttcctggagagggagagcatgtcctgtagcagcattttttttttaagacagggtctcactatgttgcccaggccggtatcaaactcctgggctcaagtgatcctcctgcctcagcctcccaaagtgctggggttacagatgtgagccaccgtgtccagccttttttgttgttgttgttatttttggcagcatttctaaaagtatgctcctcccatcccaagtttctcacaggcatggcgtattagcccatttgcattgctataaaggaatacctgagacatggtaatttacaaagaaaagaggtttatttggctcacggctctgctggctgtacaagaaacatggcaccagcatctgcttctggggaggcctcaggaagcttccaatcatggcagaaggagaaaggggagccagcgtgtcttatggcaagagagggaacaagagagaggggaggaggagctaggctcctttaaacaaccagccctcacatgaactaacagagtaagagctcactccatcaccaagtgggtaacaccaagcattgtggatcacaattccacatgagacttggagaggacacacatccaaaccccaggacttgggcaaggccaccagggtgcaactgtgcagtgaaagccctgagaagcccctcgatgaagaaactgcccagcgtcacctcaagctactgtcactcaagccgctgtttcccagacgtatgcggccacagaactccttttccatggggcccttctgaatacccccatggcactagcaggggcccactttggaagatccgtcctcagggacccaccaggtgctaaacaggagtgtctggacagacccaagtctcgggggcttgggggtgcaggggttggtgatggtggaaagccaggccagactcacacccttgctcttctcttgcagttggggaatgggtttttctgtctgtctgtctgtctgtctgtcttgtctgcccttatttccccttttcaaactctgggtgtttcatgtttctgtctgtcacttgccctcaccttcatctcctccgtgtcactgatctgtggtcagatggggcacagcacacagggaagaccagaaaaaagagctgcaagccaggctgctttcctgctttgcctgagctgccaagccctgagttccaagtccatcagcaggccctgttccaagcacttcactggcactaatgcattcatcttggctacaaccccctgggcgggcacagatgcgcccactttatagaagaggaaagtgagacccagagccctgtgggaacttgcccaagatcttgcatctacaaagtggcaggaaggtggcaaacccaggcagcccggctcccaagcccacactccttaccaccccctgccctgcctctcaggcctctgggagtcctcatggctgaacactggccttcccttgccctctgcaggcccctgatcaagctacatatcatttggaagaaggacggggtattgctgtcgggcggcatcagtgaccacaaccgccggctcaccatccccaaccccaccggcagtgacgccggctactacgagtgtgaggctgtcctgcgcagcagcagcgtcccctctgttgtccggggcgcctacctctcagtgctgggtgagagagggtggggctgctagggctcccctgaggggtaggggcagcacggcgagggtcctccttaagggtgaccccctacagtggct

SEQ ID NO: 18907 - DNA, 2300 bp, Homo sapien
taccaggccctgggctgggggctccacatccctcgcctcctgtggtcctcacaaggttcctctccccaagctcctgcggtgaagtcaccccctcccgaaagtcaacctgccccctggatacagggatcctgggagggacgccctacctaggactctgagcagtgacagctgattttcctccaggacctgcctcgtctgaaagcaagagatggcagggggctggcagggtgtgtgctgtaggaagaatgacagactgaggggaagaagatgctgctgggataacagaacgtgtggacgtgtctatgtgtgcacgtgtttatgtgtgcaggtgtgtgtgtgtgcaggtgtgtctgcatgtatgtccatgtgtggacattcacatatctgtgaatgtcaatgtgtgtgtcagtgcacatctgtgtgtgcaagcctttgtgttcaagtatgtgtgtctgtggtctgtttctgtgtgcacatatctgtgtgtatgtgtgtgtatttatgtgcagggacagatttctgtgttgtgaatgctcaggagggtagcacaaaccagtgaccttgagaaagttacttaacctctttgtacctcattttccttagctataaattggagatgtgtttgctttgaagattaaatacattaataaatatatagtgcttagaacagagcctggcacgtgctaggaggggtggctattaacactattgatctatataaagatggacagatcagcccagagagaagagctcatatcctgttggcagctgccagtggctcccctcagccttagtactaggatggtgcagtaaacaacctgtgcaactgtacacaacagccctgttagccaccctctctgtggaaaaggagataattgagaaggaaggagaattgtggatagaaagaatcaacgttataaagatgtcattctcttaaacttttcttcacctcaaacacacacacatacacacacacacacacacacacatacacatacgaaggaatttttttaagtaggcaaagtgattctacagttcacatcaaaacaacaaccatgaaagaatagccaaacaaattctgaaaaagtatagcaaacagaggaaactagcatagacatttaactacattacaaagctgcaataatgaaaacagtgccttcttgtaaaatagactgatgaagaaatagtccgggagtctagaaatagacccaaatacatacgaggaaatttaatgtatgatgaaagtagaatttcaaatcagtgggtaatacaccaattagtcaataaatggttttgaaacagctagggaaccatttggggataaaaaaataaagatgaatctctttctggcacttttacctcaaaataaatgctggatggatcaatgttttaaacatgaaaaatgaaattctaaaagacctagaaaaaaaatcagagatttaaaaatatactgtcttggcaaagcaatgtactcgccaagtactttctaagtactatgcaagctccaaaaggtcataaaacagattgataccttcaactacacagaaattctgcctggaaaaaaaaaaaccctcataaacaaaaagaagtgacaaatgacaaactggggaaagatatttgcaactgttatcacgggcaaagagctaattttcctgatatagaaatgttcccacaaatcagtaagaaaaagattaacaaaccaatagaaaaatgggcaaaggatatgaagttcgcagaagagaattacaaatgcccctggaactcacacaaagatgctcagcctcatgataagaaaaaggaaaactaaaattcaataagataccattttttcccttatcacactggccaagatgtaaaagtgtgatattctgggctggtgaatttgtagagcaacaggcaccctcgcagacagctttgcgggactgtagcttggtacgccctctacgagagcaatttggcaatgctatcaaagctaaaaatgcacacatcctccaattcgccaactcttcaaggaattcaccctccacagactcacttgtgcatgtgtgaaatgacagtacttcagagccgctcagcttataacagcaaaagcttggaaatggcctgaatgcctatcaagagggcactgcttaaagaaacgattgtccctccaaacaacagaattctgtgcagcagacggcgcctgagcgatctttgagaactactggtaagtgacaaaaacaagaatagggtggataagctcaggcatggaatagggtggataatctgctactgtttacgtagaagcttttcttcttcaa

SEQ ID NO: 18908 - DNA, 2300 bp, Homo sapien
aaaatgcagattctgattcatcaggtctggggtgaggtctgagtttctgcatgtttagcaaccgctgagtgatgctgaggctgccggcataagcaccgctctcagccactcaaggaactggtgcatccaaaagccctgaactaatccggcttcacgaggggaagatgcaactataataagggtggccgtggtgatgttgttactaggaggagtggttattgagcagttactctgcaccagatactccatgccactgtggtacaacagaaggaaaatctatccagccttgcaggattttcctaatctctctccaagagtcaacagggaaggaggaaactgaatataagaggattaacattttctttgcaatatgtctcactgccccatttgatagacgaagtaactgaggctggaagagctttggtagcttgccgaggtcccataactcacaagcagcagggccaggattccagctgaggtgtgctctggctttcaagaccatggtaatttgaacacagcctctcatgagacagggagacagaggcagagagagcagtgcataccaggcaggaccagacaagcaggcaccagggcgcgaggcggaattccacatcctgcctgtgacgcccaagacagtctcctaggcaaaactggggaacttcatggagaagtttctaggcctgctcaccattcttctacctcacccttgtcgtattcctggagcctgagagaagagggtcccctggccttgtcagccccatgagagggggcagcaggagaacagggtcctaggtggtggcctctctgctttccagagcaggaaactgaggcctggagaggggaggggaacacctgaaggtctcaccagtgggcagggcagggttcttgggcttgcgacctgggcagtcaccctgggccccacgcctagaagggcaccacccttggtgtaatatttctccgctgccatcttgaaattctgattaattttttaacaccacattttcttttcttttttctttttctttttctttttttgagagagagtctcactctgttgtctaggctggagtgcagtggtgcaatctcggctcactgcaacatctgcctccccggctcaagcgattcccttgcctcagcctcccgagtagctgggattacaggtgcccgccaccacacctggctaatttttgtatttttagtagagacaggattttgtcatattggccaggctggtcttgaactcctgacctcaggtgatccacccacctcagcctcccaaagtgctgggattataggcgtgaatcaccgagtcctgcagcattttcattttgcaccggatcctgcaaaagatgccgctggtcctgccagtgggttagagaacacgtcagggctataccccctttccgagctgctcctggaggccaagacctgagcactgagcgagacagagccgtctctgggcaggctgctgcaagccccaacctccaggcagcgggagcctggcaggctggaaaacaaaagaaaacttcaggagaggccaggagggaggaaggaccttctgagagggcaagagatgtgccagaattgcgcctgagcgagctggggaacagatcccaagtcctcctctcttgtctgtagtgacagatgaatgcgttggccggggctcgggagggggaggacaggggccagttgtcttcagggccctggcctctccaaggaaacctccacccccaccacacccaaaccccaagggctgggcaaatgcacggcgcccagctatgccagcctgtcccaggggctctggggaatttaagccaagtccttcactttgattttgggttggccaaaggagaaggaaaaggccaagtggattggattcagaagctccagcctggcctgcaagttccagctcagacaagaggcctccctccagctccccatcccccaccactggttactcaggcctggtggagagcaaagccagccagacatgcattcctctgggccactgtcctgtgcccagaagacaggtgctggcatcagacagggctgaggaaggaattctgggatggaggcaggacagaagagagacttcatcagcccagcacattctaggaagacagcgatggaatgggagggttctctggagacctggggacaggcctgaggttgtctgagccccaggggctggtcttcgatgtggaccccagagggtttcctgatttatccatgagcttggacctgctgtgctgaggacagaggggcagtgttcggtctccttgggtagcgtcttcaccctg

SEQ ID NO: 18909 - DNA, 2300 bp, Homo sapien
cagacaagcaggcaccagggcgcgaggcggaattccacatcctgcctgtgacgcccaagacagtctcctaggcaaaactggggaacttcatggagaagtttctaggcctgctcaccattcttctacctcacccttgtcgtattcctggagcctgagagaagagggtcccctggccttgtcagccccatgagagggggcagcaggagaacagggtcctaggtggtggcctctctgctttccagagcaggaaactgaggcctggagaggggaggggaacacctgaaggtctcaccagtgggcagggcagggttcttgggcttgcgacctgggcagtcaccctgggccccacgcctagaagggcaccacccttggtgtaatatttctccgctgccatcttgaaattctgattaattttttaacaccacattttcttttcttttttctttttctttttctttttttgagagagagtctcactctgttgtctaggctggagtgcagtggtgcaatctcggctcactgcaacatctgcctccccggctcaagcgattcccttgcctcagcctcccgagtagctgggattacaggtgcccgccaccacacctggctaatttttgtatttttagtagagacaggattttgtcatattggccaggctggtcttgaactcctgacctcaggtgatccacccacctcagcctcccaaagtgctgggattataggcgtgaatcaccgagtcctgcagcattttcattttgcaccggatcctgcaaaagatgccgctggtcctgccagtgggttagagaacacgtcagggctataccccctttccgagctgctcctggaggccaagacctgagcactgagcgagacagagccgtctctgggcaggctgctgcaagccccaacctccaggcagcgggagcctggcaggctggaaaacaaaagaaaacttcaggagaggccaggagggaggaaggaccttctgagagggcaagagatgtgccagaattgcgcctgagcgagctggggaacagatcccaagtcctcctctcttgtctgtagtgacagatgaatgcgttggccggggctcgggagggggaggacaggggccagttgtcttcagggccctggcctctccaaggaaacctccacccccaccacacccaaaccccaagggctgggcaaatgcacggcgcccagctatgccagcctgtcccaggggctctggggaatttaagccaagtccttcactttgattttgggttggccaaaggagaaggaaaaggccaagtggattggattcagaagctccagcctggcctgcaagttccagctcagacaagaggcctccctccagctccccatcccccaccactggttactcaggcctggtggagagcaaagccagccagacatgcattcctctgggccactgtcctgtgcccagaagacaggtgctggcatcagacagggctgaggaaggaattctgggatggaggcaggacagaagagagacttcatcagcccagcacattctaggaagacagcgatggaatgggagggttctctggagacctggggacaggcctgaggttgtctgagccccaggggctggtcttcgatgtggaccccagagggtttcctgatttatccatgagcttggacctgctgtgctgaggacagaggggcagtgttcggtctccttgggtagcgtcttcaccctgtgaccccttctccatcttggcctgcgcagggggcccaatcaacagaacccaacactagccgggggggtgtaaaatccaaaaagaacctttgcaatatcggacaactggtgaacactgccagcatgagcatcttgtatattttgaaccaactctaccagcccattttctagttgctaggatggtcacctccaaactcatgggggttgttgaaaggattcgatgtgttaatacatgtgaggcgcttagaacacagactgggaaggggataggctttatataaatggtggttattaccatatttcctctaaatgcacattgttttcattttcatatctctggagtcagaatgtattttgtggattaaatggcagcattttttttttctttcttggcggcacataaaataacatgccttataattgatgtgtcttaggttcagtcaaatatgggatgaaaaggaacactgtattcttaagaccgcatctttcagcgacgcctccttccatgtgagttgagtcctggggtgctcctcagctcccccacccatgtggaaacaggcacagaggccacagg

SEQ ID NO: 18910 - DNA, 2300 bp, Homo sapien
attccagctcctcaggtctggagtaagacccagatccagcatttctaacaagatcccaaatgatgctgcctcccaggctacacttgagtagcaagggtgtagggctgtgggcatgtgggaatcccctgggggccttccacactgacactgggttccaccccagagattccgatataatggtccaggcttgggcaccaggagattctaacatgcgacttgagctccactgtgggacacctgtacccgtgtgtagaacaaagtgattgtaatgacgctgacctcctgtgaggagaagaagagatggaaaactcattagaggataaacaccggccgttcattcagccgttagagaactagaccaccaaaggagatgccgcttgctcctcgcactccacacacgctccaggtcatttaccagagagcaggaacaggccactggactgtcagttccaggaggaagggtcaacgatggctttgttcatggatacacctagtgcccagcatctgcaacatggtaggggtgggacggggggatgatggacagggggcaccgcaggaacggatgctggccagtgatggggagagcactgcatcctcatctccagcctgccatacttcccatcaggaggggatcttttctgtgactccagaatggatttgggaggacttattccttgtgaaaaacattgtcacaccctcgttaatcaagctttcttccttggcagagaggatggagaggaagaggaaactttcattccacagaagggcatctgccaatttcccacttggggacgagattgaaatagctttttcagatcctccagttaagctgacacatgtggacccttcaatcctccactgggttccctcccaggagcagttatctcggctccagcagaacggctctatctcaccgcagcctgccagctgtctcgcttcacaacagagagaagctggggccccaaagacagttctggtgcaaatagcgtcggagaagcagacgctggagcactggcgaggggagggaagggcggccaggtcagctgggccacccttcattcacatggtcagccagtgcctaggagctgtgaggtcttggggggggccacgtggagctgcagccggataacagggccagggctgagagtgatctgaagatgacagagctaaaaaagcatcactttaaggtgaggaaggtaaatgccacttctgggccggcaccgttccccaggctgggaatgagataatgaattattacccaaggaaatgaaaccgctaataaaatcaaaagcaaagctaggggaggttaaactccatttttaaaaaggcgctggtgatttatagagtgccctctctccttgcctcctagggcgccagcggctccccctgtccctccccctcttccccacctgctggcccctgaccctctggacatacagatcctggcctctctgccagctctccccagcctctggctgttcttttttctccatccccctagtgagccactcccaccctcaatgggaatttaaaggcttgatttgtgctgaaatttgggccaattgatttcaggagctcagtccccaaggaatggctaccaggaaatccgttttccttaggaatccattccgacctttgagccagcaaattacaagtagaaccagcccccgaatggcaatcaggttttggaggctggcgctgggcgggtgtggttcatgcagtgagtgactaattgatagggccttcgagcgggaacctggccctctcctgattcagggaagctcactggctacattttccttctcgctgtgtctgctctaatccctagcaagctccattcctgaaaccctggccccctcggtcttggctcccctccttccctgcctgaagccatcaagcccctgctgtctgacctcactgcccgtttccgtggcgacggccctgtgatgtcactggtggtggcctgtgagccttcaggtgggtaggatgacagcagcaggtgcccaggaggaggggaggaacaaagatcttgtttttgtgccatcatccctgatacataatgaaaacccagggtaggggtggggtgggaatggagtggggagatctgactctgcagccatccctcaccactcctgcttggacatcgccaggctcagctagagaaggcagaaaaagttcctccaactccttccccaggcacctatgcaggctccacactcctgcctgaacagctatgattttaaaagccatcgagtcatgaagagaagtgtgccagtgtgtgctggactcagtttcccctg

SEQ ID NO: 18911 - DNA, 2300 bp, Homo sapien
gctggggtggggatagtgggtgagaaggagttgaaatctgagctgggacatgaggaactgtgctatacagggttgaatagtgccctcccctgcccccaccaccattcatattttctccaggaacctcagaattttttttttttttttttttttttaaagaatcagggtcttagtgtgttgcccaggctggtcttgaatcctggcctcaagcaatcctcccaccttgacctcccaaagtgcagggattgcagcgtgtgccaccatgccctgccagaatatgatcttatgtgcaaataggatcattgcagatgtagttaatgtgaggtcatactagagtaagatgggcccttaacccaatatgatttgtgtcctcatatgaagggagaagagacacagccatgcacagaggaaagacagtgaaagcacagacacgcagagggagatggcctcgtgacaacagtggcagaggctgcagcgatgcagctacaagccagggaacccggaggattggtggtaaccacctgcagctggaagaggcaaagaggatgctctcccacagccttcagagggaacaggcccctggcaagaccttgactttagagctgggcctccacaatgatgagagaagccatttctgttgtttgaaggcacccagttgatggcaattggttacagcgtccacaggaggctgaaacaagagcgaagactgttccagcagagggaggagccagcgcagatgacttcacgagaaagttcctaggcctgctggagcagcggccgggacgcccaaaggagcgggagccctacaggcaggcagggatggtcccagaaggagttggtgcccagccacagggtcttgtagaccatggtgatgatgtttgttttattctaagaacgctgggaagtcattgaaggattttacaagaaagatgaaacatgatttgaagttcatttttgaaagatcgcatcagctgctctgtgaagaggagttttgaaagaggcaagagaggaggcaggacagccactgtggcctgcaggtcctcaaacgattacacagagttaccgtgtgacccacagttccactcctctgtatagacccacgagaaacgaaaacatatattcatacagaaacctgtacaaaatgtttaaagcagcattatttgtaatagcccaaagatagaaacgacataaatgtccaccaatgaatccatacaatgaggtagttatttggccatagaaaggaatgaagtgccgataggacagcatgaatgaacccgggaaccatcacgataagtgaaggaagccattcacaaaagaccacggattgtatgattccatttagacaaaatgcccagaagaggcaaatctctagagacagaaagtagattactagttgcctagggctgtaagggtgagcgttggggaggggagatagctgaagggtcagagcttctttttgaggtgatacaaatgctgtaaaatggaccacggtgacgattgcagctacatggaatatactagcaaccattgaattgtatactttttttttttaagtgaaagcaagcttattagagaagtaaagaaacaaaagcatggccactccataggcagagtagcctgaattgtccactttaaatgggagaattacataatatatgaattacatttcaataacgctgtttaaaagaaaaaaaaaagagtgaaatctcagaggaggccactgagcactctggtggaagaaaatggtgacttaggccagggtcatagaagtagagacagcaagaagggatgaaaacagtggattgtggaggccgaatagacaaccgatgaataggtcaacacctgctgtccatctgtacgagggaatattattcagccataaaaagaaatgaaatgaaccttgctgcaacatgatgttaggtgaaataagccagacacaaaggccccatatggaatgatgtcacttacacgaggtttctacaataggcaaattcatagagacagaaagaatggaggttaccaggaactgggaggagaaaagaatgggacattattatctcacagttccagaatttgtttgggatgatttaaaaaaaaaaaaaaaagctctggaaatagatcatcaggatggttgcacaatgttttgaatgtaaatgccactgaattgtacaccttaaaagggctcaaatggtaaatattatgctatgtatattttaccatgatgaaaataaacgtacaaaagtgagacagcagtgagtctaggcctcccttttaagaagcgatggcatcaaagagagcag

SEQ ID NO: 18912 - DNA, 2300 bp, Homo sapien
ttatatggtgagtgatctcagatgccgcatccagccggatcatcctgcaatgttagcattgagcacttactgtacagatgggtactgcacttcgagagttatcgacagaatgctgagccctgtccttgccttcaaggaaaagtggtaaggtggggcgtagtggctcacacctgttatcctagcactttggggggccgaggcaggaggatcccttgagcccaggagttcgaaaccagcttgggcaacctagggagaccatgtctctaaaaaagttttaaaaaattaaaaataaaaagagtggtgcgcatgtatgaaaagttaaacacctccacgcagcctacggagaagtgattgcaaggaaccactgtatgagcggcaagcaacataagtcaagggtgaagggtcctgcctgaaaaaggggaggcgggagctgagctcggaaggaccagtggcacttggcatcagagtggacagcagagcaaatacctggagggcagaaagtgcccaaaagtgcccctcggcttggctgaaagggtggttgcttgtggaggagcagtggggtagaaaagaccagaaaggcatcgcctgagatgggaagggctggcaaagccgggctctgaggtatgggaaaatccttctcaggtcagagctgaagcactcgtgcttctcagatcggatccgaccttcagacatctaaaattaggcttctgccaattaacttttcccactgctagaaccccgacacatttacagttgcagagacatcgttcagcttctttaaaagactcttcagtgttattacaatatttttgtgatctctctgcagcaaggtctattggttcctgtatctccagcacccccaggaaggtgctcagcctgagcttgttaatggaagggcaggagggaggaagaaaggaaggttaagttaaataagttctaagtaaagctcatggcaaagtgttctttcccttcaggagggccgctctgtaataataagcacgaagcaattacattctgccgtgtggttattaaattttggggaaacaaatataataaaatgtagacatttgtagggaggttggagataaaataaaaatggaggataaaaataaaatcgataaccgcaggttgctcagagtctaacctaaaggatgttagggggagaaaggaacgctgccctccccaggcttcccaagcctccccaggaagtggccggagcctgggctggggaatctgcccagcaggggttcaactcctgagtccacctctcccctctggggccgcggtgagaccccgcaagagcaggagcactcccactcaccatcagccctaggggtgagacacttagccaggggcagcgctgcgacagcttttggaagtattattattattatcattattgctagagatggggggggggaggtcttactaggttgcccaggctgctctcgaactcctggcctcaagcgatccgcctgcctcggcctcccccagtgctggggttataagcgtgagccaccgcgcccggccttaacttgctttcattgtacaccaattcctaagggaattggaagcagcaagcaggaacgctccctcttatggaaagaagagcccagggccctggtcatgacaggttcaggtgccaaaaaggagacgggaagaaaacgtgaggcgccagaacaacaggttctacaaggtgcacacgagggtccctgccattgaatgaagaattttctgtgtggatgcccctgcgcaggtccaatgaaagccgtggagaataagcgttagctcttcaaactgaatctgagctaaaacctagcaaagccaggctggggtctgaggggttgcgggggaagacaggaaggggtggacggggaagaggcgggggtcctaggaggaagggatggggaggagcgagaggagggaggcggagggagggcggcagccaggatggtccattccattcttggagctgcactgttgacttcgaccacaagggggcagggctgctgaaattggaagtgcgaacgcctacatgagtcttgatcctcggcaggcaccgtacccagtttcctccgttgggagggtttaactgcccggaaacggaagtctcgttctttttcgtccttttccccggttgctgcttgctgtgagtgtctctagggtgatacgtgggtgagaaaggtaatctggggcaatccactgccaggtgaaatctggggaccccaggtccgcgtggagggtgtcggggaggagaaggggagtgcgatggggccgatatttcgggggagagcgggaaa

SEQ ID NO: 18913 - DNA, 2300 bp, Homo sapien
ggtggctgtggagatagccctgagggacagcctttgcagtttgtttcttccagtgccgtgtgcaggcctccagccttctggggctcccttgccccgggttcaaagtcagtcctcggtgaccacccactgcctaggaggcaggcccttcccacctggggggcctctgagggcaggggctgtaaaagcagctaccagaagagtccactttccccagcaactgcagggactgagtcagagaccaagaccttttaaaaggaggttttcacccaaagaagttccctcccctgccgcagtctccaagctgatcgcctggctcctgcagttctccggctccctgtcctgttctggaacttgcttgcttccccttccactggccttagtccctgatctcacagggtcctgttccttctgcacagaggcctcccccagcacccccctctttgactcccgatcatccttcagctcatgtcactgtcctttgggaaacaaccctgacgcccaccttccatcccctctccctacagcagggactctgacatttcacaaggcctgcaatcgctgtttgcaggatacaagtccacctcacctcgcctactaggctgtagacgccatgcaggcgggaacgtgtgttttatccattactgtatcctctagaacagagaacgtgctcaagaaaatttgttgaaagacaccccaatgagagaagaatggctgtttccagccttccgggcccctcagctttgggctcctgcagggccccagaaccgtgggatcacggccacgaggagaggccccgaggccaggacttcctctaatggacacagggcctttgagcaccgggtgactggggccccactccccagcagccatatgtgtttgcgagcgttttcagtcggtccgcatccacccggtcccttcagccagaaccctaggagccccgccccgtcctcccggggctcctttctcacccgcgtccctgccgcggtggatacgcacccctcaggctggctgcccagcgcggtttccacgcccaatctgccgcgaccccatcactccaccgcacctacccctgactcctgcttgtcctgcagcctgggctcctccctccgctggccaagtcacgccaagcagtttgcggttacaggacgggtgggggcctctgcatatgtgcagagtacggagggcccagggacgcgaggctccccgatgggcaacctcccctgcctttgcttttccccagagccccctcctggcctgcgttcggcatcttctcgggtcgtcatcgccctctgcggtgcctgcgctcggggtgagggtttttgtcggcttttgttacatcaccgatgtaacagtgcctggacgtagtaggtgctcaataaatatgttgttgaatgcgcttcagtctccccgaatgcttgtcccttccgggcgctctcatcgctctcctaccttccccgctacacagctcgaaggtcccctcctccgggaagctcaccctgtcccacttgccaggaagaatcaagcaaattttctgagtgagacaccttgtcctcactcaggcgtcctgcaggcggcttcagcgagttgttggggcagatgcgccgggagctcccgagggcagggacggcgtcttatttctctttttaagtccacagggcttgcacaatagatgcccaaaaaatgagagtgaatttagaatgagtgaccgagtggctgaagattgcctccttcctttcccagtctgtcggttacttaccctgtgacaagcccttgggacgggcagtcgcccctctctggcctatgactgctggctgcccccactgacaccttatacccttgatctgatcataaataagaagcagcccggggacctcgagactgaaactgatttagagacttctgggagcttttttcacttccctcctcccatccggccaggacagatccccgcccagaaaggggctgttgactgcagcgggctgcgcgcccagaactgggactgggatcgcggcggggcggggcgggcgcgggcccagggagaggcggggccgggggcggggcgggcacggggccccggccgggaggtgagcgcagctgtcgttcagcttgtgggtagcactcgggccgagccatgcaggcggcgcgcgtggactacatcgctccctggtgggtcgtgtggctgcacagcgtcccgcacgtcggcctgcgcctgcagcccgtgaacagcaccttcagccccggcgacgagagttaccaggaggtaagtttacgccgccccagaccgcagccacgcgcgcccc

SEQ ID NO: 18914 - DNA, 2300 bp, Homo sapien
gggctgtgggcaggcccaggatccaccagccacagctgttgggctgataggaactgtctctggggccatcagggtgagggagtccccttaccatccctacccccacctaggggtcttcttgacccaatgaaaagtttagatttcctccagtggagaggagaaaactatggctggagaccccgggtgtgggatgtggggcacagggtttgggatggggacacacacacacacacacacacacacacacacacggctgtttctgaaatcatatccgcctcttttcatgcattctctgggagaggaagattccctggagctatccccaggcagccacattctcagggaacacagactcccacaggctgggctctgggggaggggggtgggtccaccgactgccgtcttgctcctgagtgcccactgaaccccaggaaggggtcctgatgctcccctccctctggtagggcaggcaccatctgcctgggcctgatggcagccgggtcgtcaggggttattattagactccctgtcactggcgcttgggcacctcacactggatcaggattccctccaagaggccctgctttgccctgatctgtcccatatctggagaacttgacacagggagaggccgccgggggccaaagtcctgagatgggcgcctggctctgaataaatggacctcatcctggtccactggccccagaatctttgacccaacacaaggaactgatacaggtgggctcccggggccagagcaggcgtgaccagacctgagacgggctgggagattctgcagctttgtttgtctgggcagggaggtctggggagccctggccctgtttgtggggtgcagaatcctgccaagggtcagcagagtagggaaagggcggggaagccgggagtgactgccctaggccagaaattcagggcttaaaggtgtgaggtagagagaggggcgtgggggaacaggaatgggccagtctaggaccaggggacacagagaagctgactgtcaatgcaagggggtcctcaggacaacagtgtgagatgggctgacggaggccaccttccttccctggaacaagcgcaagcagctgtgggttctctgcgctagaggggaagtgacccacaccgcttccccaagccctgcagccttccagctgagactcccaccctgcaggccggggctggggaggaggggtgctgcgaagaccgactcgggagactctactcagtttctgccaaactttcctaggccactcagccccggaaagagagcgccccatcttggaatctcagacggtcgaaaacttcggggcacccctcagcatccccgcacctcgcgcgccaggattaccccgagacgaatgcccctgtccttacccctcccccgcgccgccctgcccgctcagcgttcagcccctcaccccgcaggcggtcttgcgcccttcctccccttccccacgctcgcttcactctgatctcttcagttttcccggcccccaggttcccagacaggaggggacgcgggccacgggcctgggagggtgggggaaaaggggagaggggagacgggaaagggctgcgcggggagagaaggggtctgagaggcacgtgggaaagtgcaggctctcgaggggagagggggtagtgcggggacttggggcgcgcgtggctgcggtctggggcggcgtaaacttacctcctggtaactctcgtcgccggggctgaaggtgctgttcacgggctgcaggcgcaggccgacgtgcgggacgctgtgcagccacacgacccaccagggagcgatgtagtccacgcgcgccgcctgcatggctcggcccgagtgctacccacaagctgaacgacagctgcgctcacctcccggccggggccccgtgcccgccccgcccccggccccgcctctccctgggcccgcgcccgccccgccccgccgcgatcccagtcccagttctgggcgcgcagcccgctgcagtcaacagcccctttctgggcggggatctgtcctggccggatgggaggagggaagtgaaaaaagctcccagaagtctctaaatcagtttcagtctcgaggtccccgggctgcttcttatttatgatcagatcaagggtataaggtgtcagtgggggcagccagcagtcataggccagagaggggcgactgcccgtcccaagggcttgtcacagggtaagtaaccgacagactgggaaaggaaggaggcaatcttcagccactcggtcactcattctaaattcactctcattttttgggcatctat

SEQ ID NO: 18915 - DNA, 2300 bp, Homo sapien
gctgatgaacaacctggacttgagtgactcactcaggccacatttaagagtgacattaaccaattagactttcatttggaggacagtgatggcatgggcaagggtctgaaaccttagtcccaagaaggacacctgcccacttggagagcatgaggtgagagggttatgaggaagccaggttcagctgtctgatggggcacggtgcagaactggaaacttcttccaggctgccctagaagacaaatgaagatccagggggtgagtggtttaaggaggcaggtgtcagctcagtagaagaaggaacattctataagttgggagttcacagtggaagaacagactgtgacatgggtggcctgaggatgttgggggaaagggtggaggatgtcgagagagtccacaattcctggaggtgtcaagagagacccaaggttggcaatgagtatgtgatctcagtagacctcagcgattcccaggcccacctgtgtcagaatcccctgggggctggtaaaagtgcaggtaacctaggccctccccagatctactgcatcagcatcccttgggctggctacagtctcccaacttttggagtcttaggactagaggacagtattttcctattgcccaaataaaatgtcctgtagaaccagcctgccagggaccctgaaccttcacctccccacccccagccccacctgccagaatgtgagatgtcatccacctactcaccgcagcccccaggaaagagttcctcagctcaagtcaaaaacctgctctccatagatgttcacagcagctgtattcagaattgccagaacttggaagcaacgaagatgtctttaacaggtgaatggataagctgtggtccatccagacaatgaaatattattcagcactgaaaaaaatgagttttcaagctggaataagtcatggaagaatcttaaatccatattactaagcgaaagaagccagtccgaaaatgctccacactgtatcgtttcaactctatgacattctgaaaaaggcaaaactaaggagaaagtgaaaaggtcaagggttaaggccaggtgcagtggctcacgcctgtaatcccagcactttgggaggccaaggcaggtggatcacctgaggtcaggagttcaagaccagcctggccaacatggtgaaacctcctttctactaataatacaaaaattagccaggcgtggtggcggacacctgtaatctcagctactcaggaggctgaggcaggagaatcacttaaacccaggagtcgggggttacagtgagctgagatagcgccattgcactccagcctgggcaacagagcgaaactctgtctcaaaaaaataaaaataaaaataaaggggttagaggggagggggtacttaatgggcagagcacagaggaattttagggcagtgaaactaccctgtatgatatggtaatggtggacacgtcattttttcatttttttttttaatttttgcagagatagggtctcactacgttgcgcaggctggtctccaactcctgggctcaagcgacctatccgcctcagcctcccaaagtgttgggatcacaggcgtgagccaccacacccagccaacacatgtcattatccatatgtccaaacctatagaatgtgcaacgctgagaatgaaccctagtggaagctgtgggctctgggtgatgatgtgtgcatctgggctcatcagttgtaatggatgtaccactctggtgcagggttttagggtggagtaagaggctgtgcgtgtgtggggcagcagatatatgggaactctctactgtccacttaattttgctgtgaacctaaaactgctctaaaaacaagcttttttttttttttggagacagagtctagctctgtcacccaggagggagtgcagtgccatgatcttggctcactgcaacctccacctcctgggttcaagcaattctatgcctcaactcaacctcctgagtagctgggattacaggcatgagccaccgcacccaaccctaagcttattttttaatataagcaaacattctcctctgtgtatcacctctaacctctgtttgggatcttgcttatagtgctgcggtgggcgttggtttctatggaaacagcgagaccaacgatggggcgtaccagctgatgtactccttggacgatgccaaccacaccttctctgggatcgatgctctggtaaggctcccgggcagctggccgggtacaggcacagcccacaaggtcagcgtggtcagagcaagggcccccgtcagatcccagctag

SEQ ID NO: 18916 - DNA, 2300 bp, Homo sapien
gggccagaggattgacaaggcctcccttccccacccccgacccctacccctccctgtccctagaaaggactccatgaggacagagcactgccctggagatctgctctgggtgaggcagggagaggagggagcagcggagctccaagcttccaggccctggggccacccctcgtggtcagcactgcgagtcaggaggtgtctggggtgaggggctagagcaggcagagaggctgggaagccctggaagaaggaaggggaaggaaatgggttcagctgtgagggaggaggcaatggctgtcacaagtgctttggccaccgagcctggggacagagaacttcaggggattcctccagctaaggggcagccaggcctgcccctgagtcagagggtgggagtgtggcctctgcagccaccctgtctgggcccacatcctcccttcaccccttcccagcagtggaaacccaggaaagttcctgaggttttctgtgcctcagcttcctcctaggtgaacacagagaataacaggacttacctcaaagggctgttgctagggaaagatgagtgggttcatcctgggaggcacacagaaaatgtccaataaacagtggccaccactggcttcctgtgcattcatcgtcatcatgctagggtcacgggggtcccttcagacccacacctccattctcaggagctgcctgcaggctcagccatcacctgggctggttactgggcagcctctcccacctgccccaactatgctcagtgacctccttcctgtcccctctcctgccatccctatcaccatggcatgagtaatgcacacgtgtattagtccattttcacactgctgataaagacatacccaagactgggcaatttacaaaagaaagaggtttgattggactcacagttccacatggctgaggaagccccacaatcatggtggaaggcaaggaggagcaagtcacgtcttacatggatggcagcaggcaaagagagaggacgtatgcagggaaactcctgtttttaaaaccatcagatctgccaggtgtggtggctcacacctgtaatcccagcactttgggaggctgaggcagggggatcacctgaggtcaggagttcaaaaccagcctgaccaacatgccagaaccccatctctagtaaaaatacaaaattagccaggcatagtggtgcattcctataatctcagctactcgggagactgaggcaggaggattgcttgaacccgggaggtggacgttgcagtgagccaagatcacgccactgcactccagcctgggcgacagagtgagactctgtctcaaaaaaaaaaaaaaaaaaaaatcaggtcttgtgagacttattcattatcaaaagaacagcgtgagaaagacttgcccccgtgactcagttacctcccaccaggtccctcccataacatgtgggaattcaagatgagatctgggtggaccatttcgacatgcacacacacaagggcatcacacacatacatgcacacgcacacaggtgcttgtcttcattaataggagagttgactcctcactgagtcccacaccccaaaccatcctatgcacctatcccaggagatggaggctccagggtggccaaggggtgtgaagagcaggcctggcctgggaggggaaggaggagagaggcaggaggaagaccatgtcactgtggagccttggactggagcctcctgtccctctcctttcttggttcccaaacttcttgggggtgacccaaactgagatggtggcctcgctctttatttccccaaggcttccccatcctccacttgggcctggctgcactctctgtcactccagccagggggtgggggcacaccaccaggcctgctggcgccgcagctctgataggtaataataggccaggttgatgtattatgaatgctggtggtttgtgtataaagcatttctcccagggtcttaagtgcgtgcgtgcgtgcgtgcatgcgtgtgtgtgtgtgtgcgcgtgcgtgcatgtggggctctcgggaagctctgtatctggaggggtgtgttattccgcaccctcgctatacacacattttctagaccgtaagtgctgtgatgcactaacctctaggtgctagaaccctgcacggcactgagtaagtactccataaatgtctatcaacttagcaagttagtgagtgatgctctattgtggacccctgaggcagtggctcctgaaggaggacggggccaccggcagagcagggcactcagaggggtcccctgcccggggagcatgt

SEQ ID NO: 18917 - DNA, 2300 bp, Homo sapien
tgcttgtgcgtgtgtatggatagatccatagatacagctatgtgtgtgtgcacgtgcgtgtgtctgtgtgtgtgtgcgtgtgtgtgcacttgtggtgtatatgtctgtgcgtgtgtggtgtgtttctgcggttgtgtgggtgcacatatgtgatgtgtgtatgtatgtgtgtggtatgtgcatgcttgtgcgcatgtgtgctgtgcatgcgtgtgtgtggtgcatgtgtatgtgcctgtatgtgtgtgtggggtgtgtggtgtgtgcgtgtgtgtggtgtgtgcatgtctgtgatgtgtgtggtgtgtgtgcatgtgtgttgtgtgcacatgtgtgcacatgtatgtggtgtgtgtggtgcatgtgtgtgtgcatgtggggggtgcatgtgtgtggggggtgtgtgtgcgtgtatttataaagtggcttactgaagagtcccgagttggcacatcaggggcttgggtttagatcctggtagtctgacctcagagctaagaacatggcagtcacccctgtctcctctcttcttccccttctacatctaatccccagcaagtcttggcagctctcctctcagctgtaccctgaatccatccatttctctttctctccatggcttccaccacgatccggtcctgcccctccagcagacagtggcctcttcccactttctcttgccccctcaccacccatgagctttcacacatgcaaccagagcagtccttttgcagactaggttggatcacatcccttccactcccacaccctccaatgtctttctgactccttttaaaagtccgtactcctctcccgcattgcaaggcccagcacgacccagcccctgctggcctatgttctctctctttcctgaacaggccaagcctgtcccctttgccccctcttctcaaggtgtgctgcttcttgccatcctggcctcagcttcagtgcccccgtctctggttccccaccctgcaacctcctccgccctgttcagagccagcttcttagtgcccagctcacagtaagtgctcagcaaatgtttccagcgtgaacccaagaagccccattgtgttaggctccagagtgtggacctttaatggtgctgcaaggcgctcgggatggggagcagccaggagaccccaggtccaggctcgggggagagggacttccagaggagagctcggcccgcaggctttgcccccgctccttcactagctgcatgtccctcctcttcctccaggattatctggacgctcttgctggcatctgctacgacggcctccagggcttgctgtaccttggcctcttctccttcctggccgccctcgccttctccaccatgatctgtgcagggccaagggcctggaagcacttcaccaccaggtgggctgcctagtaaggaggggagcctcccacagcctggagttctgggagagcagcagacaggggcctctgctctacgatttagctgataacccaggactgaggagggcagcagagggcccgggcattcagcccaacaggctggctgacttctacagaagcttccccaagagtccacacagaccctccaaaggagttcggtggggcccagagcaagagctggggcccagggtggtgacagccctcaggccacagtctggcctcccttctcctctcttctcaccaggactttgcgatctggaatgaggagagttcttggtgctgggaggggtgccccaggaatagcaagaaggatacatggggtcactgttttcagggagcctgcagtccccttgaggagatgggcagggacacatggtgtacaggcacctggtgagcggattaggcaagaggacgcagggtagtggggacccacatgcgcatggtcagcgtggtggggagcctggaagagctggtcgtgaagctgggaatgggccagaatgatctgcaggaggcaggctggggaccgcgttttagaggagtctcaaggagacacgcgtggccagagagtcctgggaggaaaggcagggaagtaggacaggacctggctgcctcggagcctccttcacccttcacagccggccatcttctacccattgttctagaaacagagactacgatgacattgatgatgatgacccctttaacccccaagcctggcgcatggcggctcacagtcccccgaggggacagcttcacagcttctgcagctacagcagtggcctgggaagtcagaccagcctgcagcccccggcccagaccatctccaacgcccctgtctccgagtacatgtacggcctgcacacacacccagg

SEQ ID NO: 18918 - DNA, 2300 bp, Homo sapien
ggtgggggtggggagcctgtactaaattgttggataatatggtaaaggtggctgcagtttcctttcaacttttcctatttccccttctaacccactttcccacccacaaaataatgtgtcttcagagagccctcggcttcccagggctggaggtggagtggaaagggttgcattatgattgcaaccccagccagccactacctcatcatggagtggatcgtttcctattcttggagactttgggtctgattcacctctgaccacacaaagccatttcaatgcgtctttcaggagctcctccacccagcccctgtcaggaccctcagcacccacccctaagagttctttgtcccgagaaactggtgcgagccagaacggatcaggagagattggtggcagcagtcatttaggtgcttgtctttggttagtgcggccctgcaaggtgccgtctcattgggaatttccttgcacctgccccactaaaggcaggtgggtagtggtgacaacacatatatggagaagttgggaagtgggagagaaacgtttgcttccttcctgtcctttcacagatcccaaacccgctgagggcttcccatggaaagctgtctgggcccctcagcctgcctctcttgggaccccccacagactggccctggctgacctttgcaaattcctctctcatttttcccctgcagggactctcaaccccagccagactgatccacccaccatcctcgcaaaatgcctttcttccatgacgactgccccttccttccttgctcacgccatgccctcccccaatctggaacgccctccccactcctcttccctgcaactcataaccatttttcaaggcccagttccaaccccaatcccacttcttggatgacgcactcctcttctgtcccagtccaaatttccgatgtcagcatctgaactcgggataacctcattccccgagctgccactcattcaggcaccagtagctctggacgggggctggacacgcccctgtgttgtctctcacttaatcctccccattatctaataagcaccgccactgtcctgccactttgcagatgaggatagctgagtcttagaaaaggaaaggaacttgcccagggccatgagattagtaggtagccaatctgggattcaaattcatttttttctagccccaaattcccttgttttaatttacatgatcgcaattgccttaactccctgagaaacatgactcgtttcattcattcaaccattcattcaatgaacacagtacatttcgtgccaatcacccagctaagctgtaaaaatccccagctttgccgggcgcggtggctcacgcctgtaatcccagcactttgggaggccgaggcaggcggatcacaaggtcaggagatcgagaccatcctggctaacacggagaaaccccgtctctactaaaaatacaaaaaattagccgggcgtagtggcgggcacctgtagtcccagctactcgggaggctgaggcaggagaatggtgtgaactcgggaggcggagcttgcagtgagccgagatcgcgccactgcactctagcctgggcgacagagcgagactccgtctcaaaaaaaaaaaaattccccagcttctactcccaaggagtttccattctggtggtgcgggaagatgtctttattacagaaagtggaggaaggatggtagcagaggggagggcagagttataattcccactgaatggatgcggaaactgaaggaaggcaggacaacacagtcggccaagatggtaagcagagcccgccatcaccacccagggatcagggcttcccaagcactgactattcttccttgcattttctgggtgccttgctcgatgcaaatgcatacaaacgtaggcttggataagcgccttggcaacgcccctacaaatattcatgatcattattagtatgttaccaacctattggttaattcttctcctaactcaggagacctccaaaaagaagagggatggcctgcgcttccgacgtggcaggaaaggagtcacgtgctccggggtccttccgcgtcgccccgcgcgtccggagccaggccggggttgccaagcaaccggtaaacgccgccgtttgaggagcaccggagccgcgaccgtggattgaacgcttccccagagacccagaagcagaaggagcggacccagggtaaggggcgggcgccaggaggacgtcggaggctaaagactagagtggagagtgacagggagagacttacagggtaataaccaccaagagtgccaaacatt

SEQ ID NO: 18919 - DNA, 2300 bp, Homo sapien
attgcatgcctatagcaaaacatctcctgtgccccataaatatatacacctactatgtaaccacaaaaattaaaaattaaaaaaaaatagcaaaacctgctcacaggcaaacctgctcacgtaatcctgtttttgagatagagtcttgctctgtcatccaggctggagtgcagtggcacaatctcgactcactgcaacgtctaccttccaggtttaagcgattctcctacctcagcctcctgagtagctgtgattacaggcacgtgccaccatgcctggataatttttggtatttttagtagagatgggttttcgccatgttggccaggctggtcttgaactcctgacctcaagtgatccaccggcctcggccacccaaagtgctgggattataggcatgagccacaatgcccggcctaatctcttgggcgttgaaaggcctttggttgtaaatctaccaaggcaagctctccttcagtttatcttcctcccaccagcaccagccactcatccacatcttttgtcctaaggctctgtgcaaccccaggagccttgcacagatcctcaatctgagcccctggaaacttgctatcaaaggcacaatttctgaaagtgcaggtggctggcagacggaaatctctgctaattccatggtgtgatatggcaggtacacaggtcaaagcgccaaccactgaactcattgagaaagccctcagacccagtggagtctagtgatgtcatgggggagtcagaaaggtcaagggcaatatgtgggaatggcccagcccattgcatttttacaacttctaatcagcatcagtgagaaacccttccttgcgtggcctgtgaaccccgcctctgatgctgctggagcactttcatttcacttctcagcatcctgtgggtgtgtcaggtctcagaaagactaagtggccctgcctaggtcacgcagctggtgacgggaggcccagaacttgaaatcagggccgagcccagcccacttcccaattccctgctgtgtcccatgaccagtagcacgcgtcagaggctttcccaaaggcctccatgtcccgcctgttggggaagcccctggctttctctctgtctgggattgactctcagctctgtcctggttggagagaagagatttccaggatggtacccagacagtggtggaggccagagtctggcaaccaacgagccttttggacaattgggtggggagttgggtcattgggttggagaggaggggttcaagaagaggcccaggggtctcaaatctgtgtcctgtgtgtttcatgcccagcatggcagggaatttagtccaacatcatcaccatcaatatttcctcctgccctgtcaataaacactgattcagtaaaaaccgtattgtaccacgtgcgatggctcatacctgtaatcccagcactttgggaggctgaggcaggtggatcacttgagcccagaagttcaagaccagcctgggtaaaatggcgagaccccatctctacaaaacaatacaaaacttagccaggcatggtactgcacacctgtggtcccagctacttgggaggctgaggtgggaggatcacttgagcccgggggttgaggctgcagtgagctgtgagcacaccactgcactccagcctgggtgacagtacaagcctttgtctcaaaaaaaaaaaaaaaaaaaagccctaaaaacaaaagacgaaaactgtatcatttggtgggtaagagctttggaatgggggcagaccagctgcagcatgcattagctataggaccttgggcaagtcactgatggcatctaagcatcaaatgccttcaaagaaaatggtgattttatttatttatttattttgagacagagtcttgctctgtcacccatgctggagtgcaatggtgtgatctcggctcactgcaacgttctcctcccgagttcaagtgattctcccacctcagcctcccgagtagctgggattacaggtgtgcaccaccatgcccggctaatttttgtatttttgcagagatggggtttcaccatgttggccaggctggtcttgaactcctgacctcaggtgatccacctggcttggcctcccaatgtgctgggattacagttgtcagctaccgcgcctggccaaaatttttattgccctcctcagagagcaactgcaataactaaacagggtaatgcttagcatatagtcggcactcaggatttttttttaatgcggatgcagcttctggacaaattcctaggatctccccaccaccccttgcttcctgccccaac

SEQ ID NO: 18920 - DNA, 2300 bp, Homo sapien
ccctgtactgtagaggtctgtacccagggctggtgtcaaggaaggagggctgaatattggggttggaaggctgcagcagggacactgagttactcaatgccaaggagcatggagttccagaaccacaggcagaagagcgccctttggagctatgaaatatggcggctttggcccaacaaggaccagctcaatggtgagatcccagtctcaggcagagccaggaggctctccaggcctcagcactaggggttttccttttttgttttgttttgtttttgagacagagtttcactcttgttgcccaggctggaatgcaatggcacgatctcggctcaccacaacctctgcttcccacgttcaagcaattctcctgcctcagcctctcaaggagctgggattacaggcatgtgacgccatgcctggctaattttctatttttagtagagacgaggtttcttcatgttggtcaggctggtctcgaactcccgacctcaggtgatctgcccgcctcggcctcccaaagtgctgggattacaggcgtgagccaccacacccggccctagcactaggggttttcagttccacagtgttccccatggttctggggggttgcctgcagggctgtccactggggaaaggatgtaggaatggatctcagtccccctcttcaagtccccttctatctggcttccctattagcattctactaagtcttcaggctgggcgtggtggctcatgcctataatcccagcagtttgggaggctgaggtggaaggattgcttgagccctggagtttcagaccagcctgggcaacataaggagaccctgtctctacaaaaattaaaaaatgagccaggcatggtggtgcatgcctgtggtcccagcaactcaggaggctgaggtgggaggaccgattcagcctgggaggtagaggctgcagtgggccatgattgtgccactgcactccagcctgggcaacaaagcaagaccctgtctcaaaatgaagtaaaataaaataaactgataaaataaaaataaataaaataattaggctgggcacggtggctcacgcctataatcccagcactttcggaggccagggtgggcagatcatcttaaggtcaagagttcaagaccagcctggccagtatggtgagatcctgtctctattaaaaatacaaaaattagctgggcgtggtggtatgcacttgtaatcccaggtactcaggaggctgaggcaggagaatcacttgaacctgggaagcagagattgcagtgagcctagatctcaccattgcactccagcctgggcaacagagcgtgactttgtctcaaaaataaataaataaataaaaataattaaattaaaatacaatataatataatacaatactaagccttcattggaaagtttccacaaaaaaaaaaaagtgttatttgaaactagacaaactgaccaagtcgaacctctttgatttacaggtaaaaaactgaatcctggagagtgacgtgacttactgaaggccacttagctacccagcagttgagcaaaggcaaatggacacaccaacacctatttatggagcccacactgcttcccccaaaatgtgcacctatgttctgggggtgggagggcggggccatctatttgtctgactagcctgctctgctgtggggccaggtcgggacgtgctggagggattttccccaggcacccggtgcttacggaagaggctacgttcttctcattcctctggagggtagagagcccaggcgagacctccagcagggtggttgtccccagctgggagccgcaggcgatgagacacccattgtcctgcacccggaggcagaagagggcctcgtcacacacctattgaaggggccgggcagacccaggtagaggagagaggagcaaagttatgtgtgtctgattaactggcccctggggaggctcagccacttggccctattcaaacatcctcaggacgcctctgcccacaggatgaagttcaaactcggagactggttgtcaaggctcctggcttccctgcctcatctcccgccccaccccttcagttccgcctcacagtcaccctgtggttccccaatgcccccacccttccgtggccccagccagtggggctcagctctggccaccctgacatgaaggggaaggtccagcagccaaaccccaggggctctgaaggaatcggcctgtgggtaggagatgccgggtacctgcttttgtttctttttaaatttcccccaggtggttctgttgtgctaccaggatgcc

SEQ ID NO: 18921 - DNA, 2300 bp, Homo sapien
acatttgtaatcccagcactttgggagtctgaggcaggaggattgcttgagctcaggagtttgagaccctgcctctacaacaattaaaaaaaaaaaatgagccaggcgtgatggcatgcgcctgttgtcccagctactcccaaggctgagttaggagaatcgcttgagcccaggaggttgaggctacagtgagctgtgatggcaccactgcactctagcctgggccacagagtgagaccctgtcttgaggggtggggaggcagaagaaaaaaaaagagaaagagagaaagaccttgtctcaaaaatacaaaaacaaaaacaaaaaacaccccacaaaaacaaaaataactatggggcattctgggtgggactgatgcatgtggaggaacagaaaagaaaaagaaaaatagtgacagcccagttgaccaggggcctgtttgattgatccaaataggttcttttcaggagcctaaaatgcaagcacaacacacccctaaaacttacccgattctctttcgagaggctgaggtgggaggattgcttgagtccaggagttcaaaaccagcctggacagcacagtgagatccctgtctctacaaaatacaaaatgttagccaggcgtggtggtgcgcacctgtagtctcaactacttgtgaggctgaggcaggaggatcacttgagcctgagggattgaggctgcagtgagccatccatgatcgtgccattgtgcttctgcactccggcctgggtgacagagtgaaactctgtcataaaaaaacagaaacaaaaacaaaaaacccgacccgattcttgtcacagtatgcccatttgcaaactgtccagcctacagcctaggccaaggaacaggacaaaacctgggatcccgggcaggagagtttggtttccaccaagttttacttggtttatctatttattaaacccaaggctgacggctgcttcttgctgctgtttattaataacgattcccaacacaggctcctcaggggcagccggggaagccagtcccagggcacaggctggcatcacactctgcctctgagggaccccaggcagtctgaggcagccctggggacatgagtgcttcctttcccagccccttccctggaaagtgaaacccatcgtggcttcctctcccagtcttggggctgccgggctcagcttcggtgggggcagaggacacagaggatggacatcagaattgggagaggctccaacatcccccaggaaactgaggccccagggaggcaggaaaaaccagctccaggtggctggccgagttggaggcggaactgggaccagaatccaagttttcccagggcctcctgaggacaggaacctttcccctgtgttccctgggagtgcaaccgttgttattgtcgccaagaatggaggcggtagcgtcagacctagactttcttgcacagtattgtggctcttccagcagcaggcggggagccagcagggcacacggacccagccatcgtgacctagattctgggttcaggggtagagacttgtttgctagtgggtcgcactgagtcaggctcttctgtagcacaccccaggtaacagaggtgctgggcggcctgagcaaagggacaactttttgccacccatgccagtgggcagtgggtgcagacactcacagcacaggcacctgctgcgatgcacgcggcgcccacggaaacccgaggctgccagccgccgccctggagaccccagagacagcggcagatgcgtgtgcttcaaggggcagcgtggctgctggggcgctccctaaagggcagtggcacggggtcgcgccgcgagcagaggggcgcgggtgggcgcgcaggagttagcgaactgacacggaggcgccaggcggacgcacggacgcaccgagggccgcagggccgcacagccgggcacacatcgtcgcgcagcggttcaggctcgggggcctcctcggcggaggcggccaactctcaccctcagcgcggggaggggcgggcgccgggggcggggcggcgccgtccgggccctccccctgccccgcctcgggtcggcgtccttagccgctggcgcgttgttggtttcgggttgtcaggcagcgcgcgaggcggcgggcagctagcagctggcggacgcgacccggaggcggtgggggtgcggctgagccatgcccggtggcgcggcctgagcccctccacctgctgcaatcatgaaggacagcggggactccaaggaccagcaactcatggtgagacccttttagaccctcctccccaccccgctcc

SEQ ID NO: 18922 - DNA, 2300 bp, Homo sapien
actgcccgggacggggcctcgcccgtgctgctggacaggttgtcctcactggcagcatgctgtagtgtggggctgggcggccgcttgcaggccagtgggcctggtggccgcgcatcgtcgccctcgctcagtgagtgcagggacaggctgctgcgctctgtcgcgggtgccagcaggtgtcgcccctcggttcccagggcccgcgagcgccgccgggcggccttcacccagatgcacttggtgccagtcaggatctccttcctctctgcagcgggacacggggaacatacaacccgagatcaaggccacctctcaacaccctcctctgacatggcagacgtgggtaggagccagacctcctgggtttcaatcctagcacttccaggggtttgctatgtaagaaacttgggcccatttccgagcctcactttcatctgcaaatgggggatggtaaaactaatgccatcggttatttccaggattaattgaggaaatgggctcaacctacattatccagggggcagacattgaatcgatatttgctattacagtgattactgagcggaggcggcgggggaggggggacataagtctccatgccacatgtctcttttctaatttccgattctgcccccatctctctaaatgtccttgacttagagaagactcttaagtgtccttgactgactaatcctcaggggcaatggtgcctctacagaatgtgtagcacccaatgcttggttgcacttggcagtgcagagggcaggaaagggctttgagctgggtgatctgaacagtttagacaaggccaggtgaggtggccgggcagcagagggcacacatacctttgtgggacaaggggatctccgacaggttctcactgctgtcaggggaagagttgatccagctgcccaggctgtcctgagccggggcctgtggggtggagtggttgggaggaggaaacccttaaacacagcagggaccccatgccccactcagcagagacagcggggcctcaagctggtgccgtttgggaaagggtccatcccaactgctgctgtccacccccatgtcccgcacccgctgcagtggagctcgtggggccatcgggtactgagagctcacctcctgcgtcaccaggctgccgagctggatgggaggtggggtgggcacagaggagctttttgcctgccaggccccagtaccagccttgaacacgtggtggccttcactgaagttggcagaggaagatgagtggctgtagaccaggctatctcaccgaggtcccacccccaccccaggggagaagctgttggtgtgaaaggagagagaacccaggagtcctggctccagacctgggccacctgctccctctcattgctgctctgtgttccccatttagccttagtctgggttggcctctctgggacagggcacagggtgggggctggggcaggtggcccccatctcacctctctgtgctgaggggagggagggcgctgttctgcaggtgctgggcatcagagctcaatgtcttcacactctccaggtcagaatctggggtcagtgaggttcctgctggggtaattttgggcaaggagctgtcctggggaggagggagccagggtggacagttagaagatttggtcctggaccaaatcagcacagagtcacaaaggcttacagggtgacaagggctgtaagatggcctgggagccccagaagggcagtgggcttgtgtttgggtcctcggggttaagctgtggtctgctaggcttccccagtggcactgcctgatgcttggtctcctgggagggcagctggagccatttgtgatatctcagatggccagccctgaccctcagaccctgggtgggagcaagtgatgcccaggagtgcccaaggaggagggtcttactcaggcttgacaaggctttgggtggggtaagaaggaaagggagtcaactccctggggtgccagccagcctggtcctgtcccctccagctgcctgaaggcattgccttggtcatcagcccctccctgggcacatgtgcccatgttcaggccgcccaggcgcccacccacctgcagggccctggaggccacttggtccatgatggtggcctgctccaggctgccctcctccagctcccgcaggtacacttcgtagagctcttccaggcgctgcgggacggccaggttgtagtctgctggggaaggggcagggctcagtgagtgccagcggcccccccgcgggtggctcagatgcgcgggggcgtgggccctaccgtcgatgatc

SEQ ID NO: 18923 - DNA, 2300 bp, Homo sapien
ctcactgcagcctcaaattcctgggctcaagcaatcctccagcctcagccttccaagtagctgggaccacaggtatgaaccactgcacctggctacttgacttttctttccacaaccccatgttgtgtttttgttttgttttgttttgttttgttttgtttgagatggagtctcactctgtcgccaggctggagtacagtggtgcgatctcagctcactgcaacctctgcctcctgggtgcaggcgattctcctgcctttgcctccggagtagctgggactacaggtacccactacctgtagtggctggctaattgttgtatttttagtagagacggggtttcaccatgttggccaggatggtctcgatctcctgacctcgtgatctgcccgcctcggcctccccaaagtgctgggattacagatgtgagccaccatgtccagcccatgctgtctttttggggaagtttttccaattgtgataagtgatccctttggacaaggaatctctagtactgtaaaagcaacggaaaactcttgcaagcttgggaccagataaagagtttctgaatctgcaaagggggtgatcagacactggactgtggtaacacctcagaggggtgggctccagacgcagcctggccctacctggcaccctcccttgcatctgtagtgcctcctgtcctgacttagggttccctgagtcactgggccacttggactggggacaggagatcatgggtttaagttccaggccccgtgtacacaggggagcacataaaggtaaatatgaggccgggcatgatgtctcacacctttaattccagcactttgggaggctgaggcgggtggatcacttgaggtcaggagttcaagcccagcccgggcaacatggtaaaaccccgtctctactaaaactacaaatattagccaagcttggtggctggtgactgtaatcccagctacttgggaggctgaggcaggaaaatcgcttgaacccgggaagcagaggttgcagtgagctgagattgcacccctgcactccagcctgggcaacagggtgagactctgtctcaaacaaacaaaaacttaaataagaaggaatccttggccaggtgtggtggctcacatctgtaatcccagcactctgggaggccgaggcaggtggattgcatgagcccaggagctcgagaccagcctaggcaacatggcgaaacaccgtctctacaaaaaatacgaaaattagctgggcgtgttggtgcttgcctgtaatgccagctatttgggaggctgagatgggaggatcacttgagcctgggagttcgaggctgcagtgagctatgatcacaccactgtaccacagcctgggtgacagagtgagaccctgtcttgaggggtagggaggcagaaggaaaaaaaagagagagagagaccctggtgctcaggcctggtggctctggctggactgatcagggctgaagacttcagagaccaaaaaggtcaaggtgtggccgggtgcggtggctcacacctgtgatcccagcatttttgggagacccaggtgggcatatcacctgaggccaggagctcaggaccagcctggctaacacggtgaaaccccgtctctactaaaaatacaaaaattagccaggcatggtggcaggcacctgtaatcccagctacttgggaggctgaggcaggagaatcactggaacccaggaggcagaggttgcagtgagccgagatagcaccattgcactccagcctgggtgacagagcgagactctgtctcaaaaagaaaagaaaaaaaaagtcaaggtgtgcggctgggtcttcataacatctttcaccttgcccaggctggctcagaggtgactgccttagtggataggatcccttccaccgtgggctagcagcctaccctggtcactgacaccacaccatgtaggaaagaatcgccaccaccaagaaggggcctctcacctctgtataggctgtgtgctggctgatgacgtggttgccctgtcctgtctgctgctgccactgagctggacatctccaggctccatctcttgaaccatggatcccagcgttgttagcaatgagtattatgatgttgcccatggagcaaaagatccagtgggtccccacttccctgcaggacatcactgctgtcctgggtacagaagcatatactgaggaagacaaatcaatggtgtcccatgcacagaaaagccagcattcttgtctcagccattccaggtggctgaggtctccacaggtcacagggggaagctggga

SEQ ID NO: 18924 - DNA, 2300 bp, Homo sapien
tttcaaaaataattgattaatttaaatttaaattataaataaaaactgtcagacctgtcaaggcttagagggaatgacaatcatgccaggaaaggggaggctgatcgctggctccctgtaagcaccaggcttgtgtgaggaacattccagacacagcttcattctgggggtgatgttatcatccagttttacagttgaggaaagcagggctcagagagatgaagcaactcatccaagtcacacagccggcaggtggcacaggtgttcccacctttgggccttgtcaagacctcagacatctctgaaggaggctttccaacgaacaaagggtttctcactctgccagtaggaatccaactcaggtgggggtggaggtagttgggtggtggacacagacatgcttctccgcaatccagaatctttttttttcctttttatttcatatattaaaaaaaataaaataaataggctgagcgcagtggttcatacctggaatcccagcactttgggaggccgaggcggaaagatcgctggagctcaagagttcaagaccagccagagcaacacagtgagaccccatatctattttctttttcgtttgtttcaatagagatgaagtctatgttgcccaggctggtctccaactcctgggctcatgcgatcctcccacctaggactcccaaaatgctgggattataggcgtgagtcactgtgctgggcctcaagatctctttgaacagtagcactctttgaacacttctcagagtgtagttttttggtgaaaacagagtttgcaatgggttctacgcctactggggtattaaatcaaagtgaaggacatttgggggcacagaggaccctgtggctggagtctcggaaagcagcgccacctcccacagaacttcccttccagcatcacaggctcgctgggtccagcagcccccaccagggtctgactcatggtggaggggtctcatgccttctccaactcttgcctccccactctggaccagcacaggcccccgggactagagcagagaccaacagggaccctgaaggctgaagcccatgtcatcggccccaaaggacttgctttgtcctttaaaggcaaatcctgcccaggaagtgagacggagtgaacacaaaaagagcaaacagctctcaggaaacctccctacatatccgccgccatctaccatgcagggctggcagtgggcagggctccgctgctccgtccaggcctcagatgccccagcctttcccccgcctgggtcgggagggagtggtaaagagttgcctttttggagaatctaggtagggaaaagagattcccaaagcttgaaaataaattgaaacagatctgccagatccacaattcatctttggcttcttaaggtcacaagcagtctcggggactatttccattccaccttcctctagctcttagctggcttttcacatatgctaatgagcggcccctcccagcacactgtgttcagcaccagttgcctgcttcacgagaactagtcccagcccacagtcacggatgcccctcgcctaggtctgacccgccgtttgcctttctagcgttggcactcaactgcttggaccctacaagcgtttgcctccctggcatgggggcctctgaatcttagggtgggaggtggagctacggaagggagcccaggagtgagcaacagatcagcagcagcactgcgcccctcttcttaatattgaagagacttgaaacaattcagtcttcgccaccccagaccagcccgtgagggcaaggccaggaagggatacagggttctagagaaccagggcctcaccgccagctccggccgctaagcaaacattccctccaggagtccgagaagccggtgtgcgaggggaggaaccagcctgaggtttatcgctccagcaactccgggtgattcatagagtttagactcccggttgtcgtagaccgcggcaggcacgcaaacaagcagcccgggagataccctcccctttcccagcccccgctcctccaccttgctaccccctagcccgtgaccagctgcctcccctccccctcgcgggcgctcagggttgagcaaacactccgggccgcccgccccgccaccagctggctccgaccggcgcaccgctggcgatcccccaggcaattcggcgtcatgagaaccggcaccccgagactcggcgccctgccctccctccgcgtctccagggccctggccaggcccaacaacctctccctcctctgtgcgcctcagcccctacgggcctctggcgcg

SEQ ID NO: 18925 - DNA, 2300 bp, Homo sapien
aagtctatgttgcccaggctggtctccaactcctgggctcatgcgatcctcccacctaggactcccaaaatgctgggattataggcgtgagtcactgtgctgggcctcaagatctctttgaacagtagcactctttgaacacttctcagagtgtagttttttggtgaaaacagagtttgcaatgggttctacgcctactggggtattaaatcaaagtgaaggacatttgggggcacagaggaccctgtggctggagtctcggaaagcagcgccacctcccacagaacttcccttccagcatcacaggctcgctgggtccagcagcccccaccagggtctgactcatggtggaggggtctcatgccttctccaactcttgcctccccactctggaccagcacaggcccccgggactagagcagagaccaacagggaccctgaaggctgaagcccatgtcatcggccccaaaggacttgctttgtcctttaaaggcaaatcctgcccaggaagtgagacggagtgaacacaaaaagagcaaacagctctcaggaaacctccctacatatccgccgccatctaccatgcagggctggcagtgggcagggctccgctgctccgtccaggcctcagatgccccagcctttcccccgcctgggtcgggagggagtggtaaagagttgcctttttggagaatctaggtagggaaaagagattcccaaagcttgaaaataaattgaaacagatctgccagatccacaattcatctttggcttcttaaggtcacaagcagtctcggggactatttccattccaccttcctctagctcttagctggcttttcacatatgctaatgagcggcccctcccagcacactgtgttcagcaccagttgcctgcttcacgagaactagtcccagcccacagtcacggatgcccctcgcctaggtctgacccgccgtttgcctttctagcgttggcactcaactgcttggaccctacaagcgtttgcctccctggcatgggggcctctgaatcttagggtgggaggtggagctacggaagggagcccaggagtgagcaacagatcagcagcagcactgcgcccctcttcttaatattgaagagacttgaaacaattcagtcttcgccaccccagaccagcccgtgagggcaaggccaggaagggatacagggttctagagaaccagggcctcaccgccagctccggccgctaagcaaacattccctccaggagtccgagaagccggtgtgcgaggggaggaaccagcctgaggtttatcgctccagcaactccgggtgattcatagagtttagactcccggttgtcgtagaccgcggcaggcacgcaaacaagcagcccgggagataccctcccctttcccagcccccgctcctccaccttgctaccccctagcccgtgaccagctgcctcccctccccctcgcgggcgctcagggttgagcaaacactccgggccgcccgccccgccaccagctggctccgaccggcgcaccgctggcgatcccccaggcaattcggcgtcatgagaaccggcaccccgagactcggcgccctgccctccctccgcgtctccagggccctggccaggcccaacaacctctccctcctctgtgcgcctcagcccctacgggcctctggcgcgggctaactaggcctcgctgcgggcccccaggactgcgcaccccaccccccgcgaggccagcagccccgggggaaggcggccggaaaatctcttgtttatcgggctggataagtaccagcctggattcgcttcccaatttctgcggtccagcttcagcagattcctggggccggaggggaaagggtggcaacccacagatccaccccggaacagggagtggggggtggggctggtgggaacctgacctcctggaaaggacggactcggagtcagagccaacgtgtcccggagcgcagaggcccagggggtcgcgctaaacactgtacctcggggaacaaaaccgtgaaggctaattaggacaagtcggagcagggaacggggacgccgggaggggagagcgcgctccgagttgggcagaacctggaacggtcacaggaaacccgggcgcggggtagtcgggccgagggggacctttgcccacggtccagagtggtctggactcggcccacgcgtgagaggagcgcttggtgacgatcccacgtacgcttggtgactggtggaggtcccagagaaggaccgtgcgtgcaaaaggcgaacctcggtgtgcggtgtgtc

SEQ ID NO: 18926 - DNA, 2300 bp, Homo sapien
catatccgccgccatctaccatgcagggctggcagtgggcagggctccgctgctccgtccaggcctcagatgccccagcctttcccccgcctgggtcgggagggagtggtaaagagttgcctttttggagaatctaggtagggaaaagagattcccaaagcttgaaaataaattgaaacagatctgccagatccacaattcatctttggcttcttaaggtcacaagcagtctcggggactatttccattccaccttcctctagctcttagctggcttttcacatatgctaatgagcggcccctcccagcacactgtgttcagcaccagttgcctgcttcacgagaactagtcccagcccacagtcacggatgcccctcgcctaggtctgacccgccgtttgcctttctagcgttggcactcaactgcttggaccctacaagcgtttgcctccctggcatgggggcctctgaatcttagggtgggaggtggagctacggaagggagcccaggagtgagcaacagatcagcagcagcactgcgcccctcttcttaatattgaagagacttgaaacaattcagtcttcgccaccccagaccagcccgtgagggcaaggccaggaagggatacagggttctagagaaccagggcctcaccgccagctccggccgctaagcaaacattccctccaggagtccgagaagccggtgtgcgaggggaggaaccagcctgaggtttatcgctccagcaactccgggtgattcatagagtttagactcccggttgtcgtagaccgcggcaggcacgcaaacaagcagcccgggagataccctcccctttcccagcccccgctcctccaccttgctaccccctagcccgtgaccagctgcctcccctccccctcgcgggcgctcagggttgagcaaacactccgggccgcccgccccgccaccagctggctccgaccggcgcaccgctggcgatcccccaggcaattcggcgtcatgagaaccggcaccccgagactcggcgccctgccctccctccgcgtctccagggccctggccaggcccaacaacctctccctcctctgtgcgcctcagcccctacgggcctctggcgcgggctaactaggcctcgctgcgggcccccaggactgcgcaccccaccccccgcgaggccagcagccccgggggaaggcggccggaaaatctcttgtttatcgggctggataagtaccagcctggattcgcttcccaatttctgcggtccagcttcagcagattcctggggccggaggggaaagggtggcaacccacagatccaccccggaacagggagtggggggtggggctggtgggaacctgacctcctggaaaggacggactcggagtcagagccaacgtgtcccggagcgcagaggcccagggggtcgcgctaaacactgtacctcggggaacaaaaccgtgaaggctaattaggacaagtcggagcagggaacggggacgccgggaggggagagcgcgctccgagttgggcagaacctggaacggtcacaggaaacccgggcgcggggtagtcgggccgagggggacctttgcccacggtccagagtggtctggactcggcccacgcgtgagaggagcgcttggtgacgatcccacgtacgcttggtgactggtggaggtcccagagaaggaccgtgcgtgcaaaaggcgaacctcggtgtgcggtgtgtccacgtgtgcaagctggggaggggagggggcgcagaaggcgtgacaaagacggactctgtcttgagtgtgcgcctcgctccggcccgctcccagcgaactgtgcctgaagtgtgtctcacgggagggccaggacgaaggtgacaaaggctaggtgtcccccacggagacgcgccaaggtagccccgcgcgtgtccgtaggcgcgctctctggaagacgcggtggggggtgcgcagggctgcaccctcacaccaattgccccggcgaaggccgagcccagaaagtgagtgcgcgtgagtgtgcgcgcgcccgcatgcgggggcgtggcagtcaacagcaacaacccacacgccggcagggccagaaactcccatctccctcaccagccggaaagtacgagtcggctcagcctggaggtgagtcggggcggggagggccgggcaggctttgttcctgtgtaaacggagcgcacgtacctggagcgcggcgggcgcccgattagcgccctgaatggaggtgatgtaacggtgatgcaggctccagcccaccctcgccgaaagcaag

SEQ ID NO: 18927 - DNA, 2300 bp, Homo sapien
ccagagtggtctggactcggcccacgcgtgagaggagcgcttggtgacgatcccacgtacgcttggtgactggtggaggtcccagagaaggaccgtgcgtgcaaaaggcgaacctcggtgtgcggtgtgtccacgtgtgcaagctggggaggggagggggcgcagaaggcgtgacaaagacggactctgtcttgagtgtgcgcctcgctccggcccgctcccagcgaactgtgcctgaagtgtgtctcacgggagggccaggacgaaggtgacaaaggctaggtgtcccccacggagacgcgccaaggtagccccgcgcgtgtccgtaggcgcgctctctggaagacgcggtggggggtgcgcagggctgcaccctcacaccaattgccccggcgaaggccgagcccagaaagtgagtgcgcgtgagtgtgcgcgcgcccgcatgcgggggcgtggcagtcaacagcaacaacccacacgccggcagggccagaaactcccatctccctcaccagccggaaagtacgagtcggctcagcctggaggtgagtcggggcggggagggccgggcaggctttgttcctgtgtaaacggagcgcacgtacctggagcgcggcgggcgcccgattagcgccctgaatggaggtgatgtaacggtgatgcaggctccagcccaccctcgccgaaagcaaggagccctgcctggggacaggcccgcgcgagagcgagcaacccagcgcgcctggctcagcctcggtcccagggagaggcaggccctgcgtcccggcccgggccccgccatcccagccaggaccgggcctggcccagcgccccgcgccgcgtccctcccacccccgcccgccccccgcctggggctggagttggccccaaacgctgcgctggagcggggccggcggcgagtcccaggtaagggctgctgccttcccgctccgccgcccggaagagtcgggtcgggacggcggggagtgggcgagggcagaggcggggggactggacatcctgcgggctggggacgccgcgccaactccgctcggtcgctgaaagttttcaaacccgagccggctggggactgggggggtgggggagcccggcgctgcggctcgggctggagggaggggaaaccactccataatcggggtctccaagaggagcccctccaccgcctgcctctcggtgggagtccgcggtcactctctctcgtgggtggcgtcctctctgccgcctgctactgtggatgtggagggcaggtttctgtggccctaaaaatgggagagagtgactggttcccttgctccccattccagccacccagggagcgcaggtgtagaccccagtaccgtcgacccaagtagggacgagagggttcagaatccccctgagggaagtttggaaattcagactatcaaagcgcctccccttctggtagcctggcccctagatcccgaacccccactcccggctggcttttccagcgtcctttgcacctccatccccaggcccgcagtgttacacgctggaagacccaatcacttacaaactccacgatcaagatcctaaagcccgggagaggagactgttggaagtagggttttgtgctcctggagcttcctctccccgccggccccccacccctgtgccttcaactggactgggggagggagtgcattggggggtggggcgcattccagagtgacattccagagcagacccttgaagatttccaagtctcagagagctcagggcattttggcccaaatgcctggtcttggtgcggggcaggggcagggggataggggtggggtgtctaggctgaggttcgaggaaccccaacccaccccccaccaacctacacactgaggccgctccttccaggcacaggcgtctcctgtgcgccttcttatcgatggggtaaacgcctgagcgccctgcacagaggggtgagacagtgggacctaaccagggactgggagagaccgataggagtggaggcaggaaggctgtcagtcgggccatcgtctttccctataggctcttgagtgtgtgggatgggaggaaggcaagtgctctgtggtatccctgggggaacctccctgaagagtgccctggtcacagcacccttgaagacagccattggccatgggtcagtgttgagtttggttggccctgtgacgcgctggagctctctttccagtgcggtatccttggccctggtgggtggagggggtctcaggcttgtgtgtggatgatgctggagcgaggaagggagttttgctctggag

SEQ ID NO: 18928 - DNA, 2300 bp, Homo sapien
ttgaaaagagggacaatttctatcaactgtgggatttagggcttttgtttgcctattagaaattaagtagccaggaatggtagaaaacagtaaggaggtaaaccatgtataaacaacctcacaatccccctaaaaaaggaaaaagggtggcagcctcacagaagagagttagataatgccattcccctgccagccactagtggtcactgtcagaccaggaaagcttggttgctgttttcccagagagttcctgatgaagctgggttacaactagttatttgaacacgtggggtgacttaaatgtggactacctgcattcatagaattttgaaacgtataacctgtttctttaagcatttaaattttctttttcttttcttttcttttctttcttttttttggaaacagtctcgctctgttgcccaggctgcagtgcagtggtgcaatcgcagctcactgcagcctcgatcccctgggctcagatgatcctctaacctcagcctcccaagtagctcagactacaggtgcatgccaccacactctctgctaattcatatatatatatatatatatatatatatatatatatatatatatatttgttgttgttgttgttgtttgttttcatacagagtctcactctattgatcaggttggagtgcagtggcgcagtcttggctcactgcaacttccacctcccgggctcaagcaattctcctgcctcagcctcctgaatagctggtattataggcgtgcacctccacgcccggctaatttttgtatttttagtagagacggggtttcaccattttggccgggctggtctcgaactcctgacctcaagtgatccaccagtcttggcctcccaaagtgctgggattacaggcgtgagccactgcacccagctgctaatttttgtgttttttatagagacggggtttcaccatgttgcccaggctggtctcaaactcctggactctagcaatctgttcaccttgacctcccaaagtgctgggattataggcatgaaccaccgtgcccagcagcatttaaattttcagtgttaggtttcctccaagtacatttaaaacttttgattggaaaaaaactcattgatttggtctttaatatttcttaacctgttaaatccattacctccacttcacgtgggaaaatccaattggtattgggagcaggagtttggttttcttctctggcacagatctgtggcatttggtagagcggcagtcagtagatggagtgaaaattaccttgctggtgttaataaaagctaattttcttgccttctagctacaacgtcttaaagtcttctattaaagattaattcctttgggttttgcattgcccttgcctggttcttacttttaaaatgttaatgctccgaaggaaaatttttgcattaagtcattaactccttagctggggacttcgtttatttcacccttgacttccgcttccgagctaggcaaaaaatggaggattctgaactggagacttggcactaaaagtgggaaaatgactgtctcttcatttttcctggctgttggttatgcctgctgcagctgcttgttaagtctattgaatgaatgaatgaacacatagctgactggctgtggatttaggcctcacaggaatggagtttaggggcatagcagctgacctcctgaagcctgaaagtcccagggcagagaggaggtactgggtgggtggtatgcttggtcttgacttgttcacaagccccttcatcctccaccgtggccgccagagctcagggaatatctgaacccaggttatgtttggtggaagggagggaactgaaaattcaatgacaggtttttcttttgccatggctaggaatagggctgacaaatgggcttcatctcatttgcctctgtggccagttgaaatgcctctcaggggttctatgttaagaaggattctgaggtccagagagcctcacggtcagcagctagcactatctgcctgggtttaggttgggggaagcagcaccatgtatattggagtctgatcttggaggactaattttgtcccttttccttctgtctctagggacccaaccagagcctggcctgggagccaggatggccatccacaaagccttggtgatgtgcctgggactgcctctcttcctgttcccaggggcctgggcccagggccatgtcccacccggctgcagccaaggcctcaaccccctgtactacaacctgtgtgaccgctctggggcgtggggcatcgtcctggaggccgtggctggggcg

SEQ ID NO: 18929 - DNA, 2300 bp, Homo sapien
tttttttcagttgggcatggtagatcatgcctgtaatcctagcactttgggaggccaaggcgggtggatcacttgagacgaggagttcgagaccagcctgatccacatggtgaaaccccgtctctactagaaatccaaaaaaattagctgggtgtgctggctcatgcctgtgatctcagctactcgggaggctgaggcgggagaatcacttgaacctgggaggcggaggttgcagtgagccaaaatcgagccactacactccagcctgggtgacagagcaagactccatctcaaaataaataaataaataagattttttttctatattcatataattcatgcatacattctcactgtaaaatttcaaacattacagataaaatgaaattttccccagctgcctccccagtcctacccgtcccatcctgttccatccccagaagtgaccactattgactgatataatatctatgtgcctttgtttctccatttgtaaaatggggataatgtcagtacctatttcatagggttcttgtgaggattgaattaattagtgccggctgggcgccatggctcacacctgtaatcccagcactttgggaggctgaggtgagtggagcttgagcctaggagtttgagaccggcctggacaacatagtgaggccccgtctctacaaataatttcaaaaattagccaggtgtggtagtgcatgcctatggtcccagctcctcaggaggctgaggcaggaggattgcctgagcccaggaggttgaggcttcagtgagccgtgattgcaccaccacattccagcctggatgatctcaaaaaaaaaaaaaattacttagtgcccggcccatgaaaagcactcttgaagaattagctatttgctgtgtgtgcgtgtctattattttacatattttactaatactatccttccagaacttgtttttctattatgtatgtatccataatcaccttagttttctttaaaaggaagtatttttcaggtaatttttttctctttttttattttttgagacggagtctcgctctgtcacccaggctggagtacagtggtgtgatcttggctcactgcaacctccgcctcccgggctcaagagattctcctgcctcagcctcccaagtagctgggattacaggcacgtgccaccacacctggctaatttttgtatttttaatagagacgggatttcactatgttggccaggctggtctcgaactgctaacctcaagtgatccgcctgcctcggcatcccaaagtgctgggattacaggtgtgagccactgcacctggcctttttctctttttaataaaagtatttggggtgccgtgtagtggtctcagcagcgcccttgttagctgtacagcccactagcatttcctcagcacctgctctgtgccagcccctgtgctaatccccttaccgatgtggcccattgcacgcatcccacctgctcttcctcagcctgctggctgcagcccctcatctgacatgacctggaaatttgggggtgccatctcaaagtcctgaccctgcccccagactgtgctgatctggaggcctgggggcttcagactttcttaactgcccggttaacaagcaccggctctggggtctctgctgggaggtcagagtcaggcagtggaagttccagaatcagagacattcctttctcttctacacactgtgaaatcctcataatccctgctttggagaaagagatgacccttgtcctgccgggcacttgatctttgatctgcccacctgggctgaggtgctggcctcacccctgggtggcccctgtcacacgcacggtgtgcatggcgggggtggaattggcaaaacccaccagagaggtggggcttacagacaagtgctgggaggagcctcaggccccgcccccacactgaatgccggtcggggccaaatggttctcaaccttggggctgagtttttacttcctttttttttttctaaatggaaaaatcaatagagtgagcccagccccagcacttaggaaactctatataggttgcggtccctcagaactgcagggccgtcagccttgccggagccagacgtccgctgtgccgtcctcacagcaaggcctgctccgaggccccggggtgcgtcagcagccctcctcaaacaccctgggagtgcccagcagggcggaacacaccgggaaaccaacaccccaaaggcacaaggaagtatccctggagctaaaaatagttctggaaacttgccagggggccacaggctgggacgtgcgt

SEQ ID NO: 18930 - DNA, 2300 bp, Homo sapien
tcaacagtgtcatgatccaaagtgtcttggatctttttttttttgagacggagtcttgctcttgtcacccaggctggggtgcaatggcacgatcttggctcaccgcaacctttgcctctcgagttcaagcgattctcctgcctcagcctcccgagtagctgggattgcaggtgcccgccacattttttttatttttagtagagacagggttttgccacgttggcccggctggtctcgaactcctgacctcgtgatccgcctgcctcggcctcccaaagtgctgggattacaggagtgagccaccgcgcccggcccgaagtgtcttggatcttaatgaggtttagttaatctatgactgcatcatcatgaaaatttccacaatgtccaccaggctttgtcattgaatcttccagcagcagagcccataggtctccttggcttcctgacaccttcgtgggcaaggcgcccctgtgttcagaaggaagaggaaagtgacaaattccaaaaagggccagagggaaggatattcttgggatcccatagctggcacagggctccatgtgggtggacactctgagcttggggactgcaagctcccaggtgacgcattacacattaggagtggcatttcctgtgcccacctggtcattctgtgcaagctggggcacctactcaaggcacgtgtgtgagactgtgtgtgtgtgagtgtatgtcactgtgtgtgaatgtgtcagtgtgtgagtttgtgtgtgaatgtgtgagtgtatttcagttgtatatgtaagtgcgttgtgtgaatttgagtgtttcaatgtgtgaatgtgtatgtgtgtttgtatcagtgtgtgtgaatttgtgtttgtgtgtgaatgtgagtttgtgaatgtgtgtgggtgagagtgcctgtgtgtttgtgtgtgtgtatatgtgtgtgtgcatgaacgtgtgtttgtgaatgtgtgcgtatgtgtgtgtttgtgaatgtgtgtgggtgtgtgaatgtgtttgtgtgagtgtatgtgtgtgggtgtgtgtgaatgtgtgtgtatgtgagtgtgtttgggtgagtgtgtgtgtatgtgagagtgtgagtgtgtttgtgtgtgtttgtgtgtgggtgtgtgaatgtttgtgtgtgtgtgtgtatgtgcatgaacgtgtttgtgaatgtgtgtatgtgtttgtgtgtacgtgtgtgtatgtgtttgtgaaagtgtttgtgaatgtgtgtgtgagtgtgtatatgtgagtgtatgtgcatgaacgtgtttgtttgtgaatgtgtttgtgtgtatgtgtgagtgtgaatgtgtgggtgtgtgtgaatatgtgtgcatgtgagtgtgtatgtgagtgtgtgtttgtgaatgtgtgtgggtgtgtgaatgtgtgtttgtgtgtatgcgagtgtgtttgtgaatgtgtgggtgtgtttgtgtgtttgtgaatgtgtgtggctgagtgtgtttgtgtgtgtttgtgaatgtgtgtgggtgagtgtttgtgtgagtgtgtatgtgagtgtgtttgtgaatgtgtgtgggtgagtgtgtttgtgtgagtgtgtatgtgagtgtgtgtttgtgaatgtgtgtgggtgagtgtgagtgtgtgtatgtgagtgtgtgtttgtgaatgtgtgtgggtgagtgtgtgtgggtgtgagtgtgtatgtgagtgtgagcgtgtgtgtgtttagagtctgcactctgtgtggatcaggaaaggggtccttgcaggctcgctgagtccctgctctgtgcccagccccgagttggctccaatggggctatatagaaaggaaggcatggccggaggacctctgtgtcaagttgaggacacatttccaagactaggaaccattcagggactctggagtcacgatgacaactccccttccctcagccccgaagcccaggcctggacctccaagggactcagggaagggactcaggaaaggggagttccccctggcagcctcctcgtgggcaccaccgagggtgagaggagccagctcagcgggtcccacccccagggttgcccaccttgaccacaaggaaaggagggaggagttattgggccttccactaggaggagacccggggaagtgagagtcggggatcagtcctgcaagctacggagtcactacagggagaggtctcatcactagaaatagccgaagaacctgcagcctcaaccagcgttaaggaggacgtgccgtttctagggagtcttagtcggggctcaccagcttcctgcattttctgaccggctccaggaatagaaccaaaagaagctga

SEQ ID NO: 18931 - DNA, 2300 bp, Homo sapien
ggctcactgcaagctctgcctgccgggttcacgccattctcctgcctcagcctcccgagtagctgggactacaggcgcccgccaccacgcctggctaatttttttttgtatttttagtagagacggggtttcactgtgttagccaggatggtctcgatctcccgacctcatgatctgcccgcctcggcctcccaaagtgctgggattacaggcatgagccaccgcgcctggccgagcctgatttctaatcatgcaaaaagaagctgcggtttgccatgaaaaaatatgctttatgtagaggatttctatttctactaggtggcactgttggcttagaaatactatgtgctcactagagacgtggtagtgagtaacctcacggtgggagaaaggggagaactctgttcctagaagattgcaagggcatcttcctgattttgcctaacaggattactttcctaggctgtaaaactcgctacacatttcacacaaagaaagtgtaagagaccgcagatagagaaggaaggagagttttgtgacaagatagttgaggattctttgccaacacccagaatgggccgccagaggctgggtccagtccaggggcctttgaatcatgccagggtgtgctctggccagaaattgttagttgccttagaacttttcccagccttgcacaatggcgaggtcttcccgtgaaaagaagctgatttaaaacatggccaacattcccaatgacccaggggtgttggggggttctccgtgttctcagcagcaagcctcacattcgagtcttcagtatggcagccaacactaagtgtatgtacccggctgacggatgcccattgacttattttattttaaaatagaggctaagagtgcctcggaatgatagaagagattttaagctcactcccatacttaccactccgatgagtgtcgtaccttggattcccggccaatgcaacaaaatggtatggctctgatgactggaggaacactagggtccttggtctcccactggtttgaataaaacaacatgggcacacgtggagtggttttaaggagtggagaatttaatagacaagaaagaaggaaggaagaggctccccctgttctgagactgagggaggcgggctccaagctgaaagagggaacctcgagtacggtggaaaacagccagttatatgaggaggctggaggaggcggtacctgatttgcatagggcccaggggattggtttgaccaggtatgtcattcaagtagcccacgaaaaaactagccttcctaccctagccttttaatatgcaaatacaggcgccatgatgttctacacacatgggtgtatgtaggggcggccatgttgccaggaacgtggggaaaagaagaagaggcgggagtctccatgtttgggtggacgcagtttctaatggcctgtatttgcatatcaaagcttgcctgcccagctctaagagccagggcttttcttctagacaagaaacatttatggagctgctttaaaagaaaaaaaaatcttcccaagcaccccttttcctatctacctaaaataatttcttaataactcctataacaacaacaaacattatgagcccagttaatagatacaataactgaggcacagagatgttgattgcattgtccacagtcacgcagcttgtaggtggtgctcgtggggttagagccaggtctgtctgacccaacagtctgcatgtttatgcacttggctataacacctgaacaaatgcatgttcaggtgtgcccagcatgacccatccgacatctgagttgggtgttcactgtggtatagaacagctctgaaattgactcccagagtgttataccccttggacccaaggcctgctaggccagacgccccccaccccaccccttctgcagacgtatctccccctaccctaaagaccctgcacagtcccctccctcctcttttttacatagtgacgatgcttaagccctgtggcgcagccctgccaaaaaatgacacctctttcgtttaataattaaaagcaggaactacccactctataaaaggaagtgaatgagtaagaaagtcaaaggcggtctagatgtgcagaaggtgcaagccagagctcaggcagaacttccagagtgcatctgggatctgcatttgccactggttgcagatcaggcggacgaggagccgggaaggcagagccatgtggctgccccctgctctgctccttctcagcctctcaggtgagtggggctggggccttgggcgcttggtatgacaggggcag

SEQ ID NO: 18932 - DNA, 2300 bp, Homo sapien
ggggatagaaatgataaacagatgcaaaaatacgtgcataaattccagaagaaatataaaagtcagagatgaaaagagtcacggaatgaaataagagaagtggggtgactgctgtgcaggagctgagggggactgtggtgaagcccctctaataggcgctgagcaagcagggatcaggagaaaggagggggtgagcgccaggatccctggaggaggagccctgaggcagagagaggagcaggtgcacatgtcctgccaggggcagatgcctccctgggtcaggtggcttcagggcctccagacagcatttcctgtctcctccccagcctgggcaggaaatggtgcaccaactttggatgactaagtcctctgaggcagtgggacatcaggatgtcatgtatccattcacccattcatcctttcaacagccagtttgttaaactgcacttggcagactctggaatgataacgggcacagctgtgaatgagacaagaggctgcacctgctctcaaggggcggccaccctagatgggagcagacattgactcgccaacagaaagactgaggaagacgagagggaagtgtgaaatgggtcatgaggacccctaaaaagcgagccaccataacccgggaaggtcaaggaacacgcaggcaaccctgtcggctggagccaggcagaggagtgggaggttgagggtctggacaaaggcccgagtggggagggtggcagcaccagtgtgaacctggatccaggaggctggagacacctaccaggtgctggggcctgccaggacctgtgtgcagaggccaggtcaggtgggtgccatcctgtgacagcaggagccattgggagttcagcagcgcctccccagggccatgtgtgtgtgtcagggatcacattgctgattctgtggagaatgaaaggggtgggtatgagcagaaggggagaccaggtcagcccatgaaagagccgggatacttcaaagccaggcccaggccagacctgagcactgggctaattggaggccctgggattgcactgggctagagatagtcccatgatgtgagtctgggggcatcaacaccaatgaccccagtgcatgctgtgtccctgagagtgtaaatggagggaggacagggcaggtcgagggtgcagagaccccttcatggtgccaggtttgcccagactcccatcactctccactcaacctcatggctgtgtgcacatactggtgctattgactctgataggaagaaaggaacagaaatctgtaggagggttgggagagtcaaggaatatgcttaaggcatgagaaggtggagaaggggtgatgccctccaggacagacaggaggtaaatcctgtgtctgactagcctccttgccctttccagggtaaagacaccctgagcccatcacgtcaggagaaccagccatgccgagtgtggatagacctgggttcccgcctcctgggaaggcctgtctgccatgtctgctccctgcggaggcccctggccatcacagtggacccaggatagacaccagcagccgctgctcatgacaaactgtcctctcagtcaccaaacacccctccgtgtgccctggggtgtgtgctggctcagtcgcagcctcacatcctccacaaagtcccacttcagcatcttcacatgtctgaactctctctctattctcagttctctgccctgattcccactggggcatggattttggcaagaagacaagatggaaaaggagggtctcgggtgggtgatgccgctgtgtgtgtaggtctgggggcaggggcacaagaggaaaactccccaagcctgtgggattttaacctggttggggactcagcaccaaaaagggacatgcagatggtgtctgggttcatagcgctaacttctgaggccagaagaagagctgggggtcttaggggcagaggtctctgcggggacctagctgaagattaagggacacaacctctctctggtcacctccaaggctaaagaaggtggcagatttagcctccaaccacaagattgtccatcctgaccaggaagtgacatgtcacagagggtggagcagcccatgtggtaggaaatggcccagcttggctctgccttctgcagtgtgagtaacacactgaagccagaagctgtgggctgtggggaagtggctgcatcgccacccaagggaccctggactttgccagacgtcagggttgagaggagccactagcaccatcccagagctgtcagcaccggcctcagcccaggcggctctctccctgagcttcc

SEQ ID NO: 18933 - DNA, 2300 bp, Homo sapien
ttgaagtctggctatgtctgatgcatcccagcctctgctgtgtgccaattcctgctggaccacaccctactcacgctgacggtgtgtgtagtgagttttgatattcaaagtttgcttcaggagcaatctaataataagagatcacagcatcatatttgtctttttatatcatttttctgggattaaatcaaggtataactgacacataataaactgtaaatatttaaagagaacaatatgttaaactctgatgtatgtgtatacccggtaacaccaccaccatgatcaggacagtcaacacattcataatccccatgcccgccctcccccttactctgtccccaggtgttagggactgaactgtggacccctaaaaattatatgttgatatgctagtccccagtacctcaaaatgtgactatatttggagataggacctttcaagaggcaattaagttaaaatgagtttgttagggtaagtcctaatgccatctgactggtatcgttctctgaagaggagatgaggacacacagggagacaccaaggcatgcgagcacagaggggcaaccgcaagaaggggtagcaagaaggcagccacctgcaagccagggagggaggcctcaggctcaactgaacctgccaacaccttgatctcggacttccagcctccagaactatgagaaatacgtttctgttgtttacgccacccagtctgtggtattttgttgtgacagccttagctaagggatgatccattttctcttactatctatgagttggcattttccagaatctaatataaatggaatcatacagtgtaaatcagcttttgagctggtttctttcactcagcataactattttatcattggtatatcagtagaacattcccttttattgcaagttgtattccattgcatgagtatttcactttttttttttttttttttttgagacagagtctctctctgtcactcaggttgcagtgcagtggcatgatcttggctcactgcaaccactgcctcccaggttcaagcaattctctgcctcaccctcccaagcatctgggactacaggttagtgccaccatagccagctaatttttttttatttttagtagagatggggttttgtcatgttggctaggctggtctcaaactcctagcctcaagtgatccacctgcctcagccttaacaaagtgctgggattacaggcgtgaaccaccacgcccagcctgtatttcacatttttaaaaaaatccactcacttgaattgtttccagttttttgctattacaaataaagctgctatgaacattcacatacaggtctctgtgtgaacataaaactttctattattttgactaaatatggaagtgctgaggggctggatcatctctggcgggcatacatttcatgtctgaagaaactgcaaactcttttcccaggtggttgcatcatgtgcattcccacctgcagggtatgagggctccaggtactcgagagtgtttccaacacttggtgtcaaggtcagtaatgttaacttttgttacaggccgaaagaatgagagtcatgaccaacacagtatagcactggaggctatatgagcgaacagaaaactgttctcatgaaagcaggatgttggaaaactggcaacggtgtctgctgcccgaaggggtgctgagggcagtcacaccccaagtgctgtgttccttgtgattatctataggaacatctgaagcctgttgtacaaagaaagctattgtgtgtacctgtaataaatcaagcagctgaccaaccattacctctccctcccttctctttctacctaataaatacgaagggctgtagaagctcagggcccttgttcactagaagcaaggagctccctgaccccttctttcaaaacagatctctttgtctttgtcttcatttctgcattcgtcccccctttgttcaatcccctagcaaccaacagcgacaagtggtggccgggacaggaacgtgagcaaagaaggtctgctggagcagagaaagagaaactgacaagacgaacgagaaaccctggaacaagtctgccggcagccaataaaaggtcagtgccctaaagaggtactgggagcggcagcagatacaagatcagtgccctaaagaggtactgggatatcaggtcagtgccctagagaggtactgggaatgggaagttttctgaataagggtaacatggggcagaatttgtctattgaggtgcaacattatgtgcatttgcttaaagttttacttaaacaaactggtgct

SEQ ID NO: 18934 - DNA, 2300 bp, Homo sapien
ggcaaaagagcaggaattctttattttaatgtaatatctgggaagccatggcagtgagaatgctggagctcaacttcaatcctcttcagtctagagtttagaagaccgctctctgcccacgccccttaaagtgtagcttgtaagtcaagaaagaatcaagggttcaaacaatttggcatgataaattggaactattttcttttctttctctttctttttatattttattttatttcaatagtttttggggagcagatggcttttggttacaaggataaggtctttagcagtgacttctgagattttggtgcacccttcactggagcagtgtacactgtacccaatgtatggttttttatccctcatcccctgcatcctttcccctaagtccccaaaatccattgtatcattcttgtgcctttgtatcttcatagcgcagctcccacttataagtgaggatgtacaatatttggttctccattcctgagttatttcacttagaataatgatctccaactccatccaggttgctgtgaatgccattattttgttcctttttgtggctgaatagtattccatggtgtatatgtacaccgcattgtctttatccactcattgcttgatgggcatttaggctggttccctatgttttcaatcgcaaattgtgctgctataaacatgcgtgtacaagtgtcttttttggaactagtttttttgcccaggctagagagcagtggtgcaatctgggctcactgcaatctccacctcccaggttcaggcgattctcctgcctcagcctcctgagtagctgggattacaggcgtgtgccaccacctggctaatttttgtatttttagtagagatggggtttctccatgttggccaggctggtttcgaactcctgacctcaggtggtctgtccgccttggcctcccaaagtgctggattacaggcatgagccaccagagctattttatatactatttactcctacatactctgaggtctcagttagctacactttatcttgttctcaactatgattggataaccaagaatcagcagacacttgaggaaggctcataatatagaagaagcagacaacaaaacaaagatgtgaccactgagtggagggatatagttcaaggaacagaagagagtttgaaaacatcagtaatcaaagaaccaaaaaaacttttcgaaataaaaatacagtctctaaaatcaatatttgatccaaggattggaagggaaagtacaagcatgaaataaacaatataaaaagctccccaaatgtagaacaaagcccacagatatggaaaatataaaacaggagagaaaaaatgaatcgattcaggagggaaagggagagaaagagggaagggaccatctaaagaaagtggggagagaccgggaaagaagtcagttcgggcgtcagcagaacaagtagattacaacagcagccaggggaaagtgtgcagggatagggaggatgaaatcagggcaagaggaggctaacgagaaaaggcaatttctccattcctgaccttccccactgagcccagctttggcttcagagtgatttcagagtggcttcagagtgactcatgatcccagtggaagtgttcctgggggaaggggcagtgggtcagacagcccagggcaggaagaggcaatgagatgtcttacagtggggctgcctggaagaagcctggggcatgggctttctccagcaaggctgggtgtgagtcctgtgcactgtggtcttcccaaagtgctcctctccctgcactcctcatggctggccttgtccgtcctctcctccaggcagtagatcccgcagctcctcaatgcttgggttcctcctggctcctcctgctccttggctcctacgtgcactcccgtgcaaacctgaccagtcccggacacattttcttttccacatgcacaaaagtttgggcacaccttgcaacatacactgtaccttagtcttttcaaagaatgacacctcttttctcctaatatgtaaaaagagaagtagctacagatgtaacaggaagtgagcaagagacttgaaggagattcgagtaggtttgcggtgttgacttccgagcttggattcaagtccctgaagggcaccagacacctgtgatcaccaaggagaggagaggagacaggaccatgtggctgtccccatctctgctgcttctcatcctcccaggtgagtgtggctggagctttaaggcactggaatgacagcggctggcttggagacagagacgctctgttctcaggaagga

SEQ ID NO: 18935 - DNA, 2300 bp, Homo sapien
aaatggcacaagggttgctatggtttgaatgttccctcagaaactcgtgttgaaacttaactgtcaatgtaatggcattgggatgtgaggtctttaagaggtgattaggccatgagagctcagtcctccgagtggattaatgctgttatctccggagtgggttagttattgtgagagtggtttcctgagaggctgagttcagtcccctttttctctctgtctaggaggcttgcctgctgtcttgtcttctgccatggaatgacgcttgtcagatgccactacgatgctcttggacttctcatcttcagaaagctaggaaggtgaacaaatttgttcttttttattattattatttgagacagagtttctctctgtcgcccaggctgaaatgcagtggcgtgatcttggctcactgcaactttcgtctcctgggttcaagcaattctcccacctcagcctcctgagtagctgggactacaggctcataccaccatgcagggctaatttctgtatttttgttagagacagggttttgctatgttggccaggctggtctgaaactcctgacctcaagtgatctacgtgcctcggcctcccaaagtgctaggattacaggcatgagccactgcacctgccaacttttgttctttataaattagctagcctgtagtattctgttatagtagaagaaaatggactaagacacaatgttgtggctactgtcagctctgctcattctggatccctcaagtgtgtggctcatgtcacacatgggaccagggtcctggtgttttattgttccatccagggctctattctatatataatctatctatctttctttctttctttttctttctttctttcatctttctttcttttttttttagatggagtctctctctgttgccaggctggagtgcaatggtgtgatcttggctcattgctttgcaacctccacctcctgggttcaagtgattctcctgccttggcctcccaagtagctgggattacaggcacgtgccaccatgcctggctatataatacttcatcagatatggtggtacagaaaagataagaagttgtgctcttacaacaaaagtttgaaatatcagatgatccagtagagttctaaaagatagtaaagattagaggctgtgggtatcaaagatgggtatctctggggaaagagaaggaaagaaattatattttcagatagctatgtcttagagaagagtatcttctgatgtgcaagttggattagagagaatgtatagctagtggagggaccagatgagaagctatttcaatggtccaggactattctaaaggtatttaatattaactgggcagttactatgttccaggcactgtatcaagcactttacttacattaactcatttatttcctgtggcaaccctttgagaaagaattgtcatgagtactctattttacagatgaggagactgaggaggagagtgatttggcaacatgcccaaggtcagatgattaataaatgatggagatgagatttgagtttgtgtgacttcagaatctatgctgttgaccatgacccatatactgaactaggttaacagtgtataaccaggtggagcttccctataggaagttagaaagtaggatctggagcccaggagagatattgggatattgggttagaggaagaggtgtgaagtcatccgcatggagataacggttgagaaagacatggggagtgatcaccacagctccttaagtagagggtgttttatgattcaaaagtaggcagccatagagaagggaagctccttagatcgatgaagtaatcccagataggaagaagagtgaaagaggcagggaacagagttttctctgttggagaggtttcgtaaactgggactgactttcatgaaattccgagtcatgaaatctcagggggtgactcaaacattacgttcacattaaatgaaggccaacagattttcctgtttgtgcttggtccattctcagaaacgtctcttgccaccctttctcttctgctaagtaaggcttaaaattaggaagcattctttaaaaggcaaaagaggaaatagatgagtgagaacacaaaggaaacttggacaagtagaaagtggatgacccaggctccgttacatatacttggattccagctgggacctagatttgctgaggacggaagccaaggagacaggaacatgtggctgctcccagctctactccttctctgcctctcaggtgagtggggctgtggctttggggacttggttttgcagggggc

SEQ ID NO: 18936 - DNA, 2300 bp, Homo sapien
tgattgatgtctcatatctccctaaaatacataaaccaagctgccccccgaccactttgagcatgctatcaggacctcctgaggctgtgtcatggtgtgtgtccctaactttggcaaaataaacttcctaaattgactgagagctgtctcagatatttggggttcacactaaacaatacgccttctgatgatctcttctgcctagctaatgcctgctcatgctcagcccaaacttaaagattaaaaactttaatacagtataataaaagcataaacaaagttaatcattgaaaagtaatccacagccaggtgcagtggctcacgcctgtaatcccagcattttgggaggctgaggcaggcagattgtttaagcccaggagttcaagcctgggcaatatggaaaacccgtctctaaaaaagatacaaaaattagccaggcatggtggcacacacatgttgtcccggctagtcagagggttcaggcaggaggattgcttgagcctgggaggtcaagactgcagtgagctttaattgagccactgcactctagctcgggtgacagagtgagaccatgtctcaaaaaaacaagaaagaaaagaaaagaaatctatggaaaataatgcaatatttatgacataaaggattaatgcccataatataaaaattgattttataaatcaataaaagagcacattcattcttgacttaactcattctctatacagtagccaaagtagtatctttaaaacccagatctagccatgccatttccctgcttgaagtccttcaatggcttcacattgcccttagaatgaagttcaaaactcttaacatgatccacatgatctggtccttatctatctctagattggtctcccgttacccttctcccatctttctcaggactctagccacactggtcttttctcagctcttcacaccttaaagcctctgcatgtatcgatcgctttgcctggaatcactccaccaccaccaccctcttcgactaatgcccacttttccttcagatctcagcttaaacatcatttctcatgaaagtcttccatcatcaattctggattggttcagatcctctgctatttgctctataaacctgaacaaacagaatcatgtttctgaagcttcagaactccaaacaagactctgaggagtgacccttccaaggaatgtgaggttccaggcaaagcctctagaatcttcttatctataatagtcagggttggtgaggaagctcaggagaaagttaagatgagcgagtctaagctatccgttctgtactttttttgagtatagacaactttgagaacttaataaaatctatgggattcatttcttcttctggagattgcctctcccccagaaaaagtcacagaagcaaaattttgtgtaatgttatcaatgttgcaaagttcccctaacatccatttatccacctcacattaagaaccccaaccattggatgttatgtatttgtcacaggctgaaaacaaacaaacaaacaaacaaaaacaaaaacaaaaaaaatcagcccagtgagaatctcataaaacaaacacattggttccctagctttgttcatttaatcaatgttcattgagtatctacagtatagtgattccagcaataataacaccttataaatgaaatttactttacaatttaaaagaaaataaagacttttcatgtacattgtctcactcttcccccaaacccaataaagtgggcatagattactctacctattttgcagatgagaaaacataagtaatcccagggaacacgagtgatctggttcacacaactcagccaaaaaggagtgaaacccagcagtaaaacgcactcttttaaccctaagcctggctctttccttccatgttgatattgactccaagggcccgtggctggtactaggacttgtccttagtaatctgataataatcccaggggccacagtctcagcctccagttcccatggtggtcagcctcacgctctcatattccatgtgatgatgcaattttgccaatcaaaggtcgcagcagcaggactcccctgacgtataggagaagtagccagagctcttcatcccctgccaggagagcatagtagctcacatttattgagttcttagtacacgctgggcactgttctaggctttttacatgaattaactcattaaatactcagaacaaaaccatgaggcaggtactattataatattatctccattttgtggacacttaggaaagattaatttgcccgagtttgcacgactaataat

SEQ ID NO: 18937 - DNA, 2300 bp, Homo sapien
gggtgacagagtgagaccatgtctcaaaaaaacaagaaagaaaagaaaagaaatctatggaaaataatgcaatatttatgacataaaggattaatgcccataatataaaaattgattttataaatcaataaaagagcacattcattcttgacttaactcattctctatacagtagccaaagtagtatctttaaaacccagatctagccatgccatttccctgcttgaagtccttcaatggcttcacattgcccttagaatgaagttcaaaactcttaacatgatccacatgatctggtccttatctatctctagattggtctcccgttacccttctcccatctttctcaggactctagccacactggtcttttctcagctcttcacaccttaaagcctctgcatgtatcgatcgctttgcctggaatcactccaccaccaccaccctcttcgactaatgcccacttttccttcagatctcagcttaaacatcatttctcatgaaagtcttccatcatcaattctggattggttcagatcctctgctatttgctctataaacctgaacaaacagaatcatgtttctgaagcttcagaactccaaacaagactctgaggagtgacccttccaaggaatgtgaggttccaggcaaagcctctagaatcttcttatctataatagtcagggttggtgaggaagctcaggagaaagttaagatgagcgagtctaagctatccgttctgtactttttttgagtatagacaactttgagaacttaataaaatctatgggattcatttcttcttctggagattgcctctcccccagaaaaagtcacagaagcaaaattttgtgtaatgttatcaatgttgcaaagttcccctaacatccatttatccacctcacattaagaaccccaaccattggatgttatgtatttgtcacaggctgaaaacaaacaaacaaacaaacaaaaacaaaaacaaaaaaaatcagcccagtgagaatctcataaaacaaacacattggttccctagctttgttcatttaatcaatgttcattgagtatctacagtatagtgattccagcaataataacaccttataaatgaaatttactttacaatttaaaagaaaataaagacttttcatgtacattgtctcactcttcccccaaacccaataaagtgggcatagattactctacctattttgcagatgagaaaacataagtaatcccagggaacacgagtgatctggttcacacaactcagccaaaaaggagtgaaacccagcagtaaaacgcactcttttaaccctaagcctggctctttccttccatgttgatattgactccaagggcccgtggctggtactaggacttgtccttagtaatctgataataatcccaggggccacagtctcagcctccagttcccatggtggtcagcctcacgctctcatattccatgtgatgatgcaattttgccaatcaaaggtcgcagcagcaggactcccctgacgtataggagaagtagccagagctcttcatcccctgccaggagagcatagtagctcacatttattgagttcttagtacacgctgggcactgttctaggctttttacatgaattaactcattaaatactcagaacaaaaccatgaggcaggtactattataatattatctccattttgtggacacttaggaaagattaatttgcccgagtttgcacgactaataattttcagaatcgagatttgaatcctggagcctgtgctcctaaccaaaccaccatctgcctctcctgagcccattgtccttaacttcttgcggtcatgtgtgctggagagaatgtgatcaaagccctggaccttctccctaggaaaacgcaggtaaacagaattttgcatatttcagggactttggggacacctaagacccatctactgtcgacctcagacttagaagctctatttatctcatacatcctggagagaattgtccagggacaaaaacagaagcgccgccagcgccgcaggacttcgcctctgcaaacgtgtgaggagagctgcgctgcgctgagctgcgtggtgacggagatgcccgttcgctcgggatcaggaacggtgagctcctgggaccgcaatgccctgagaacgcagccgggtgctgagcctccggagtccggtagctgaatgaaatacgcagggatcaccagccggacccaaatcttgcgtccctgccagcatcctggagtcctaagaggcagggattggagcggacaggatctcagaa

SEQ ID NO: 18938 - DNA, 2300 bp, Homo sapien
gcgatctcagctcactgcaatctccacctcctgtgttcaagttattctcctgcttcagcctcctgagtagctgggattataagcacccaccaccacacccggctaagttttgtatttttagtagagacggggttttgccatgttggccaggctgatctcgaactcctgacctcaggtgatccacctgccttggcctcccaaaatgctgggattacaagtgtgagccactgagtctggcccttcctaatccttttatatccccagtcccgaccctagggacttgctggggtcttgatgggaaaggagagatgggggatggacatgattgtcagaaggaggagagtgaggggcaaaactggtccttcctttcttccttccttccttcaacaaatagttataaggtgaggggtggagcgaggggataatagtcctgagcaatgaactggtttcctcaggtagaccccctggtacaatggacaggtttctggaagattccagatgtaggtatccctgggatctcacctggtgggctggggtacagcagtaggagcttccttcgtgttctcaggacaaagcgcctcttgtcagtgggccagtagttccctgcttgcatctcccttctctctgaacctctctgtgcgtgcgtgtgtgtgtgtgtgtgtgtgtgtgtgtgtgtgtgtgtttaaagagacagcgtctgctctgttgcccaggctggagtacagtgaacagtggctcaatcatagctcactgcagtttcgacctcttgggctcaggtaatcctcaggccttagcttcccagattgcttggactacaggcatgcatgactctgcagaactaattattattattattgttattatttttgagacagagtcttgctctgttgcctaggttggagttcagtggtgcgatctgggttcactgcaacctctgccgcctgggttcaagtgattctcctacctcggcctcccgagtcactgggattacaggtgaatgctaccacgcccagctaatttttgtattttttagtagagatggggtttcaccattttggccaggccggtctctaactcctgacctggagtgatctgcctaccttggcctcccaaagtgttgggattacaggcatgagccaccatgcctgactttttttttttttttttttttttttttttgtggagatgaagccttgccatgttgcccaggctggtcttgaactcctggcctcaagtgatcttcctgcctcagcctcctaaagtgctgagattacaggtgtgagccaccgtacctggccttgtagtctggggttggatacccaatctcctcatagctgccttccaacctttggtctggaatctctcctctggctttctgactttggccacaagtgcccctcaatcctcttgaacttctggccttctgggctcccaagcatctggctacacctgaagctccaggtttaggacatcgtgtctatcagccgtggctctccaggacccctctggtggagccgcgtgcccctgcccccagccaacccaccaggtttggaggattggataagggctggccagacccagtggatctgtctgcaggtttccacatgacagaggagccacgaagttctctttttagagaacccacggtggctgtgtacagagaggtacttctcagaagctgatgattcctgtgaccccttgcattgtcaactgcctcgaaatttcaccctttccacctccttcctctttttttttttttttttgtttttgtttgagacagagtcttgttctgtcacccaggctggagtgcaagtggcacgatctcggctcactacaacctccgcctactaggttcaagcgattcttctgtctcagcctcctgagtagctgggactacaggtgtgcgccaccacgcctggctaatttttgtatttctagtagagacggggtttcactatgttggccaggctgatcttgaactcctgatctcgtgatccgcccgccttggcctcccaaagtgccaggattacaggcctgagccacggtgcccaaccaaccacctccttcctcttttagtctctttcacccatgggaagtgactgaaggaggaagttcaagggcgagagtgagtaccagcagaaggctgggagtctgtagtttgttcctgctgccaggctccactgaggggaacggggacctgtctgaagagaagatgcccctgctgacactctacctgctcctcttctggctctcaggtgagcgggcctgggtctgtcttcttggggaagcttagcaagcag

SEQ ID NO: 18939 - DNA, 2300 bp, Homo sapien
gttatcccagctacttgggaggctgaggcaggaggagaatggcttgaacagcccgggaggcggaggttgcagtgagccaagatcgtgccacttactccagcctggatgacagagctccacctcaagaaagaaacaaaaagaaagaaagaaagagagacagagagaaagaaagggaaagagagagaggaaggaaggaaggaaggagagaaagaaagagaaagaaagaaagagagaaagaagaaagaaagaaaaagaaagaaagaaaaagaaaggaagaaagaaaaagaaaggaaggaaggaagaaagaaagaaagaaagaaagaaagaaagaaagaaagaaagagaaagaaagggaaaagaaggaaggaaaagagaggggaaggaaggaaggcaggcaggcaaagaaagaaagaagagagagagagagaaaggaaagaaggaaagaaggaaggaagggagggagggaggaaggaaggaagggagggaggaagggaggagaggggaggggagggaaggggagagaaaagaccgcataccaggccaggtgcggtggctcacgcttgtaatcccagcaatttggaaggccaaggcaggcgtatcgcctgaggtcagcagttccaaaccagcctgtccaacatggtgaagttctctactaagaatacaaaaattagccaggcgtggtggcgtgcacctgtagtcccagctgctccagaggctgaggcaggagaattgcttgaacctgggaggcagaggctgcaatgcgccaagatcccgccactgcactccagcctgggcgacagagtgagactccgtctccgggagcccacggcattgagcaaacctcggcattatttgcagcaagagcctctggcatccaaatagcaaccaacaccacgcctctgtagtgtgctgcgcagcctccacactccagtctgaggctccctgtttgagtcccgccctatgcccagctgaggttatagcacgctcacctccagaagaggtaacccaagctctttactctactggagatcacctctgtccccactctgggcgcttctcccagctgacagaaaatacctccagctgatgtcagaaaatacagggctggaggctggcgtacaaagtcagtccccacaggcctatggtggcccataagccacgtctacccctgctcctcacctccacacctaagttaagaattgcaggccgggcgcagtggctcacgcctgtaatcccagcactttgggaggctgaggtgggcggaccgcctgaggtcaggaatttgagaccagcttggccaacatggcaaaaccccgtctctactaaaaatacaaaaagaaaaaatagccgggcctgatgtcgcgcacctgtaatcccagctactccgggagactgaggcgggagtatagcttgaacccgggaagcaaaggttgcagtgaggcgagatcgcaccactgcactccaggctgggcgacagagtgagactctgtctgaaaaaaaaaaaaagtgcaggtacccctctccagctctcccctccctacacatccctcaaaccgtcccgctgtaatgcacccgccctgttccttggtaacttgaagctgcttatagaatgtggagatgggggtaattgaaaggtcggcccaggccacagagcccctgagctctgctaccggcaaccccagctgcactccccactctctgtcaccaggagctgccgggtgcctgggatatcctggcagctctgctcaaaatgatctacgacttcatgaatttatttggctcctcctcggggccagggtgagtgtcatgggttaataaggccggccccgccttcaggagcggtccactgggagatgtgtgctgcgcagccctcttgcgaaagctctcccctggtgggacattctgggcacaaccaacaggccgggggaaatgagaggtgatccatactaaagggtcaaagtccccgcaccaggcagaggccccaaaacaccgcagcgtacatgtgctgcaaggcgagtacgggttggtaaacaaaactatattcagatgagctcgggccgggtgacttaacagatgaggaagtgtctcggggccatcggcggaggcgcagcccaggggtccccagctccccgcctcgccacctggggacagcccacggcccggggctcgggcgccgcctgctgtcgcggtgcgcagcgactacgggaactcttccgcagcagacggggtccccgcggcccgctcccccaggggcaagcaagcgaccacaggggaccggtcccggggctggatgtggctca

SEQ ID NO: 18940 - DNA, 2300 bp, Homo sapien
ggcaaagaaagaaagaagagagagagagagaaaggaaagaaggaaagaaggaaggaagggagggagggaggaaggaaggaagggagggaggaagggaggagaggggaggggagggaaggggagagaaaagaccgcataccaggccaggtgcggtggctcacgcttgtaatcccagcaatttggaaggccaaggcaggcgtatcgcctgaggtcagcagttccaaaccagcctgtccaacatggtgaagttctctactaagaatacaaaaattagccaggcgtggtggcgtgcacctgtagtcccagctgctccagaggctgaggcaggagaattgcttgaacctgggaggcagaggctgcaatgcgccaagatcccgccactgcactccagcctgggcgacagagtgagactccgtctccgggagcccacggcattgagcaaacctcggcattatttgcagcaagagcctctggcatccaaatagcaaccaacaccacgcctctgtagtgtgctgcgcagcctccacactccagtctgaggctccctgtttgagtcccgccctatgcccagctgaggttatagcacgctcacctccagaagaggtaacccaagctctttactctactggagatcacctctgtccccactctgggcgcttctcccagctgacagaaaatacctccagctgatgtcagaaaatacagggctggaggctggcgtacaaagtcagtccccacaggcctatggtggcccataagccacgtctacccctgctcctcacctccacacctaagttaagaattgcaggccgggcgcagtggctcacgcctgtaatcccagcactttgggaggctgaggtgggcggaccgcctgaggtcaggaatttgagaccagcttggccaacatggcaaaaccccgtctctactaaaaatacaaaaagaaaaaatagccgggcctgatgtcgcgcacctgtaatcccagctactccgggagactgaggcgggagtatagcttgaacccgggaagcaaaggttgcagtgaggcgagatcgcaccactgcactccaggctgggcgacagagtgagactctgtctgaaaaaaaaaaaaagtgcaggtacccctctccagctctcccctccctacacatccctcaaaccgtcccgctgtaatgcacccgccctgttccttggtaacttgaagctgcttatagaatgtggagatgggggtaattgaaaggtcggcccaggccacagagcccctgagctctgctaccggcaaccccagctgcactccccactctctgtcaccaggagctgccgggtgcctgggatatcctggcagctctgctcaaaatgatctacgacttcatgaatttatttggctcctcctcggggccagggtgagtgtcatgggttaataaggccggccccgccttcaggagcggtccactgggagatgtgtgctgcgcagccctcttgcgaaagctctcccctggtgggacattctgggcacaaccaacaggccgggggaaatgagaggtgatccatactaaagggtcaaagtccccgcaccaggcagaggccccaaaacaccgcagcgtacatgtgctgcaaggcgagtacgggttggtaaacaaaactatattcagatgagctcgggccgggtgacttaacagatgaggaagtgtctcggggccatcggcggaggcgcagcccaggggtccccagctccccgcctcgccacctggggacagcccacggcccggggctcgggcgccgcctgctgtcgcggtgcgcagcgactacgggaactcttccgcagcagacggggtccccgcggcccgctcccccaggggcaagcaagcgaccacaggggaccggtcccggggctggatgtggctcatgtccgaagcgcacggagccgagccggtgttgctcagggaggctgcccgccccttcacgcagaccctgcggctctgcgtgccctcagggaacagcaaggtccgagccggtgtcgtcgagggggcgacgggacggagggaggagcctgaggggtcccggtcgagggaggggaggagtgggcggggcgggggtggggccgttcctgcgctctccttcgcctgcgggccggcactgctcacctctcgtccagggacatgacgggcacgccaggcgccgttgccacccgggatggcgaggcccccgagcgctccccgccctgcagtccgagctacgacctcacgggcaaggtgggtgggcctcttccgtgagacccccgccctcctcggcgctagcccctt

SEQ ID NO: 18941 - DNA, 2300 bp, Homo sapien
tcagcctcctgagtagctgagactacaggtgcatgccaccacacctggctaattttttgtatttttagtagagacggggtttcactgtgttagccaggatggtctggatctcctgacctcgtgatccgcctgcctcggcctcccaaagtgctgggattacaggtgtaagccaccgcgctcggctgaggagatgattttgaacgagcttgagaaatcagtaactgctactgtccaggtcattggatgctcaggggctcatgagaacctaaagaagaaaacagccccaccttcccacagatatctcatacaacaaagcaggcctgctccacccagcacattccttgcacctgcctccttctgaccatttctccatcccatcccttcccagatctgggacaccgctgggcaggaacggttccgaagcgtcacccatgcttattacagagatgctcagggtgagtccctcgcaccctccaacccctaccccagccccttggtagcatccgtgctgctgcctaagtcccctctgtgatcctctcccctccagccttgcttctgctgtatgacatcaccaacaaatcttctttcgacaacatcagggtaggtcctcccttcccctgactcccacccataagcagccaaggcaaggtctatgcaggctggggttgcttcctgccctgtggaaagcgggtggagcgtggagtcctcctgccttctgaaaaacacctacttgtgactcagaagtcatatctgctgctttgtatttggtggccatgtgggcatgaaggccaagcaggctgttgtgaccctgtgccacctgcatagccctcactgtgattcacgagtgtgtttcgtgacaaagtgttcagaacagcccccactccaccctggataattatccacagagaccaagggaaaaacacaaccagaaaagtccacacatacatccagggcaagttgcaagaaagtgactcagtcagacagagtgagtggttgtatcctcacaaccaaactattatagagacaaaaatttgataaattcaagcaccaattttgttcacgacattgtataggtttcatgaatcccctgacctcaaggacagtttgctgataagcaaactaggagaataaaacgtttatatagaaagaggaaaatccatggcactcatactcctacctccaaccccatgctcatggcagacatcactaatcaatcacagtacttttgatcactgaaacccttatgtggtcttagaatctttaacaggacactccaagaaatcactgctgacagccaactgatttgtgagataaggtctccatgcatctggatcttccatagaactgatagttgcacagcataaaatggtgagggtggggccattgtgggttgagccaccaaggaaggccatccaggcctggatgggccagaacaaaggtacagatgagagaacgcacagggtatcgtgttcaaggtagtgagtaactgaggatagtcaaacggagcagaagaagaaaggggcagcaggaggaagagaatgccagtctcgcacgccctctcccacaggcctggctcactgagattcatgagtatgcccagagggacgtggtgatcatgctgctaggcaacaaggtgagtggctccggggcagggtcagcccagccctgcacttcctcagccctagccggccccataaccacccaagaacagttatctaggcatccttcctgaaaaggactctgcagcctccagctcaggggtcagacatatctggaggcttctgcccatcccatctgccccttccagggaaagtccaagttgttgcctgagaaatcaaggggtgcccagttctcagcccccattagagcagagtgaacagggtcccaggtcaggggctaagagtgcaaagggttagccccaactgctgtcctattccaagaccctttaccaaaggtgagatcccagagctgggagctacactgggcagaaaccctggccccaggccaatcacacctgcctgcagtcccttgggccaccagcagagggcaggcaacgcctgcttctggggcaaaatatgggcccgctggggcggaggcctccttccccagagtgacccatttgggcttgacaggcggatatgagcagcgaaagagtgatccgttccgaagacggagagaccttggccagggtaagtgattgtctgtgggacagggtgaagggtgggggcaacccgacgctggccctgaggacactctctcccgggcaggagtacggtgttcccttcctggagaccagcgcc

SEQ ID NO: 18942 - DNA, 2300 bp, Homo sapien
tgtgtcttatcccaatcctttggcaggcatgcagctccacaggcgatttcttcaagcagctgaagtgtttagccctcctgggttaagagccagataaggagaaatccctttcctaggtttggaatgtgttgtgaaaaaaaagagaaatccctggctcctggagctggtgggagacaagattaagcaaacctcccctgacatgtatccctttgaccccaagctctgcctcctccctgaccacccatgccctttcctttaacttctcaaacagataccagggcctaaactgctttacctcccctcctactgagtcaggttaggtggtgggaggtcacccatttccgagttaaaccaatgcaatatgagtaaaacaaagtcatgtgggtatgtctggggtagagagaggggtagcaagttcatgtgtcctccttggtcacatatctcccaaagctccgatccctgccatgggaagtggacaggaaacatgaggtcatgacctgcaggcatctttactgcagctctgccggcctggagggggagagggggaggaagaagtatgcgctgcacatttctgaggctactgcatttgctttcaaggcagaaatcttgctctgagcagtcagcggctccagtttgggcccgataaggaagttctccgtggcctccctcaggcagagcagggaggaggctgacattgccagtctcttctggggcccaaggcaggttgcaggagatccaatcccatagacagctctgggcctcttgcatttgagtttttcagaattaaactgcagtattttggaaagcacatcctgtccactgtttctttgaagtgagtggggggggggggtcttgttgaaggaattgtcattcactgccaaaatcattccatcctccttcctcagtgtctgtcctcagatggtcagctccccgctcaacagactgtctcccgcctctgtgaccagcctctctttggcaagagggagctagaaggctttacagtcctaatcatttttctgttggaaaaaaaaaaaaaaaaccaaggctcctttccctgtggcgtgtacccagaggttgattacctgagtctgtcctgcctctccccaccccacctccctagccaaacgctgctgccaaagcccacgctattgccctagatggcctgtcttcagcgggctgcccctcgaggtcccaggctctccgcggagccctcaccttcccagcagggatcagaacctgcactcctctatgcgagtcctgggacagcacaaagtggattagggttagggttcccacaaacggaaaaatgttattcaaacaactctgtagggtccgaggaggccctccgtcttaattctcgagactgaccggccctcgctgccccgagcgggagcagttgccccggcaacagccgctccctctcaactggagctgcacccaggctttggctaaaggctgttaaaacgttggccaggtgcggtggctcacgtctgtaatcccagggcggatcacctgaggtcaggagtttgaaaccatcctggccaacatggcgaaatttcgtctctactaaaaatacaaaaattagcggggcgtggtggtgcgcgcctgtaaccccagctgctcgggaggctgaggcaggggaatcgcttgaacccgggaggcggaggttgcagtgatccgagatcgcgccacggcagtccagcctgggcgacagagcgagactccgtctcaaaaaaaaaaaaaaaagttagggtcctttacccgagggccggctttcctcactccccgccacaggtaggggaaaccaggccggagccggcgggcccacccgcccagaaccgggaattcggcgagccccgcccctgccaccccagcgccggccgctcggtaacaaacacttccacttcctgagcgctagtcttcgcccgccgcggggcgccgcgccgagcgcaggccccgccccgcgcgttcccaatggccggcgccgttcacccggccggagcgcccaggcctgcagccccctattggcccgcggaggtccccaccctcagcgcggccccgcccccggggtaaggagccggggcggactctgggacgctcagacgccgcgcggggcggggattggtctgtggtcctctctcggctcctcgcggctcgcggcggccgacggttcctgggacacctgcttgcttggcccgtccggcggctcagggcttctctgctgcgctcccggttcgctggacgggaagaagggctgggccgtcccgtcccgtccccatcggaaccccaagtcgcgccgc

SEQ ID NO: 18943 - DNA, 2300 bp, Homo sapien
atatggaggaaggctttactgtaaacacactgaccagctttcagtaaacacctgcctcttcctcccctgctgcagagaacggggtacaaaggggctgggggtcctcagtcatatgccccaggtccccagccaggctgacgggtgccacactctgccccctctccaggagggccagactgagccaccaatggggagggatagaggcccgatcaacacagcatgtgattcaccttagactgtcagaagggacaggcatgtgagagctaacctggtcctacccctcatttggcagaagaggaaactgaggcttggacagagcagtgttttatccacatcacctaagcagttagctgcggtgctgggtatccacacaagtcttttgagtcctgggccagaaccctctcaaattgctgtgtagggatctaggcaaatttgcatcctcccaaaccttccttggttggggagatggggacaggcagaggacagggaaggcagaacctggggcactgtggaatagccatggaccctcccctgtccctgcagcgcgagcttcggcctcggctctgtaccatgaagaagggccccagtggctatggcttcaacctgcacagcgacaagtccaagccaggccagttcatccggtcagtggacccagactccccggctgaggcttcagggctccgggcccaggatcgcattgtggaggtgatgcttctcgctctcttcctatctgactgcccccaccccctgcagatcagcagcacctggggcagccatcataccatcatgggcttgattagcccacgggcatagccaacctggagctgctggatggatgggtggatgggagggagggagggaagggtggtggatggatagacggaaggacagatggactgactgatggactcttctcttacctccactcccctggactcctccttgccaagcagatacagtgggcagcctgtgattcacccatcgatcagggagatgtctggggccatctccagagcttccctgctgccaggcacacagagtggggtggcagtaacaaaacccctctcctgagttaggcctttatttatttagtttttttttttttaaatggagtctcgctttgttgcccaggctgggggagtgcagtggcacaatcccagctcactgcaacctccgcctcctgggttcaagcgattctcctgcctcagcctcctgagtagctgggattacaggtgcccaccaccacgcctggctaatgtttgcatttttagtagagacaggatttcaccatgttggccaggctggtctcaaactcctgacctcaagtgatctgcccgcctcggcctcccaaagtgctgggattccaggcgtgagccacctcacccggccccgagttaggcttttagactcgtgcattcagggctctggtgctgtgctcctgggagaggaaacgtgaaccaaatgctcaggcaggtcccagaatcacagtcttagaaccttagagctagagatcagctctcccaagacttctcattttacacgtgagaaaaccaaggcccagagaaggaagtcggacagcaagtccttacccaggctgggccccaccccggcctcccagctcgctcccatcccatctctcccagctgtgtttgtttagtctcgtctggatattttcgttggcccttcccatgtatcctgcctccccagctgactgtcaatgggaggacccccagcctagttcaggactctgcagaaatggcgggggtcagtatccccaggttgtgaactgcaaactggctgagaaccaaggtggtcacccctgcccccaacccccctccacttacctgccccagaaccaaggcctgtgtccgtaacgcctccccgaccctgccctgcaggtgaacggggtctgcatggaggggaagcagcatggggacgtggtgtccgccatcagggctggcggggacgagaccaagctgctggtggtggacagggaaactgacgagttcttcaagaaatgcagagtgatcccatctcaggagcacctgaatggtaagccaggtggggccactggccgtcctggggctggagccccccaagtcagggatgtgagccagggctaagactgctgggtcccaggcgaggggtgggcagcttcccggcatgggtgctccctcctcctccttcatgggaggcccagaggtgtgggctgggggagcgggggcctagtgtagggagtggcagtgggtttctgaggacggcttgtgatggggtcagctggcatgaggtcggtgagagag

SEQ ID NO: 18944 - DNA, 2300 bp, Homo sapien
caggttctgctattttttttttttttttttttgagacagagttttactcttgttgcccaggctggaattacaggcatgtgccaccatgcccagctattttttttgtatttttattagagacggggtttctccacgttgatcaggctggtctctttttttttttttttttgagacggagtctcgatctgtcacccaggctggagtgcagtggcgcgatctcggctcactgtaagctccgcctcccgggttcacacattctcctgcctcagcctcccgagtagctgggactacaggcgcccgccaccacatccggctaatttttttgtatttttagtagagacggggtttcaccatgttagccaggatggtctcgctctcctgagcttgtgatccgcctgcctcggtctcccaaagtgctgggattacaggcgtgagccactgcgcccagcctttattttattttattttatttttgagacaaagtctcactctgttgcccaggctggagtacagtggtgtgatctcggctcaccacaacctccacctccctggttcaagtgattctcctgcctcagcctcccaagtagctggaattacaggtgccgggcaacaagcccagctaattttttgtgtttttagtagagatggcgttttatcatgttggccaggctggtcttgaactactgacctcatgatccacccgcctcagcctcccaaagtgctgggattacaggcgtgagccaccgcacccggccgtttttttgtttttgtttgtttttgtttttttgttttttttgtttttttttgagacaggttcttgctctgtcacccaggctggagtacagtggtacaatcacagctcacagcagtcttcatctcctgggctcaggcaatcctcccacctcagcctccctagtagctgggactgcagctgtgcaccaccatgcctggctaatttttgtatttttttgtagagacaaggtctcgctacgttacccaagctggtctcgaactgctgggctcaagcaatcctcctgccacagcctcccaaagtcctggaattacaggcgtgagccacggcacccagccttttttcccccctcatatataattatttctcacaaccaatgtttcttcttaggggaaatagccctgagactggggctgtaccttacacagctctgggtgctgatacgcaccccatgtcaagcgggaaagatacctgggcacatgctccgaggtgtagggtacaaggaccaccttcttccccagcagcaaggtgttctgattcaacctcatggtagcagcctgcatgcagatggggagagcaaagacttcaggaccctgaatttcctccaactttgggtaggcgctccagctttcctgctggggctaagttgacttccgtcattagttccgtctagacacttcaaagaatacagactccaaaattcttgcaagaaagagaaccaggctggttaaggataattaaacaatccttgactcccactccaagaggccaagcctgggctccgtttctgccggttccttccgtccactccccagaacttcgattcctcaaacccaagcaccaagtaccaagtaccaaagtatccccagagctcccattacttgccccagtccagggattccaacccagaatcaactttcagccctgccttaaacctacttccaacctcttaccccggcgaccaccccacggggctctagccactccctccccgcccccgaccacttcagggcaaggcgggcttagtcttaggccctcccctttgagtggcgttctagaccactctcttcgaccctccaaccacgcggacccgggtactgccaagctcacacccacctaccaccgacgaaatcgtcccccgcagaaagggtgatctacctcctccaaccagccacgttcccaggcccggccggctaccgccccttccgcatgcgcgtgagaacgcgccccgcccacttccgccatgctgacggcagccgccaggccccaatcccggtcccgcccccgcgaggcgcccaatcagcgcgcgcgaaaaaggtgggctgtggggccggcgcatgcgcgctgcggaagctggtgctggacagctggcgccggcagcagcggaccggcgggagacggcggcttgggagctggctgtgctgcaggtgttgggtcgggtcgggtcgggacgggcgggagaggacgagacgggtcgggataggttggggcggggcggggcggcactagactcgggactcctccaggagggagagagagggagaggctg

SEQ ID NO: 18945 - DNA, 2300 bp, Homo sapien
agcagaaacagaccagagatccccaggctaggaagctatgtacaaggcagggcagctgttgaaggcaggtcaagttctagaaaactcttgctacttagggcagtgctgcttttgcctgggagggttggtagcaacctgagtcaaccatctgattattccaaccctctggctacttatccaggcaagagggccctgtgatgtaacaactatgaccaatcatacgttacatagagaagataaactgcgtgtgtgttgggggcagccagaggtaacacagacctaagacagtgagaatcaatcattctaattgttctaattgcagagtccaccaaactgtaattagaagtctctgtatgctttcgctgcttcttacgccatccaagactataaaagttgtgcaatttaaaattcagtaaagaccaaagcggtttccaactgctgagatgagcaaaacccagagtcaacagctgtcaatcactgttcatctgaagggcagcactgcaggcaagtgtggtagcctggagatgaacattatttctttatttttgagacagagtttcgctctttttgcccaggctggagtgcaacggctcgatctcagctcactgcaacgtccgcctcccgggttcaagcgattctcctgcctcagcctcccgagtagctgggattacagtgccaccatgcccggctaattttgtatttttagtagagacagggttttaccatgttggccaggctggtcttgaactcctgacctcaggtgatctgcccgcttcagcctcccaaagtgctgggattacaggcgtgagccaccgtgcccagcccgggattaacattataaacagcatggcgattttgtttggcttgaccactctgacaaacaccttaaaaagagaataaatctgacttacattctgagccaccacagcagcactgtagtcgctgccccatggaactcccccatcctgcttccactatggtctgctcaagcagcagcactcactagtcccatctccagcaagcaatgtgcttttctagaagccaggaacacttaagtgagcaaaaggttctataagtcacactcacgtaggaagagtagagttccccggtctctgtaatttcacccgccatttccaaaagtgaggaagggctggcagcagaggttccttaggtgcaaggacggcggctgccgcagctccttaaaacaaaagagcaggcttcacctatctgatggactgagacaggggtgggaggaggcttgcagacttcccctgccacctctggttcttttatcacagacacttagggcctcagtatctgtcacaagactcacccccgagggaggggtcaccctggatgacagaaatctggacggtttcttctaacatttcccttgctgtgcagggcactgctctgtgcccagcacggatgttttcaatgctgctcggggtgcaagtgatttaaggggcctctaaaaccactaagtctcacccaccacaagagccccctttccacgctctggggtggttatcctcgtttagttccaggaaccaggagctcactaccacacatgggagcccaaggaactgtctgccgcctctgcctagggcagggagctgggggctttcctacattgcccttccaactccactcttggcactaaggcctcctttttttaatggggcctccactccctggccccacctactctcttagggttccccaccctcaaagctccctcttttctcaagaaccccactcccagcctctccctctctctccctcctggaggagtcccgagtctagtgccgccccgccccgccccaacctatcccgacccgtctcgtcctctcccgcccgtcccgacccgacccgacccaacacctgcagcacagccagctcccaagccgccgtctcccgccggtccgctgctgccggcgccagctgtccagcaccagcttccgcagcgcgcatgcgccggccccacagcccacctttttcgcgcgcgctgattgggcgcctcgcgggggcgggaccgggattggggcctggcggctgccgtcagcatggcggaagtgggcggggcgcgttctcacgcgcatgcggaaggggcggtagccggccgggcctgggaacgtggctggttggaggaggtagatcaccctttctgcgggggacgatttcgtcggtggtaggtgggtgtgagcttggcagtacccgggtccgcgtggttggagggtcgaagagagtggtctagaacgccactcaaaggggagggcctaagactaagcccgccttgc

SEQ ID NO: 18946 - DNA, 2300 bp, Homo sapien
ctgtataacctgaggggtcctcgaaattggcccaaggtcacacactcgtgagctgcgggctcaaacccaggctccgggcaggctggtgtgtcctccgaggcgcacttgccccgagtgtcaggtctggggacgcggttccggagaggggagaggggcccgggaatgcggcgggaggggcctcgaggggcagcgggccgggccgggccggggcggaggtggcgggccccggcggggcgggccctcgcgggcggcggtgagagctcccgcacagtcggctgcgagctctgggagcaggaggcgcggtgcgcagcccagcccgggacggagccgggcgccgtgcgagcctcgggagggtcgcggggcgcaggggcgggtcggggccagcggaccaggccgcgccacccgcccccgcccccgccccgccgcgcccgggctccggcgcccgcggagctgagactgagcgcgccagccctccggggccgaggctctgggacagacaccgcgagggaggcggccggcgcgggctctcgtcgcgggcgcagcgccccttcccctcggtaagtggcgagcggcgggcgaggggcaccaacttcgccgccaacttggggctgggttcccgcggcgcgcgagcaaggacggcggagacagaggcgggacacccggggggttggacccacgcaggactctcggggctcaaggagggggcggctggaggacccggaccctcaagaacctggccttgggttttgacccgggcggccggagagaaggcgaagaagaggccgagcagacaggcgcgcggcggacgcgagagaaggacgcgggcgaagcgtccaagacgttcgtccccagggtcgccgagccctcctcctccttcgcttggcgcggcagcaccgcgggaccaggggagtctgggctgccgcggacccaaactgttgctgctggaagccgccggggcggagagcggggaacagggccgggagtgggggccggggctgggatccaccagagcgaggggttggaaaggagtcgagaaggtgaaagggggctgtgcggctccccagcccagtgccccagtttccctaggtctgctgggcacctgctgcgcactcgcctcggcgcccagaccccttcccccgccgcgagtcccgcttcttccccttccagctctgccccatctcctttgccccagcctagctctctccttcctgcgacctgggagaatcggagtgggcttccagagtagtggcatcttgcagatgctggcccgtgcccggctcccgggcttccagagcgcaaagggaagggtaggcagagagggcactgggcgagcaagacctggcgctgggccctggctgcgcaccagccgcctgcgccggtctctgggggcttcgcccaggatccccgacggcggggaggggaagccccgagtctcctgtttcctgcctacgcgggcagggcggggacacgcggagcaaaggcacccggcaacctgaacccccaggtgcgtcccgcgaccctgcaaggagctgctgggtgagcaagacgggaattcccgccaggccctgatgcccaccccattcgtccactcggtttcccagccctggtcgtccaaggggacttctggctcggtcccccagccctcggatggtggcgttatcttagttcagtccctgaccccgggccacaggaaaatcgaggaaagacacttatttggggagggtaccattccgctggctgtatttcagagcccgtccaggtcttggcggtgctagtgactttgagcctgtttctaaactcccgaagaataagagcgtgccaggggcaggtaggcaggtccgggacacctgggttcgcccagggcccccgggcgggcctgggatggtactggggccgcctgccaggctggcttggtccccccactgcgggactcggggtcacgacccagcttgggggagtgggggtgggggccccggagccgcggacgccggcggggggcagcgtggggcggggggcgccgggtgcgtggtgctcagcttggccgccaggaggcgtggcgcgggtccccgcccggagccgccgccgccgccgccgccgccgcatcgcgagtgtccttgagccgcgggtgacggtggctctcgctgctcgcgccccctcctcccgcggggggagcctgatgccacgttccctatgaattatttatcgccggcctaaaaataccccgaacttcacagcccgagtgtaagagattgctgcggaggggagggggcggggcgtcccggtggccagggggagtccgg

SEQ ID NO: 18947 - DNA, 2300 bp, Homo sapien
tccggccagtctctttctcagactgggagaagctggatgccgaggaggtggcccggggccagggcacggggaagcccagggagaagctggtggatcctcaggagatgctgcgcctcctgggccactgagcccagccccagccccggcccccagcagggaagggatgagtgttgggaggggaagggctgggtccgtctgagtgggactttgcacctctgctgatcccggccggccctggcttggaggcttggctgctcttccagcgtctctcctccctcctggggaaggtcgcccttgcgcgcaaggttttagctttcagcaactgaggtaaccttagggacaggtggaggtgtgggccgatctaaccccttacccatctctctactgctggactgtggagggtcaccaggttgggaacatgctggaaataaaacagctgcaaccaagagccatggttgatgggggactttttttggaagggttggggtcgggggtcaccttctggccgtagctcccctaccatcaccaggtggcgctgcagagacggctccctgctcaggggcctcattggggcttgatggggctcggcagccaggcctggcatagccacccttcctttctccgctcggccctgctgtggctgcgggttgcctgtcttctgtccacactagggctgcccgggaccgggaccgggaccacccctccctggggagccctcagtacaatcaaaacagaaaagaaatgggagcgggggactgagaagcagcttgtcccctgtacctctgggtgccccaggcgagtctagcctggggcccattctttggctctcaaagccttcctgcttccgtttccagtcagacacactggcctttaaaaatagtgcctcagtctccctagggctttgcagtgtccagagagtggtcactcccttttatggcagccctcaagatgctgcctcgctgtataacctgaggggtcctcgaaattggcccaaggtcacacactcgtgagctgcgggctcaaacccaggctccgggcaggctggtgtgtcctccgaggcgcacttgccccgagtgtcaggtctggggacgcggttccggagaggggagaggggcccgggaatgcggcgggaggggcctcgaggggcagcgggccgggccgggccggggcggaggtggcgggccccggcggggcgggccctcgcgggcggcggtgagagctcccgcacagtcggctgcgagctctgggagcaggaggcgcggtgcgcagcccagcccgggacggagccgggcgccgtgcgagcctcgggagggtcgcggggcgcaggggcgggtcggggccagcggaccaggccgcgccacccgcccccgcccccgccccgccgcgcccgggctccggcgcccgcggagctgagactgagcgcgccagccctccggggccgaggctctgggacagacaccgcgagggaggcggccggcgcgggctctcgtcgcgggcgcagcgccccttcccctcggtaagtggcgagcggcgggcgaggggcaccaacttcgccgccaacttggggctgggttcccgcggcgcgcgagcaaggacggcggagacagaggcgggacacccggggggttggacccacgcaggactctcggggctcaaggagggggcggctggaggacccggaccctcaagaacctggccttgggttttgacccgggcggccggagagaaggcgaagaagaggccgagcagacaggcgcgcggcggacgcgagagaaggacgcgggcgaagcgtccaagacgttcgtccccagggtcgccgagccctcctcctccttcgcttggcgcggcagcaccgcgggaccaggggagtctgggctgccgcggacccaaactgttgctgctggaagccgccggggcggagagcggggaacagggccgggagtgggggccggggctgggatccaccagagcgaggggttggaaaggagtcgagaaggtgaaagggggctgtgcggctccccagcccagtgccccagtttccctaggtctgctgggcacctgctgcgcactcgcctcggcgcccagaccccttcccccgccgcgagtcccgcttcttccccttccagctctgccccatctcctttgccccagcctagctctctccttcctgcgacctgggagaatcggagtgggcttccagagtagtggcatcttgcagatgctggcccgtgcccggctcccgggcttccagagcgcaaagggaagggtaggcagagagggcactgggcgagcaagacctg

SEQ ID NO: 18948 - DNA, 2300 bp, Homo sapien
gaatccatcctccaccaccagatatactgcctctagatggggagccctacagaactttttcgattgtacgaacttccattatgtgctagccagtgtgtgaagccctgggggtataagagctgagactgggtccccatcctcatggagcttatagtgtagtgcaggggtggtcaaactctgtaaaggaccagatagtaaatatctggggctttgcgaaccatatgatctctgttacaactactcaattgtgccatcaaagcacaaatatagccatagacaatatgtaaagaagtaagcatggatgtcttccaataaagttttattcaaactgaagtctgaatttcatgtaatttttacgtgtcacaaaatgttgttttttaccattaaaaatataaaaacaagctgggtgtggtggctcactcctgtaatcctggcactttggaaggccgaggtgggaggatcgctttgagttcaggagttcgagaccagcctgggtgacatggcaaaaccccatctccacaaaaaatgcaaaaatgaaccaggcgtggtggcaggcacctgtggtcccagctactccggaggctgaggcctgaggctcgcttgagccaagccaggaagcagaggttgcagtgagcaccactgcactccagcctgggtgacagagcaggaccctgtctcaaaaaacaaaatcaaaaccaaaaacaaaaaccccaaaacctccaaaaaaacaaaaacagtaaaagccattcttgttggtcatccaaaacatgctggtggacagtatttggcctgcaagctatagtttgcctactcctggtctagtgggacaggcataaaacacagtgacctattagaaagcagacagcatttacttaccagtgggagggaggggaagtgaccagtaagggcacagaggactcctgggatactggccatgttttatttcttgatctgggtggtggttatatggttacaccttgtgatatattgtcaagttgtacactcatgatttgtgcacttttctgtatgttattattgaatttaaaatctcattaaaaacgacaaccagtgtagtaagtcatgatgggataaggtcagatgctgtggaatgagaggcctttaactccttggaacttgggaggggacgggtcagagaaaaggcttctccaaggaagtaatatttgacaagagggcccatggggaaaaggaagaggggttaggattattgggtcagctgtgactacggatcctgtccttatttttaaaaacattttgatcatagactttttgcattacttttgaccttttaaaacgttgcagtattatatttatcttgattactgagtgttttggagcccccttaaattctgaacccgaggggagtacctcaactctggtcccggctcggctggctgcacgggggtcggacgctctgtccttagtaccatacgtaagccactgccccgccccgcttttcttcacctatgtaatgggaaaggaggtgaggtgggacgagctttccagggtttaatattctccctggcccggcaaagacggggatttgaggggttacatcggcacaacacccggggtcgaagaaggaggctgctgggctccgggaaggagctccctcgccccagacttccgcactctggttatttcccaacggcgggaaggctcgcttggagccggactcgtgattggctaggacgaagtcacgtgggaggattcgcaatcaaatggcaagggcgtctgcgtcatcagtgagcgacgagagcctcccgagaggggcgcggctaagtaaaataagctcctttcttagtggctgtttccttggggagggactgaaacagcgatggggattcgctctcttccaaccctaggcttccgggatttggagggaaggtgaggcctggggagaaatgtattaaatcgcgtataccccggatgctccgaggggcggggcttcgacggtggggcgtagttaagggcgggtctctcttttgggggcgggattctctcgggagtcggggtggagccgcaaggctccgctttcccggagcgcagggggcggggtttggggcggggcctcgcttgtgggcgggcccgggcaggagcgggcttgccctgcggagcagtagctaggaacagatccacttgcaggttgctgttcccagccatggcttcgcgctgctggcgctggtggggctggtcggcgtggcctcggacccggctgcctcccgccgggagcaccccgagtaggagcagggcgcctttggggctggatgggagcgcgggga

SEQ ID NO: 18949 - DNA, 2300 bp, Homo sapien
agttggaggttgcagtgagtggagatcgcgccactgcagtccagcctagtgatagagcgaggctctgtctcaaaaaaaaaaaaaaagaaaatctctcatggaaaccattgcatttggagaagctcctggattcagctctaattctgccatttactaactgtggagtgctgggcggatcagttcatctcttggggcctccgttgattaaatgaagatgaggccatcctatttttttttttttttgtagatggagttttgctcttgtcccccaagctggagtgcaatggtgcgaacttggctcactgcaacctctgcctcctggtttcaagcgagtcttctgcctcagtctcccgaatagcttgtattacaggctcctgccaccacgtccagctaatttttgtattttcagtagagccggggtttcaccatgttggccaggcaggtctcgaactcctgacctcaagtgatctgcctgtcttggcctcccaaagtgctgggattacaggtgtgagccaccgcgcctggccttagatgatgccatccttgagggatgtggggaatccacaaaacctcatcagtatgtgaaagtcaatgataacctgcggggcaggtatatgcgcacgtgcacttggtgagaattggtttattaaattgtcagtcccttagaatactgagctggtaaataaatcttattctttgataaagaattaaaggaataagctcatacgaattcatgattagccaggcttagtggtccccgtgtgtgcctgtagtcccaagctactcaggaggctgagggggaggatcacttgagcccaggaaatcgaggctgcagtgagctgtgattgtgccactgcactccagcctgagtgatagagcgagaccctgtttctaaacaaagagagaaaaaaaagaattcctgaaggaaaacaccaggaaggagtcaaaaggaatcaatgtcattaggatccctgactgtctctcccttaccccacccacccagcttctctttcctaggggtctcctgctaaagatgccactgtcctcaccataccagatcccttaagtcatgaaactgggagtaagtaaaacaaaaaagaaaagagaaagggtattcagaagcagggaagaggagtttgtagaggacagaggcttatcccctgaggaccaaggccatctccagcagtgcggggtgggggcctgggctgatgggaaggggatgtgacaggtgtggctcccacatctcagagggcttggctgaggccctggccctgggttcaggcctgggcgctcttgagggagtggaatggcagcgggacccggctggtctgcctgcccacccagaatgatgacctccggatgtgttttccctgtagctacccctctcacccaaaacattattgggctgaagagccagctcccctgggtcacctctgctgaagccatactcagaggggacctctcactccttgacccacggggagggggagtggggagtccttgaactttctgccctaggaattcccagatgtttctgtgccaagcattgccctaggtactgaagacagagcttgggcaaaacgaggacgtctctacggcactgagggtccgtctgttggcagagacagacgacagcatgtgtcatgtatgtcacgtacgaggggagctgctcagtgccactacgaatagtcagggtcgagggaagagaatgctcggacagatctcagggaccgagggaactcagggagttatttgaggtcggaggtcagggaaggccctcggggcggggcgggggtggggggtgtctccactggggtctccgtgcccctgacgcctccgtccctactacctgggctgggtctcaccgcagggtcgcctccccgcctagccactctcagctcatcggcctggctcctccctccgcggcggttctgatgccgcctgccagggtcgcgcgcctgagccgggcctgggtcgccagcgcccgcagcagaggagccagggtgtctcgcaccttgaccccgggggcgggtgtccccaggcggcgcgtgactccgccccggcccgccccgcctcgcctgcaccgcagacacacgccccagtcctccagtcctccgtgcgcgtcgggcccgagcccacagagtccatggaacccacggagcccatggaacctacggagcccatggaaccggcgcggagcgcgcaccgtgggggcgaggcgctgctgcgggagctggaggtgctggtgcaggacgtggtgaggacgagctcctggtgggagcgccacggcgtggactgcg

SEQ ID NO: 18950 - DNA, 2300 bp, Homo sapien
tggaggtggctcaactgccacctccaggccccttccctggcactgacacctgcactgtatgcccacccccccacccaggacaactccaaagggagggggagggaagagaagccccttcagggtgaccacatcacagcctccaccattgcttagctgtgcccggctgtgggggagggacttggagagagttaatggagtggctgaatcagtgacatttggcgccctggacagtgtccataaatccccaaaatgagcaggttgagggcaagcgctgtgtgacaccagcctgccggagaacgtgggtgctggctggcagagccctttggatcaaggctggagagtgggcagtggagacccctccctttctagcccccactgctggcccctcgagacttcctaaccttctctccgagtctcactatcccctcactcttgcttccagggggaccccagccaggggatctctcccaccttcccctcactctgcagcaaccccccataatcaggaacccccaaatcccggtttctcccctcctagccccagatccaggtcacaagtgttaacaagtgtcagatgcctccgcttgggtcccctcaacatgtgtctctcccacaaacgccagggtctaagggtccgcctgtctgcaggggaaggaggcagctcagaggagtggtggacgaggaagtttggggtggtctcaggggcctcaagggcactgggtggggcgtactcacccgcggctcacaatgagacgcagcgactcgaggttgccatggtaggcagcccagagagtgggggtcatgccatcctcgtcgggggcattcagctcctttcgggtggcctccttgaggagctccaggtagccatcccgggctgcccggtggtactggtcgttcatggcgcccgaagtggacggggcgggcgggggacacggagaaaggccccccgcaggggagggcggcggtattagggctgaggcatgaggttggaggacggggccgggcaggggccggggccgccagcccccgctgccgcagacggagggtgcggagcgccagagccgcgactaccaagacatctgaaacgctcacccgggggcgggggcggagggggcgggggacgaaatctcccgctgtccagggagccgcccccggtcttcccctgggtcctaaacaccctgcatgcacctcaatacacgagggtgacccacgcaaggccctgtcctcctcttcaaaagtgcccaccccggggccgcgcactgtgacgcccagtccggggacagtcagagatctgtcctcactagagcctggggcgctgtggctccgtatttctccacctgtcagtggaacgaaccgagagctggggaggggtgccggagggcggggtgggggagccgtcctgagccccaggacagtggacctaagaaggggcaccgtgaccgaccgcggttcggtcagcgagtgggacgggccaggccgccgccgcctgaacggagtccctcgaccgcactccagcagggggcgctggaggactggcagcggctccgcgtgccgcgtggaacttcgcacccaagccccggagtccaacggagcgcgggccggcggcgggggcgggcagggcggtgggatagaggaaaggggagcttggatcactgcgaggaccgtgggggagaggggaactggggttgccatcccaggcaggagcacaggagcacaggattcagggtgcgccgcggctggagggcgtcagggtgcccgcaggctttttggacgtctcttgagcttagctctcggggctctgggcgcctggaatgctgcgcgccagggcgcggtgggcaccaggggcggggtgccctctaggtgccgcagtgcggggccgcgcccgagcctggccgcaccggggtgacggagtggggtcgcctctcaaagggtaaatatgaatcttgccttatctggctccagcgggctcttccctaaattcaccttggagaaagatggatcatgtgagcgggactgagagctttatggagccaaactcccgcagctgtaaatcaccctgtcctcctgggtataaagcgcctgtccatctcggcgtgggagagaggagacgctcgccgtcccctgacccccagctcagcgccggctccaagcccagccaggtgggtgccccgggccggagggcagtcggacttggggagtggggaccttggaggggtccaaccgggtgctgccgcttctcctttcttcccatccagcgagaggggcaggttccgcattttctcttcccctttcccagcgct

SEQ ID NO: 18951 - DNA, 2300 bp, Homo sapien
ggatggaagggtgagtgtatgactgagtgggtggatggatggacctgctaccaagcccccctctctttggggctgtgtggataccgcaaagggccctggctgagctctttcagtggctgccatcttctggttcctgctctccatcaaaggccctccctcagccagccttctctaatcttcagaccgggggcaaagaggtccccttccatccctctattcatccctcccccaggaccccttaccttcctctttttccctaactgcagcccacttcaccctccggtcctcctggtcctccctagggagcctctcgccctcgtatgtcaatctgcactctgcaactcctgcgagagccctagcctgcagctccctgttgtgcccaccctacctcgcccccacctcccctggcacctcggagccagatggggccagcgtgcgcgtcccggtagggtaccgcgcaggggcagcgcacggttcggaggaggtagaagaggatccagagcgttgccagcagcatcatcgcagtgagcagcgcgaacacgtcggtgtcgtacacggccaccttgttgaaggctccgccgctgatgagcgtgcaggcgaggagcagcacgttcaccgccagcagcaccgacagcaggcggccacccttcttccacacctccctggggcccgcacgcggcgccggggggctctccttggggccctgggccagctcctcggacatggcggaggcgactggagaaggctagagggatcactgtaggggaggagcggacaaaactccaggtcaaccctgacggctctccttcccccatctcatccctagacttggggactagggagttcctgacccgcagggttggggcttcgggtgctggaggaagcgctgggaaaggggaagagaaaatgcggaacctgcccctctcgctggatgggaagaaaggagaagcggcagcacccggttggacccctccaaggtccccactccccaagtccgactgccctccggcccggggcacccacctggctgggcttggagccggcgctgagctgggggtcaggggacggcgagcgtctcctctctcccacgccgagatggacaggcgctttatacccaggaggacagggtgatttacagctgcgggagtttggctccataaagctctcagtcccgctcacatgatccatctttctccaaggtgaatttagggaagagcccgctggagccagataaggcaagattcatatttaccctttgagaggcgaccccactccgtcaccccggtgcggccaggctcgggcgcggccccgcactgcggcacctagagggcaccccgcccctggtgcccaccgcgccctggcgcgcagcattccaggcgcccagagccccgagagctaagctcaagagacgtccaaaaagcctgcgggcaccctgacgccctccagccgcggcgcaccctgaatcctgtgctcctgtgctcctgcctgggatggcaaccccagttcccctctcccccacggtcctcgcagtgatccaagctcccctttcctctatcccaccgccctgcccgcccccgccgccggcccgcgctccgttggactccggggcttgggtgcgaagttccacgcggcacgcggagccgctgccagtcctccagcgccccctgctggagtgcggtcgagggactccgttcaggcggcggcggcctggcccgtcccactcgctgaccgaaccgcggtcggtcacggtgccccttcttaggtccactgtcctggggctcaggacggctcccccaccccgccctccggcacccctccccagctctcggttcgttccactgacaggtggagaaatacggagccacagcgccccaggctctagtgaggacagatctctgactgtccccggactgggcgtcacagtgcgcggccccggggtgggcacttttgaagaggaggacagggccttgcgtgggtcaccctcgtgtattgaggtgcatgcagggtgtttaggacccaggggaagaccgggggcggctccctggacagcgggagatttcgtcccccgccccctccgcccccgcccccgggtgagcgtttcagatgtcttggtagtcgcggctctggcgctccgcaccctccgtctgcggcagcgggggctggcggccccggcccctgcccggccccgtcctccaacctcatgcctcagccctaataccgccgccctcccctgcggggggcctttctccgtgtcccccgcccgccccgtccacttcgggcgccatgaacgaccagtacca

SEQ ID NO: 18952 - DNA, 2300 bp, Homo sapien
aatttttaaatcacagtcaggacaggcccatccaccccagtatgaccgtggggcatgaggtgactggggaagggagacctctcctggcagcatttctaggacccaacaagatctggaggtgccggctctggttccatctctaatcccctgctgtggcctggccagtgtactgcccggagctggaaaccaataaacctgtgatttgcccccatccccactgtttgtctctgttgtcccgtctgaggtggtcacaggagaggatcttgggagtcagagcgggaagggcccctggagattttcaggtctcaagttttgcagtgtgtgagcaaaatccaaatgacagactagctacagggtgggtaactggagttcccaaactgccatcttcctcttccctttatctccaggtggcatatacatataatctttttttttttttttttttgagagagtgtctcacctttttgcccaggctggagtgcagatagatcactgcaaccttaacctcctggactcaagagacccccccacttcagcctcctgagtagctggaactacagctactactgccaccacgcctggctaaattgtgtgtgtgtgtgtgtgtgtgtgtgtgtgtgtggagatgagggtctcattgtgttgcccagtctggtcttgaactcctgggctcaagtgatcctcccccctcagcctcccaaagtgctgggattacaggcatgagccacagcactcaacctaatcattttctttgtgtgtgtcccatgacagaagaaagtttaggaagcagtgacctagtctaatgtctgcattttacaaagaaggaagctgaggcccagagaggtaaagtgacttgcccaaggtcacacacctgcaaaaaatccagagcctttctgctaagaacaataattttcaaactttgttttcaagcagaacatttttcccttcaaataaaatattacaggaacacaagtttataacatagatataggctgtgtgcagtgcctcacgcttgtaatcccagcactttgggaggccgaggcaggcagatcacttgaggtcaggagttcgagaccagcctggccaacatggcgaaactctgtttctactaaaaaatacaaaaagtagccgggcatggtggcgtgcgcctgtaatcccagctactcaggaggctgaggcaggagaatcacttgaacccaggaggcaaaggttgcagtgagccgagatcatgccactgcactccagcctgtctaaaacaaaaacaaaaacaaacaaacaaaaaagatataaacaaggcagttctaatttaaaaggagttgggagtctcagatcctcaccacttgacttccccctgccccaggaggtccccgaggagtttcccctaagccctagggtttctactctacaaagggtatagagatgcttaggagggaagacagcagagagatgggaaggaggctccacagttagaagagtgaaaggtggtggtgagcatgcagaggcagagggaggggaagggctgggagagggagggctgggcgggacccatggagcagatggcatttgggggagatcatgggaacagcagcactgggagctcaggggactttgaggaaagtgtgcctggaccctgtcagcagaaggaggtgagtagttctcagaggccgcaggtggagctgaggaggcctcctcccctgtcagaatggggctgtgctccaactctccccaccaagttcaggtttgacttaagggaaacacagggtcctgctaggcggcctccaggcctggggctaggtagggtacaggaaaaagcgactccaggcctggagggagggcgtccattcccagcttgatcaccaaaggaaaacgaggcctgaattccgcaagctctttactgcggacctaagaacactgcacccctctccaccccatccgagggcgggctgcgagttggagaccctgcaggcccgcgcctgcacagccctcagccccgcccgcttgtccagctgcctcgcaattggctgcaccctctgggtccgagcccccgggagggtaattaacgagggattaatgagatttccaaagtcaacagaaaaatcgatgggccgcggagcccgagcggcggctgcgcagtcccgctgggggagggcgtcgcgggcatcggtctcacctggacggacgatccgctcagcgcccgcagtcggtggttagcccacggcgatgcctctcccggcctcaggtaagcccggagcgccggcggaactttcccagcttgcgcaccccagacactggcacatact

SEQ ID NO: 18953 - DNA, 2300 bp, Homo sapien
gtgagactctgtatcttaaaaaatagtaataataaaaataaaaattagccaggcatgatggtgcatgcctgtagtcccagctacttgggaggctgaggtgggaggatcacttgagcccgggaggttgaggctgcagtgagctgtgatcctgccactgcactccagcctgagtgacagagtgagacctgtctcaaaaaaataaataaataataaaaataaaaagtagctagccgaggagtgaagcccgagctcagggtacagggtgggggtgcccagcttgacagagcaggtggcgcgctgggaattcctgcttctccccacacgtggcggcagcctggggtctcctgacccatctgaagttcaggctggccacaggcaagctcacagagatggctggggatagctaaggccttctgcagtagggcgagaaagatctgggggaaagaagagctcacgctgaaagcccaagggttagaagaagactgagcgggaggtgggggtggcactggaggggctgcaggtttgggggctgcctcccctgaactgagtgccttggggcacaggagagcccttccctaactcagcacatcctcttccccagctgtggatgatgcctgcatttggcatacacccggagtttgagaacgggctagaaaaggatttctacggctaccagatatggttcgccatcgtcaacttcggcctgcctctgggggtcttctaccgcatgcactctgtgggaggcctggtggaggtctacctgggggcctgaggctgcccacccccggcagaacctcgaagtgccaaggtggggaagatggtagcccagagtctctgagcagatgcctcattctgaggtgccgagaccagcctgaggctctcaaggcctcctgctccccagagcctcactgaaggggagggcactgcctagagccagaggccaacagcaggggcctggacactgagcttctgatgcccacggccaggcctgggcacatgcctgccccctgccttcccaccacgatccgcaagccaagggtgcaccccaggaggctggcaggggccccctcacggctactctgtgggagggtcagacctacatgaccgagtctggggagcttggcgaggggcacccctctccagccaggactcagaggtctgccccctgctgcgagaagagcacctggtccaagtgtggctctggacatcctcagagctcagagctccgagctaggaggccagctcctctccccacacacctgtctcctaatgagctcattcattggctgccaggcagggttcaacagctctctcctgccgcataaaccctatttgtttaatggattgcattcaggctcatggcatttgttcccagggacagaactgctcctccggacatggtgggaaggaatggtccttttgagtagggctgtggggctgggacagtcctgcttccgggccaggaggggtctaacccagttcttccttggtctgatccgggggaagaggtgggagagacaagtccgggctcgtgtctctccacccccacccctccccagcacaccctctctctaggacagagcccccggtgacattctgcagcgggctcaccatgcaggctgtggcccctggctgccggtcccaggcctggctcatctcctgagccatcaggtagggcaggaacggaagagaaagggcaggtgtggcaggccatccgtctccctgagcccagtgcaaacagtgggctctgcctgggacgaggccagagagggcagccctggccctgcaggtgaggctctgccctcctcctcacccacccccaccgaagtgagtcactagcaagcatagccctcccagcgctgtctcagtggctgcctggtgaggccccatggcctctcctgtgggctctttctctgggcagcaacagcccaggggcccaaaccctaggtgacagggtctgatcctgctttcccacccaagaaaataacaaatgctggttcccagtcatgcactgggggccctctggggtgcagagtccccagctcccctgaagacaagagccacacctggcccctcgcctcaaccacagagtcagaatgtggagcaggaggttttattgtaaagaggccgattgtacagagcaaagattgttctgacacggggggctgggtggtgggacccagaggccagagctgggtgaaggatgaggggtggcatcgccccatccaggcagtgggcagggcagggaggactaaacggctgcctcccagttcccttccctgcccctcattactgggtaa

SEQ ID NO: 18954 - DNA, 2300 bp, Homo sapien
aggcgtgagccactgtgtctggcctcttgtgtgtttcatatgtgcagcacacgtgttaggactagctgtgtttcaagcacgaaatggccacacgtggctgatgtccactgtgttgggcagtgcaggtttggacatttggagtcacagtgtatggggatgtggaggccccaccctttctgcctttgtcctccctgtccagcccctacccccacccagcaaggactgcacacagctgctggggagaggaagcagaaggagccaggctccctggggttcaggacctagcaaggcaggtggccatgggctggggcaaaatgccttcagtgtgaacatcttttggagaggatggttgtggctaggggtggctggtctgtctgtgttctggtttagactgcagggtgggtagtgtgcggtggtagaggcctctagctgggctgtgagctttggggtcaggactgtcccttcccctcctggttcactctctggctccatctcacaaatcttaactgagctggttccgagaacacacttgtgaccaagacagccctggtccctgccctgtggagccctcagcctagtgagggaaaatgacacaagacaaggaagtgttcagatcagcatggaacttcagtctgggtgtgcccccagggttgggtcccaaaatacacctctagtgacatggcagcttgacgttctagaaagatttaaagtcttgagtttgtatccctgcccgatcatttcattactggggaacttgggccaagtttacaaccttctctgagcctcagtttccatgtctgtaaaatggggatgatcttgtctgtgtcctgcctccctcgtggtatgggggggactggcatgggtgggatgtgtatggctttataagcaggacagctgtcttcatggtcgaggggtgagggtggggcctaactgcctcccaggactctgcacacagtatggccagtgtggactcagcctcttagggccttggtcgtcctggctctgcagggggcagggagggattgagagcaggagcctgttgttccaccccggcccaggatgtgcagggatggcttggctgaggggcccaggagtgagctgacccctcccttacagtgtccccctacctcaagagcctgtccatggtgactgccaacaagttgctgcacctgctggaggccttctccaccacctggttcctcttctctgccgcccagaaccaccacctggtcttcttcctcctggaggtcttcaacaacatcatccagtaccagtttgatggtgaggcaccagcctgaggccctggtggtcagggtggccagcgggcctacttcctacataaggggggcacagcccaggaggtggcctctgggaggtgctggcctgcttgccttctgcccccagttcattcattcagtgtacatttattgagcatctacagtgtacctgggtgcaggggatgcagtggggaacaaagctttgcttcttgccctgtggagctcatagctggggatggaggcagggaaggaggcttcaaacagatgatggacatctgaaatttttttttttttcccgacggcgtctcactctgtcgcccaggctggagtgcagtggcgcgatcttggctcgctgcaacctccgtctcccaggttcatgcaattctactgcctcggcctcccaagtagctgggattacaggcgccccccaccatacctagctaattttttgtatttttaatagagacaagcaatctgcctgcctcggcctcccaaactgctgggataacaggcatgagccgccacatctggcctgaaatgtgataaaagggaagtacagagtagtaagtccctgatgggtatcttagcagcccgtctgcccagtgtcacagacatccggctgcctgctgtcacttcaagccttgccactcgttagccctgtgaccagggcacgtcacttgacctctctgatcctcagttccctcatctgtaaggtgctcataacaatggttctaagggtcctggtctcagaaggtgttgggaagatggggcaaaataacccccagaaggcacttagcacagtgcctggcaacttaaaaatgatcagtttctattattgctatttccaaagtcgggcaaatttgcagtgatctctgagggagaaataggggtaaggtggggcaagagacagcacatgcaaaggccctggggtgggatgttggaactgaaagtgaagagtatggcataaggcaggaccagagatggggactggggcctgagagccaggagaagtcagcgttgggg

SEQ ID NO: 18955 - DNA, 2300 bp, Homo sapien
acaggcctccattcccatctctgaggacccaagggagggtatctgccccttaagaccctaaggggtatgaatgtgtcctaatcatggctctgggcttcccacacccactctttccaagccactccctgacgtggtgctaaaatgcttgttgaatgaggctgaccttcccacgtggccagagaggtgtggccagggggctgggccccagtgcagcctctgcagccttgtccctctcctgctgcagacatgccctgcccctcttcacctccctcctcaacaccgtgtgtgcctatgaccctgtgggctacgggatcccctacaaccacctgctcttctctgactaccgggaacccctggtggaggaggctgcccaggtgctcattgtcactttggaccacgacagtgccagcagtgccagccccactgtggacggcaccaccactggcaccgccatggatgatgccgatgtaaggatgggagcatggaagggacagctgccggggccacgggttgtggggaggacgcctgctcaccaggggcttctcctcttggcagcctccaggccctgagaacctgtttgtgaactacctgtcccgcatccatcgtgaggaggcaagtccagtccccacagtggctttgcagggtgcagggggatgcaagtgagacagggatatgggggatcctgacccctccatgaaggaaccatgctctctgtgggctggggccaccctaggtgaaatagtggcaggactgtgagggtttcaagatgcaggaagggctgatggcctcacctgggtagaggtaactgggaaggcctctaggaggaggtggctgatgtcatttcagaggtggtggggacaaaaggggaatgacagtggacaagggcttcaggccaagcagtcccagttcatgtgtcttgtgatcttggtgggaaggtgcttgaactcccagagttctaacttctgcagctaaaacacaggaccctagctgccttctcaccccagctagtggcaggcctcagtaaatgacagaacagtggaatgctcctcgagttgtgatggggtgatgggggagtattttggggaggggtagaaggatggaacctgccaaccatgagtccaaggtgggcagggacaaggttgagggtgtgcatgtgtgggagttcactgagagcagcagccttgctcaaggggcgcacagcccaaggacagagagtctgcagtctagtggaggggccagggctgtccacagctatgagggactccgcttcctgaggcatcgccccaggacagctatgggtgatagcatctgggccctctggctctggaggtgggatctggctctgggggatggagggggggatttgttgggggcctgggctgggaaactggagctgcagggattgggctggacaggccccctgctctgccctcgcccccaggacttccagttcatcctcaagggtatagcccggctgctgtccaaccccctgctccagacctacctgcctaactccaccaagaagatccagttccaccaggagctgctagttctcttctggaagctctgcgacttcaacaaggtgggccagcctcgaggggccctgcagggagatggagagcagctgccccaataacccgggggcagggacagtgtcagactgaggggggtggggcagagctgcccctcccttgaactcagcccacttggcccctccccgcacccctagaaattcctcttcttcgtgctgaagagcagcgacgtcctagacatccttgtccccatcctcttcttcctcaacgatgcccgggccgatcagtgtaagaccagggtgggggtgggatgctgggggctttcctggcggcgaggtggagggctggctatctgccctgactcccaggagctcaggcctggcactctgacctcctaggagggaggcctccaaaatggtcactgcctgggcccctccttccccctcccacccgagtgacccctcccacgccacctgccgcagctcgggtgggcctgatgcacattggtgtcttcatcttgctgcttctgagcggggagcggaacttcggggtgcggctgaacaaaccctactcaatccgcgtgcccatggacatcccagtcttcacagggacccacgccgacctgctcattgtggtgagggggctcgtgcggccgggcccaggaggtgcaggggtggtgtcctcttggctgagtctggaggcagcggggaccccacggtgcctctgtccctcctggcacaggtgttccacaagatcatcaccagcggg

SEQ ID NO: 18956 - DNA, 2300 bp, Homo sapien
acccacctccggagaaaggctagagctaccctatcattgccctgtggagtttgtttgttccgtgaaatggcgacacccttcgcactcctctttccctccacacccgctccaccctgccacacttttgctcccagatggcgtgcccctcatttttcacctgtagaattcctctttaagtgaatgtcacatccttttgaagcatctaggggccaggcatggtggcttacatctgtaatcccagcacttcgggaggctgaggtgggaggatcccttgaggccaggagttggggattagcttgggcaatgtagcaagatcctgtctatacaaaaaatgaaaaaaaaaattagctgggcatggtggtgtgcacctgtagtcctaactactcagcaggctgaggcaggaggattgcttgagtcccagcattcgaggctgcaatgagctatgattgcaccactgcactccagcatgggcaacagagtgaaacctcgtctgcaaaatgcatgcatgcatgcatgaatgaatgaatgaataaataaataaataatagggctgggcatggtggctcacacctgtaatcccagcactttgggaggctgaggcaggcggatcatttgaggtcaggagttcaagaccagcctggacaacatggtgaaactctatctctactaaaaacaaaaaaaaattagctgggggtggtggcgggcccctgtagacccagctactcgggcggctgaggcaagagaattgcttgaacccaggaggtggagtttgcagtgagctgagattgtgccactgcactccagcctgggtgggcgacagagcgaaactccatctcaaaaaataaaaaataaaaaagcatccaagatttccagaagcttccagacatagcttgcaaaatgatgttgtggaaaaagcgcagcctcatttggatgagctccttactacctgtgtggctttgggcaagtaattgctttaagcctcattttccccaagtgtaaaatggggataaaataatacctcagaggtagctattagagatatcgtcattgtcgtcttgttttgattccccccccccccccgagatggagtcttgctctgtcgcccaggctggagtgcagtggcgtgatctcggctcactgcaacctttgcctcccaggtttaagcaattctgctacttcagcctccagagtagctgggattacaggcgtgcgccactaagcccagctaatttttgtatttttagtagagacggggtttcaccatgttggccaggctggtctcgaactcctgacctcgtgatccgcctgcctcggcctcccaaagtgttgggattacaggcgttagccaccgcacccggccttgttttgatgattaatctgcctctattacaggcttatttggctgtaccctggccgcttctttccttatccctctccctagctgctcgccataaagagcaggctgtactacttatgtccgctgtgtccgtccatgacacagagttggcaaataccagaccctcagcacatttgttgaaatggatgaatctcaaaggattctctgggaatctggtggctagagaggggtcgggaccgcgagggactctcgcgctcagcaaggcgaggagctgctttcctggagtatggaaactgagtcagcgcctccctccctcataaccaagggcctgcgggactgtctgaacacgtgggtttgacaggtcagaaaaagggagaaccaagagagtggatgctcagaaaacatgaatgggaaagacagactgagaaggaggaaagtgggatggagagggccagctgagacgtgggccaggagccggagcggagatgaagggtgaggaccggggcgggggacgagctgcgaggagggttttgggccctggggactgcgtggtagcagcggaggcgggtacaatgctccgacgcagaaggaagagcgtcgaggctccgggtgggacctgagaaggcacccggcgtgcggcggcgctgggttggaaccgccgactccgcgggtcttcggcggcgggcgctgcaggtgcaggaggcggagccacgcgggggcggggcctgtcggggcggggccgacgagggccgggggcggggcgcgccgcttgtctcctgcgagagccgcgggggccgcggagctggagccggagctgaagccggagccgggttggagtctgggcgggggccgggccggagcgggctccagagacatggggtcgaccgactccaagctgaacttccggaaggcggtgatccagctcaccaccaagacgcaggtg

SEQ ID NO: 18957 - DNA, 2300 bp, Homo sapien
tcctgcaggtgttgatcatgagagcactccctagtcaactttctttcttttttctccctctaatccaatatgattgatatccctaatcaacttcctgcatgctaatctccatctcaggatcagctgcctgggaacacaacctacaacagcttacgttattcagctttcatggttatcaagcagtcttttttttttttttttccaagacgcagtcttgctctatcgcccaggctgggtgcagtggcgcaatctcagctcactgcaacttccgcctcccaggttcaagcaattctcctgcctcagcctcccaagtagctaggactacaggcatgtgccaccatgcccagctaattttgtatttttagtagagacagggtttcaccatgtttcccaggctggtcttgaactcctgacctcaagcgatccaccctccttggccttccaaagcgttgggaattacaggcatgagccaccacgcccgggcagttttctaaagtggttgtcgtcctatgtattccctccagcagggtgagagagttccagttgctcaacattcttgccaatactaggtattttttgtctttttttttttttttttttttttttttttgagacaggatcttgctctgtcacccaggctggagtgcagtggcatgaccacagctccctacagcctcaacctcctagactcaagcaattctcccacctcagcctcccaaagtatctgggactacagccgtgtgtcattatgcccacctaatttttatttttaaatttttttatagaaataggatcttgctatgttgcccaggctgctcttgaactccaggctcaagtgatcctcccaacctcggcctccccagagttctgggattataggcatgaaccaccacgcctggccttttttttttttttttttttccctaaagccactctggtgattgggtagtgatacctcattgtggttttcatttgcatttttctgatggctaaagaagttcagtaccttgttgcatatttattcagttatttgtgtatccttttttgtgaattacctggtcaaatcttttacccacttttctactgggttgcgtgcctttttcttatgactatgcagatgttctttctgtattctggatacaagtcattcgttgggtatatcacaacattattcagagattctcaacggcaccagcacattagggtcccaataaaaatgagttacgtgaatgcttgagtccgaacactcttctaaggaaagaatgcttggacagatgcaagtgtgtatagttttaatgggtataattggatataggatatgggtcccaaggaaaggaaaacagaaccttgaatgcaggtaacacaccctcaaactttgccactttcagcctgtggtttctagccacaagcacttaaacacgcagttcccaaaggcaactgtaaattagtattcattcattcaaagaatgtcgatggaaggtatcaatgaccagcatgttgtttgttttttgtttgtttgttttttgaggcagagtctccctctgtcgcccaggctggagtgcagtggcgctatcttggctcactgcaacctctgcctccagggttcaagcgattctcctgcctcagcctcccgagtaggcatgcgccaccatgcccagctaatttttgtatttttaatggagacggggtttcgccatgttggccaggctggtctcgaaacccctgacctcaggcgatctgcccgccttggcctcccaaggtgctggaattacaggagtcaggcatcgcgcccgactggtgagcagcctgttctaggaagtgagtagccagctgtgaaagagaaacaatattcttgcttccaggagatctaggagagacgacaacttctaaaatagcataattttagacatgagacataaactgaataggtcgtagggggaagtaggacgaaagggttgatcaagcaattcccagaccaagacaccaggagggtcccgccctcggccccgcctccagctttgcatacatctcctgattggtcggcggcggcaggccccaccccgcggagccgagctccgcaagctgcaggcgggctccgccaagatgcagcggcggctccggttgtcgccgggcgggccaggagcagcgcggacccgagccgggcagggggcgcccgccacggcacccgcgcgctcctagcgccccagacccgcctgcgggcccggatcctccttgccactgtcccacccgccgtccctgccactccaccctttgtgtcgccgcagcccggtgcccccggc

SEQ ID NO: 18958 - DNA, 2300 bp, Homo sapien
ctactcgggaggctgaagcaggagaattacttgaacccaggaggcagaggttgcagtgagctgaaatcgtgccattgcactccagcctcggcaacagagcgagagtcaatctcaaaaaaaaaaaaaaaaaggaggtcttctgacccagggcggtacagagaagaagaaaggggtcctatgtaggtcctatgtaggaccccctacataggaatagtaccccaactcataggccctatagaaaggcttgtgtctgcaagctcctcagctgccagaaatgacctctttcctctcttctcccatgaatgtcccctccctgaagcaccatctcggcctatagaaaaccaaggaggagaaagggaagactggcctcagcctttagtgcccatctttttgggagaacaggtggcccctttctggcctttctcccagggcccccattctggatagttcacggcagcagcaggtaagaggagcttgccagctgctcctctctccaccccagggcggcttgcctcattctctcctctacccacctcctctcccagaatccaggccaccagatggcccaagcaggctgtgtttatttggggccatggaaacctgcagcttccttttcctattgccttgggtcaggtgcagagctggagcccagcctcagagcaatgatgtcatggaaaggttctgactttattactcataaccccttagcccccgacctgagtgaatgcctggttttgctcctctgagcagcttattccagttgccatagagatgcgtctattccctttgaggtcttgggactaagtcaaacagcgcgggacccaggagactctcctcccaacccgagatagagcccgagatatgtcaattgtcacccctttctagtctgagcttataaagccagtgcttagaaagtggtttattccttcttaaagatttgctgtagccataatgcggagatggtaaaagcttggtgtgatgacaatctcctgtttcaatcagccagcatccccgggggcacatttttctagataattatgcttgttcctaaaaatagaactcttcattaagaaacaatcgctagcattactaataattatgaacatttatttagctttgtttccatttaccacatagcctctcaacacagtaacttaactaaggtttagctgttttcaaacactgcttgctctactgtgaacctttttcagaattggaacttgtctgtagttcatcccttaccagcgctatgaaagggttctagttagctggcagttctctgaattctctccctacctcccgagggaccccctctctcctggctggaagaaagcatcatcttgctccataaagctgaagggcgggggacgatgttccaggttttgcaaacatttctttcggtggcctgccttctcctcccatctggtatttgtcctgcagagctgctgggtataagccagtacacacacgtgctcagcggggaatttgctcataggctgccttgtaaaaagagcctggcgttcctaaaactcagctctaccagaacccaactttcaaaagtacattcctacagaattcattttatcagtactcatggggtgcccacgatgtgccatgttctgggtgctggggatataccagtgagccggtgccctcctggagctcacattccggctaggagacagcaattagacaattaggactgagtgatttttgtaaaggaagagaaaaaagataaattagagcagagtaaaggggctgggaagcgcggggcgggagatgccccaggctggccgggcaggcctcgctgctgtttgaattgggcagtgggcggtccaggcggagggcacggactctgaaaggagagaagtggtgtttctgggggccacaagatcggggcactcttccggtagcagctcgctctctggccaccgtcttccccagccaaccaggcctcccggaggcggccggccagaaagcatcggcgggaccccagtttgccgcctcccctcggcgggacctagaaactgcgcggaaccaaagctcgagggcggctcgagtttgcggaccgcggggaggaagcgcccgccggaagcagtcgcaagacctgagcatggcggccaccaggtgcctgcgctggggcctgagccgagccggagtctggctgctcccaccgcccgcacggtgcccacgccgggcgctgcacaagcagaaagacggcactgagttcaagagcatctacagcctggacaagctctaccccgaatctcagggctcggacaccgcctggagggtcccgg

SEQ ID NO: 18959 - DNA, 2300 bp, Homo sapien
gttgggagagaatgtatttgtatgccacattgcacactttgaatttgaaaagctacactgtcctttccttttctttttgagacggactcttgctgtgttgcccaggctagggtgcactgatgccatctcagctcattacaacctctgcctcctgggttcaagtgattcttatgcctcagcctctggagtagctgggattatggcgcgggccaccacggctggctaattattgtatttttaatagagatggggttttgccatgttggccatgctggtctcgaactcctgacctcaggtgatccaaccgtcttggcctcccaaagtgctgggattacaggcgtgagcccactgcgcctggccgcacaccttgaattaccttgaatttgaaaagctacactgtctttttttctttttttttgagttggagtcttgctgtgtctcccaggctggagtgcagtgatgcagtctcgactcactgcaacctccacctcctgggttcaagtgattcttgtgaagacttgcatgtttctaagatttaaaggattctctctaagagctcttattttgttatttatcatttttcccaactgaaaattcacctcataaaaaagccttgtttttatttgacttatttttcaggatcccaaaatggctgggcgaaaacttgctctaaaaaccattgactgggtagcttttgcagagatcataccccagaaccaaaaggccattgctagttccctgaaatcctggaatgagaccctcacctccaggtcagtatgtttctgagagggaaccccatacttgccactgaatctagaaacaaaacagtattaaggaattacatatgaattcttgatgcccttatgacaacatataaagaaatccttgcattttcatgatgatcttaggagaggaaagtgtggtgaccctccaggccataggaagaagggataggaaaattaccatgtgaattttctactgcttatgaacaatcctaacttttgcctttccttgtgggcaggttggctgctttacctgagaatccaccagctatcgactgggcttactacaaggccaatgtggccaaggctggcttggtggatgactttgagaagaaggtgagacttcacacctctaaagcactgagcttgtaacatgcctgtgggtagggagcaggaacagggataattacatacacagcatgacagccagatccctaaggaagcttaggaaggatgcgtatggccaaaggccttgtggtcgattgaactgtaaataggtgcaggaatttaggctctgttcattcagcagtagagtgtagccttaatctgggagccagagggctttctgatcagcacaggagttttgacctgctctgtttctgacctgggccggttcaccccttcttaggcaacctggtggtcccccgctcctgggaggtcaccatattgatgctgaacttggtgaagacacccgatcggcataacgcgctacagcccagaactcttgggctcaagcaatccacgtgcctcagccaggcatgcgccaccacgccccagggggctttcaagttaaatgtttgcccacctcctgggttccttttagcttccttcctgtctccctttggaacaaactgactttttttctactcttttcctgtcctttttcttttgagacggagttttgctctgtcacccagggtggagtgcagtggcgcaatctcagcttactgcagcctctgcctcccaagctcaagccatccttctgtcttagcctcctgagtagctgggactacaggtgcatgccaccaccacacctgataaattttcgttttgttttttttttttttttggtagagacaggtttttgtcatattgctcaggctggtctcaaactctgggctcaggcaatccacctctctgctcttcttttttttttttttttgagttggagtctcactctgtcactcaggttggagtgcagtggcgccatctcagctcactgcaacctctttctcccgggctcaagccttcctcccacctcatccccccgagtaactgggaccacagcaccaccatgcctggctaattttttgtatttttggtagagacggggtttcgccatgttgcccagactggtctcgaactcctgagctcaggtgatccaccctccttggcctcccaaagtgctgggagtacaggtgtgagccaccatgcccagcctctgctttttttaactgtcccttatagctgtaatttctcatccatctatcctcctctgatatttacacaagtctcaat

SEQ ID NO: 18960 - DNA, 2300 bp, Homo sapien
gaaattttaaagctgggcgtccgggggagacatcacacgttggtaggatccgtgatgccccacaagccacaaaaaccagcaagtttttattagggagtttcaaaaggggagggagtatacgaataggtgtgggtgacagacatcaagtacttaacagggtaatagaatatcacaaggcaagtggaggcagggtgagatcacaagaccacaggaccagagcgaaattaaaattgctaatgaagttttgggcaccattgtcattgataacatcttatcaggagacagggttttcagatcaaccggtctgaccaaaatttattaggtgggaatttccttttcctaataagcctgggatcgctatgggagactggagtttatttcacccctgcagtctcaaccataagagacaggtacgccccaggggggccagttcagagacctacccctaggtgcgcattctctttctcagggatatcccatgctgagaaaaagaattcagcgatatttctcccatttgcttttgaaggaagagaaatatggctctgttctgcccggctcaccggcggtcagagtttaaggttctctcttgttccctgaacaattgctgttatcctgttcttttttcagggtgcccacatttcatattgctcaaacacacatgctgtacaatttttgtagttaacacaattattacagggtcctggaacgatatacatcctcaactgacaggattaagagattaaagacaagacaggcataggaaatcagaagagtattgactggggaagtgataagtgtccatgaaatctctacaatttatgtttagagattgcagtaaagacaggcataagaaattacaaaagtattaatttggggaactaataaatgtccataaaatcttcacaatccacgttcttctgccatggtttcagccggtctctctgtttggggtccctgatttcccgcaacatcagtggaaaatggaagtcacaaataactttgtgtgtgtgtgtgagtgagacggagtctcgcactgtcgcctgggctggagtgtagtggcgtggtctcggctcactgcaacctccgcctcccgggttcaagcgattctcctgcctcagcctcccgagcagctgggattataggggccttccaccacgcccagctaattttttgtatttttagtagaggcggggtttcactacgttggccaggctggtctcgaactcctgacctcgcgattcgcccgccttggcctcctaaaattctgggattacaggcgtgagccaccgcgcccggcgaaattttttttaattcttaaaaatctattgcttaatccccagcgcctagaacagatcatgcgcataggaggtgctcaatgaatctttcttgaatgagtaaccgaactctgcacccgaggagccctgaacgctctatacgttcgaatcctggaagctgccgaaggggaagggcgcagccccgcagccagctgagcgtccctcggcaggttaacactgtctgcgtaatgtttccccagtccccccaccaaactattgaagtctgccgcgctgggagcggactgcacgagacacggcttgtggcagcgcctacatcagcggcgcctgggacacagccgggcccccctgaccccgcgcgccaaggagggctgaggaagggatcgcggggcgaggagcggcagctacacaagggacactctgccagcggggcaagccgagggcccagcgtccttgacgggggcgtgacaagggtcggcgtgaggtttggagagggcagagcagaggagccctccagggatcggatccaatgccccaagccccactcaccttcaccgaccctggctgcccacggtcctccgcagcaagtaacggaagtgggtcacgggaagatctttcctcagccaaccccaaagccaagggggtgggccttgcttcgcagatcagccaatagagatgagggctggttccggaagtatcttcccgggggcgggcacagcgcctcccccgcgcgggtccccgggcgctggttgggggcgctcccgtccctctcccctctgccccacccccgccgatgggccggcccggctctccctgccgagaaatgggccggcccggctgcgcgcgggcagcagcggtggcggcggcggtccaagatggcggaactgcagctggacccggcgatggcggggctgggagggggcggcgggagtggggtgggcgacgggggtggcccagtccgcgggccccccagcccacgcccggctggccccacgccccgcgggcacg

SEQ ID NO: 18961 - DNA, 2300 bp, Homo sapien
tggcaaattttgttacacatttgtcacaaactattggtaagaaagctatagctttatgtatcttgtacattaagatcatcttaggtagggtgttacagacagtcatactcatttaggcgtttacttactggctggaatttgcaatctttgcctggacaataattacagtgacaaacattcttctgtagcgtgtttgttattaagaaagggagaaaatgccgtagctgtgtaactgaaatctttgcttgagatggacattctgacttttccactgcctctgaactgcattcctaattccaagaaaacctctgtgtagttggcaatgctcctgagctcaaggccaacatcagtgggagtttgcactgccagctgtaatctcacacaccccagctctgtgcccagaggaagctcggtactgccaggacttggctctgagcagctttaatcctactcatctttacagtaaaaggaacaagaagaaactggcttctattaccacaaggaggatatagagtagataaaaataattcctttataagcaagggttttgaaatctctttaaagttagggcaggataggtttccatcaatctgagatttcttagagaagaggaataaacgaaaacaacaaatgtttacgcaactccagctctgttttgaggtcaccagctgagtgctatatgggatataagatggtgtgagttatggtcagtgcctttaagttgagaacttaaaggtgaatacgtaaagttaaaaagaaattgacacagttcaaactggaaatggtttaagtgtcttgtcacctctcaaccctttggttagcagccatgcatcctgcccaaaattttcccgggaaaattttcattttccttctgtcttagcctagatttgcagcggcaaacagtaacctctttccaaaaaacgcatttgatctaaatatggacctaaaccagtgactgttaacagataaaagttctgcgaccaggactatagaaaagcagtgtgatatcacaaggagcgcttcctgcagctgtggaagcccaacttggcagaggggtccgagagggagtctgagaaagctacaaggatgcctgagctaaccctgacccagttctggatgcatctggcaccggcagtggggggactgaagaggagccagggaaaactcatgcagatctcagtgggatgtcaggggcagagaatatggagaaggggtgtggagtgcgttctcgtgggtgcaggtgggcgcagtgtgggaaggagtctcagagaacgaagggcggggtcggggagaaagccagagtatgcctcagcatggaagaaggggagtgggaggtccctctgaggcccctgcgagtagtgtgggagggagggggaggatggggtcccggcctgagggggctgcctgtgaggagcgtgtctcaggactctggggaccgatctacgagaaaccagggggttcgaaggcccgggggcgcgcccgagggcggggcacaccttgtctgagtccagctccgggtcctcctggcagcagaggcggcagagaaatgacttgggctcccggcctaaggtctgtctggtggtcacgaagtaggtgcctcccacgttcagcctgacccagcgggccgcgccgccgccccctgcccgctcgggtggtccgggacccggctccagcggctgcgcgacggcggcagccgggcggccgtgcccgcggggcgtggggccagccgggcgtgggctggggggcccgcggactgggccacccccgtcgcccaccccactcccgccgccccctcccagccccgccatcgccgggtccagctgcagttccgccatcttggaccgccgccgccaccgctgctgcccgcgcgcagccgggccggcccatttctcggcagggagagccgggccggcccatcggcgggggtggggcagaggggagagggacgggagcgcccccaaccagcgcccggggacccgcgcgggggaggcgctgtgcccgcccccgggaagatacttccggaaccagccctcatctctattggctgatctgcgaagcaaggcccacccccttggctttggggttggctgaggaaagatcttcccgtgacccacttccgttacttgctgcggaggaccgtgggcagccagggtcggtgaaggtgagtggggcttggggcattggatccgatccctggagggctcctctgctctgccctctccaaacctcacgccgacccttgtcacgcccccgtcaaggacgctgggccctcggcttgccccgctggcagagtgtccctt

SEQ ID NO: 18962 - DNA, 2300 bp, Homo sapien
taggggtcatgcagcccctggctgcaggagtctgaatcttcccagattgctcctggggataacatcattattgcaaaatctaagatcagtgcttgagatattttgtagactctgaactccatggatcagctgacaccacccagactggtaatctgactcagccacttctgccatccaacccaggaacagaggacagcaagaaaacctcacttcaaccccttatgagtccatctccaacctgaccaatcagcactccccacttccccagcacctacccaccaaattatctttaaaaactctgatccccaaatactcagggagactgatttgagtagtaataaaactcccgtcttccacgcagccagctctgcatgaattagtctttctctattgcaatcccccgttttgataaatcgggtttgtctaggcagcgggcaaggtgaacccactgggtggttacagtggctgaggtcagtgagtgaggaagaatgatttgaggccagaaaggtgggtaagcgccaggcttggaagggccctgtagccaccccaggggctcaccttcatctccaaggcctgcagggtttcagttttttgtttttttgttgttttttttttgagaccaagtttcactctcatcacccaggctggagtgcaatggcacgatctcagctcactgcaacctccacctcctgggttcaagtgattctcttgcctcagtctcccaagtagctgggattacaggcatgcgccaccacacccggctaatttttgtatttttggtagagaccgagtttcaccatgttagccaggctggtctcgaacttctgacctcagacgcccctcccgcctcagcctcccaaagtgctgagattacaggcatgagccaccgcgcctggccaaggcctgcagggttttaagcagggttggcagtagggcaagatcaggcttaatggatccgaaagatcagtcacctacagtgttgaaaaggaatctgaggtctgagctggacaacgggtggcggtggatggtgtggggatggagatgagggtaaatggtcaggtttgagaaacagtaagggggtaaagtgagtgggacgtcgttgtggattggttgtgaaagaggcaaaggtcaaagagactcatgggatttggcccaggcacctaagtagatgtggtgctgtaatttgctcaagcatggagcacataaggtatcccaggtttagcagggggcggcagaggacagtgtcaatggcaagttccggtcagtgttgagttttaaaggcctttgaggcacacaaggataggttccaggttgaatatctggactggacataaaaggcaccggatcctgagtatacagggtgtggttggagtcaccatgtggagtgagaagagggagggtgaaggtctgaggctgtgaaactccatcgtccacagatcaaaaataaacaaggccgggtgcggtgctcatgcctgtaatcccagcactttgagaagccgaggcgggtggatcacctgaggtcaggagttcaagaccagcctggccaacatggtgaaaccccatctctactaaaaatacaaaaattacccgggtgccgtggcgtgcacttgcaatcctagctactcaggaggctgaggcaggagaattgcttgaacccagaaggcggaggctgcagtgagctgaggtcgcgccgctgcactccagcgtgggcaacagagcgagactcccggccaactgagtacatttcaactaatgcacatcaaggactacccaggtaggggaagagggaaaaacctgaaaagggcctgtagttctgagggccacatgcagaagtggtgggtgtcctctcacctgctcccagggctgaggggtctgcctgctcccctacaagggactgcctggactcccaccggcaggcgcagccctcaaagctcgaggctttcattggaagggctcctgggcagggaaaacgcagaaagaagggatcctcaacctcgggctctgcgccttccccaccccacttcctgggaggtgtggtctctttatggcatgttatctccgccccaagcccggggccctagaccctgagccgggaaaaccagaagctagaaagagggcatccgggttgtgcaaatttcagacacacggatatcccgtggcgcctgcgtccggagcccggccctgctgctggactgtccccggccacgcccgccgcccctcccgcatcctggccccttccccacccgacggaatcccggggaggctggaaggtgggtccccgcccacaccgccctgggccc

SEQ ID NO: 18963 - DNA, 2300 bp, Homo sapien
ccaacctgaccaatcagcactccccacttccccagcacctacccaccaaattatctttaaaaactctgatccccaaatactcagggagactgatttgagtagtaataaaactcccgtcttccacgcagccagctctgcatgaattagtctttctctattgcaatcccccgttttgataaatcgggtttgtctaggcagcgggcaaggtgaacccactgggtggttacagtggctgaggtcagtgagtgaggaagaatgatttgaggccagaaaggtgggtaagcgccaggcttggaagggccctgtagccaccccaggggctcaccttcatctccaaggcctgcagggtttcagttttttgtttttttgttgttttttttttgagaccaagtttcactctcatcacccaggctggagtgcaatggcacgatctcagctcactgcaacctccacctcctgggttcaagtgattctcttgcctcagtctcccaagtagctgggattacaggcatgcgccaccacacccggctaatttttgtatttttggtagagaccgagtttcaccatgttagccaggctggtctcgaacttctgacctcagacgcccctcccgcctcagcctcccaaagtgctgagattacaggcatgagccaccgcgcctggccaaggcctgcagggttttaagcagggttggcagtagggcaagatcaggcttaatggatccgaaagatcagtcacctacagtgttgaaaaggaatctgaggtctgagctggacaacgggtggcggtggatggtgtggggatggagatgagggtaaatggtcaggtttgagaaacagtaagggggtaaagtgagtgggacgtcgttgtggattggttgtgaaagaggcaaaggtcaaagagactcatgggatttggcccaggcacctaagtagatgtggtgctgtaatttgctcaagcatggagcacataaggtatcccaggtttagcagggggcggcagaggacagtgtcaatggcaagttccggtcagtgttgagttttaaaggcctttgaggcacacaaggataggttccaggttgaatatctggactggacataaaaggcaccggatcctgagtatacagggtgtggttggagtcaccatgtggagtgagaagagggagggtgaaggtctgaggctgtgaaactccatcgtccacagatcaaaaataaacaaggccgggtgcggtgctcatgcctgtaatcccagcactttgagaagccgaggcgggtggatcacctgaggtcaggagttcaagaccagcctggccaacatggtgaaaccccatctctactaaaaatacaaaaattacccgggtgccgtggcgtgcacttgcaatcctagctactcaggaggctgaggcaggagaattgcttgaacccagaaggcggaggctgcagtgagctgaggtcgcgccgctgcactccagcgtgggcaacagagcgagactcccggccaactgagtacatttcaactaatgcacatcaaggactacccaggtaggggaagagggaaaaacctgaaaagggcctgtagttctgagggccacatgcagaagtggtgggtgtcctctcacctgctcccagggctgaggggtctgcctgctcccctacaagggactgcctggactcccaccggcaggcgcagccctcaaagctcgaggctttcattggaagggctcctgggcagggaaaacgcagaaagaagggatcctcaacctcgggctctgcgccttccccaccccacttcctgggaggtgtggtctctttatggcatgttatctccgccccaagcccggggccctagaccctgagccgggaaaaccagaagctagaaagagggcatccgggttgtgcaaatttcagacacacggatatcccgtggcgcctgcgtccggagcccggccctgctgctggactgtccccggccacgcccgccgcccctcccgcatcctggccccttccccacccgacggaatcccggggaggctggaaggtgggtccccgcccacaccgccctgggcccgccctgcctggccgcggcgcttggcccagtcccgcggtcctcgtcgcgaccggcccgggccgcaggacgccgcgctcgggggagctgagccacctctccgccaggcccgtgcgagcgggtgagcgggccccccgggccccactgcctcggacgcgtcccctcctcgcccagtcccctctagcgctgtcgcagacctcctgccagggccccaggtctcctcccgcctgggcggg

SEQ ID NO: 18964 - DNA, 2300 bp, Homo sapien
cccaggtttagcagggggcggcagaggacagtgtcaatggcaagttccggtcagtgttgagttttaaaggcctttgaggcacacaaggataggttccaggttgaatatctggactggacataaaaggcaccggatcctgagtatacagggtgtggttggagtcaccatgtggagtgagaagagggagggtgaaggtctgaggctgtgaaactccatcgtccacagatcaaaaataaacaaggccgggtgcggtgctcatgcctgtaatcccagcactttgagaagccgaggcgggtggatcacctgaggtcaggagttcaagaccagcctggccaacatggtgaaaccccatctctactaaaaatacaaaaattacccgggtgccgtggcgtgcacttgcaatcctagctactcaggaggctgaggcaggagaattgcttgaacccagaaggcggaggctgcagtgagctgaggtcgcgccgctgcactccagcgtgggcaacagagcgagactcccggccaactgagtacatttcaactaatgcacatcaaggactacccaggtaggggaagagggaaaaacctgaaaagggcctgtagttctgagggccacatgcagaagtggtgggtgtcctctcacctgctcccagggctgaggggtctgcctgctcccctacaagggactgcctggactcccaccggcaggcgcagccctcaaagctcgaggctttcattggaagggctcctgggcagggaaaacgcagaaagaagggatcctcaacctcgggctctgcgccttccccaccccacttcctgggaggtgtggtctctttatggcatgttatctccgccccaagcccggggccctagaccctgagccgggaaaaccagaagctagaaagagggcatccgggttgtgcaaatttcagacacacggatatcccgtggcgcctgcgtccggagcccggccctgctgctggactgtccccggccacgcccgccgcccctcccgcatcctggccccttccccacccgacggaatcccggggaggctggaaggtgggtccccgcccacaccgccctgggcccgccctgcctggccgcggcgcttggcccagtcccgcggtcctcgtcgcgaccggcccgggccgcaggacgccgcgctcgggggagctgagccacctctccgccaggcccgtgcgagcgggtgagcgggccccccgggccccactgcctcggacgcgtcccctcctcgcccagtcccctctagcgctgtcgcagacctcctgccagggccccaggtctcctcccgcctgggcgggctcagtggcggtgaggatctagaaaagtcttcctgtcctggttctgggctgccccggggcctggggtgatgacccgcaagcccaagggcgctcggactcctggcccgaaattccagggcggacacagcccgggatcccagcagccccaactcggaggagctctgccccggggagggagggacagcggagtggaaaccagattccggggcagcactgcggggatgggcagggcgagagtacggcatgaggtcccagttgcctgtcccaaacccttgctggttttgcagtgaatatggggggataaggggaagggagagagtgatttgccccagccaccccacctctggggctgcctccctcctccctaggccaaccacagggttgagggttcctcagccccaagctcaagcctgcccttgctgctctctgctggacgggagcccttctgctgcctgcctgggtccagggctccagcccaggagcctacttgatatgggaaggagggaggggtccccagggcctgcctcatttccagcccggggctctcccaccatgggagaagagctgggaagaagaagaggaggccccctcgactctggacaccaggcccctaacacgagacccctggatgagagcatccgctctcccgtgaccaggcgttcgagctccaggggcagggaaaggattcccagggcctagtgaggcccctgttatcagatgaggcgccctgaaaacataggctgggcttgtgtgagatgggagaaagaccagaagtatcgtctaaacttctccctgcccacacatccagcttcatggcactgtgctacaaagctggtctcattgggcctaggggtctttgagagctgagcttggcagcccctggggcccaacctcacccctagtcccagcaagtgagagcgaagcatcttgccctgtctacctccttgcccaaagcacacaccaggcagtgaccatgac

SEQ ID NO: 18965 - DNA, 2300 bp, Homo sapien
agtgagctgagatcgcaccactgcactccaacccgggtgacagagcgagacactgtctcagaaaaaaaatacaaaaattagctgggtgcagtggtgcgtgcctgtaatcccagctactcgggaggctgaggcaggagaatcacttgaatctgaggcggaggttgtagtgagccgagatcgcaccactgtactccagcctggcgacagagcgagactccatctcaaaaagaaaaaaagggagaagaccaatgagggaagatggggtggcccatctgattcagcaatccccatctagctgattgcctgcgaacctctagagaaggtctggggcagttcctgggcagggagggatggagcttacttccatcctccctgtttctgggctcctatttgctgctctgtccagcaagaggcagagaaaccccttgggcacctaggggtaagatgcacttcccaggctgcagaggctcccaagagaagccaaagggctttggtgagggtcctggggcctaggtacccagactaagttagaaactcctgcctcagagggtgtacatagggcaggggctgaccacaaggacctgaaacctcagaggtgaggcctgcttccaatggggctgcagctggctggagtgtgacggccactctgccttcatccgggcccagggcttaagataatggtccttgcctttgtcagcctaaataacagagaggctctctcaaagaaaatgatatctatttgggcatagggcattgcaatggtagtatccatgccatagtaaactatatgggtattcagggaggtaaaggaagacaggctttaagggaaaaaataggattacataattgttttgaaatatttatccttaggtagaaggattaataacaagggtgaccgctcaaggttggacaagcggttgctgggcagatggccattcaaaagtatgttttgtgcaaggttgtgacgccctttgtgcaaggttgtggtttttgcagagtctttgtgatagttttcattatcaggtatttatgcacgagaaccctcttgtcatgggtttcttgggctgtgtccgggtttttttgttctgttttttaacacaagtgactccatttagattaacaacttttgcactctcaggacactcacagcctaagccacctctacccctacgttgtcaaatgcgatgggagtgtggctagaccacctccttccctggtgctttgtttcctgtaaccacgagcaatctatcacacacccgcttcctgataatctccgagaaggaatcggccgaagggcttcagcatccagaaagccccgaaagcgccacaatcaaggctcctcctcgggctcccccgtgctgccccgggcgcgcgccatccacccggctgacaaaaagcaccaggacatgacccagtaccctttgatttctgtccagaggtggcggacccacctcggggctgggatggagggcgggtcggggtcgctaggctttttgcaaaaggggcaaaggactgatggggggcgtaaggagctgacgcccgcgctccaaaggggcgtcctggtcaaggaggatgggccgcgcccccgccagccgtggggaccctggaggtgcttctgcctcgacgtcctccaacatgggtgctgccagactctgctgcgctcctgagttgctcctggcggaattccagccacccgacatgggtgtctcattttcggcttctgggccatgtcgggacggcggaggaccccgggggaccggcgggagagtgggaaaggtggggcgggaaagccgagcgaggccctcactcgcccatctgttggcgggggcggcaagtgggtttctttcttgcgttcagattttgcagtaatttgcatctggacatgggatacgggaggccaggctgctcctcgcagtacacccacccacgcctgcacctgcctcagcgaagccgctcgccgctggttccagcacaggctaaagagcttcggcatccagaaaaccagaagcgcgccgcgcacgcgcgccaaggagttcggcgacggccccgccccttcgggggtagggacagcgcggcttccgccgggagcccggaaccgagcccaggagccggggacggtgcgccagtgccccctccgcgagccccaaccagtagacggttccctgtctcccgcgccccaatttcgattttcaaacgcaactcctacaggattctgagaccccgtcccatctcccatatcccatttccagctgcaaattactgcagaatctgaacccaggaaagaaacccatttgccgacc

SEQ ID NO: 18966 - DNA, 2300 bp, Homo sapien
ggattacaggcgtgagccactgcacccggccctgtcaggtttttttgtgtgtgtgatgcttctattacatgttttgtttgtttgtttgtttgagacggagtctcgctgtggcccaggctggagtgcagtggcgtggtcttggctcactgtaatctctgcctcccgggttcatgccattctcctacctcagcctcctgagtagctgggactacagtcacccgccaccatgcccagctaattttttttttttttttgtatttttagtagagacagggtttcaccgtgttagccaggatggtcctgatctcctgacctcatgatccgcccgcctcagcctcccaaagtgctgggattacaggcgtgagctaccgtgcccagcctctgttacatatatttggaagcagtgggttcatcagatggggaacaatggcgagatgggccacttaaatctgtgtttataattttggctctcccctcccccaacagggactccctctgtcacccaggctggagtgcagtggcaggatgaaggctgtgtagcctcaatttcctgggctcaagggttcctcccacctaaggctcatgagtagctaggaccacaggcatgcgccaccatacccagcttattgatttgtttattgtagagacagggtctccctgtgttgctcaggctggtcttgaactcctgggctcaagctgtctcccacctgggcctcccaaagtgctgggattaccagcctgagccacggcgcctggctttatagtttgtaggcaaatagatttgagtggagtcaggaagtttcatgacatccacaaaaagaagagtcaacaaaatgtatcacagttcagcatgttctttttttttttttttttttttgagaaggagttttgttcttgctgcccaggctggagggcaatggcatgatctcggctcaccgcaacctctgcctcctggattcaagagattctcctgcctcagcctcccgggtagctgggattacaagcatgtgccaccacgctaattttgtatttttagtagcgacaggatttctccatgttggtcaggctggtcttgaactcccgacctcagatgatccgcccgccacggcctcccaaagtgctgggattataggcgtgagccaccgcacctggccctgttcagcattttctagacgggagtaggtaagcgatgtcagttccacataaagtcctgaggacagtcctgattacctgtgcttgatcaaaatcatctttccgggggaaaccacacttgaagctcccatgtttcaagccaactctagtgtgaattagtctcttaacgagctagacttacacaaaccagttaacagattcatttcactttgtagtcctcgagggattgttcctgctccactgcacagacgaaagcaatccactgagaccacggtactgcggtaataagactttggccaggtgcggtggctcaagcctataatcccaacactttgggaggccaaggcaggcagatcacttgaggtcaggagtttgaaaccagcctgaccaacatggcgaaaccccgtctctactaaaactacaaaaattagccaggcgtggtggcgggtgcctgtaatcccagctactcgggaggctgaagcaagagaatcggttgaacccgggaagcggaggctgcagtgagccgagatcgcgccgccactgcgccgcagcctgggcgacagagccagactccgtctcaaaataaaaaaaaaaaaaaagaaaaaaagaaaaaaaatgtggagctagccccacgggtttaggacccttgactcctcgttagatgcttcccagtatttcagagcatccctttgttgggcccccggaaggtcggtcccctactagtaacgtggggtgaacgggggtacgtctgccgtaaagtgggaggcggctgatggggacaaaggctgggtcccgaagaagcgcagggtcagaaaagtgccccccaaagccgtccctgcacccgaaccctaggatggcctcgcgcaaccgcagggccgtcggcactggtttacgacctgggcggggcggcccggacactctatgcaaatcagcccggcggactccggaagcagcgctccctccgcttccggccgagcccgcgccccccagaccccgagagctcgcagctccggcccggcggcgatggcgcggagcgtgcgcgtgctggtggacatggacggcgtcctggccgacttcgaggccggcctcctgcggggcttccgccgccgcttccctgaggagccgcacgtgccgctggagcaacgccg

SEQ ID NO: 18967 - DNA, 2300 bp, Homo sapien
gtctcaaaaaaacgaaaacaacaacaacaaaaaaagaaagaatgggaagattggctgggcgtgcggtggttcacacctgtaatcccagcactttgggaagccaaggtgggtggatcacgaggtcaggagattgagaccatgctggctaacatggtgaaactccatctctactaataaactacaaaaaattagccgggcatgatggcacgcacctgtagtcctagctactcgggaggctgaggcaggagaatcgcttgaacccgggaggtggaggctgcaagtgagcagagatcgcgccaccactgcactccagcctgggcgacagagcaagactctgtctcaaaaaaaaaaaaaaaaagctaagattttggctagatgcggtggcttacacctgtaatcccagcactttgggaggccaaggagcatggatcacctgaggtcaggagtttgagaccagcctggccaatatggtgaaacgccgtctctactaaaaatacaaaaattagtcaggggtggtggcgcacgcctgtagttccagctattacggaggctgaggcaggagaatcgcttgaacctgggaggtggaggttgcattgagcgccattgcactctagcctgggtgacaagagcgaaactccacttcaaaaacaaaaaaaaaaaagaaaggaaaaaaagaagggaagattctaacacaaacaagtggtgcgcttcgtgctgttgtggtaagcacataaatgcatcatccgtgctttctagaacagaacttctcactggcttttcatgaaagcccggggggggagggtggttaacctagactgcccagaatacaaacttccaactacctgaaaggtggctttgcaaagaggaatgtggttcaattattatggaaatattgagacaagcaaagacatctgccttgaggaaatatgcaagacatgagaagggcctgccctcttttgcccaaggctttcctattatgatcttgtaaaccatcattcctgaatcctccaagtgtgtctgcatttgtcgcatggatagatttacccagacaggtggaagagtcatgacttaagggttataaacagctgcagaggcctgagctgcttccatagtcttggtagcagggaatgagtccattcctggtgccaggcattaaccagccttagaataggcccccaaataggagcgactgtaattttggtccagtacatgcaccacccattacaactaaacagtaacattaaaatgtaaggaatttccagtccttttaaaagggatcatcttggtgcgctctctgttgctgactcattgtgcggctgctttgagactattaggtttctaaatgggacacacagtaggtattcaacagataaatgtcaacttgttgcagtacttttcatcctttaaggaggatgcccttactatcccaccatcagtaaagcaaatgagagaacagtaacagtgacaaatctcccttctgcttgccgaggttgtaactccccaagaaagagcttccccctctgtcaggtaacgttttacagtgacagccagcacgacttccacccagcgcgaggtagattcgccttccgtccaatcatcgccgagattttggggtgggggaggggagagagtcccaaggccttcccagtccaggaagggggcgggcttaggctgagccgtggccgccacagcccatcgtaatgccgcatggtgcttggcactccagagagccaataggaatgaaagaattcatttgaatcggccaatgccggcgggttagggggcgggggttgaaaaccctataaaggcgtcgatcggccggacaggcggcagcggcggctcctgcagcggtggtcggctgttgggtgtggagtttcccagcgcccctcgggtccgaccctttgagcgttctgctccggcgccagcctacctcgctcctcggcgccatgaccacaaccaccaccttcaagggagtcgaccccaacagcaggaatagctcccggtgaggcgaccgggtcgcgcccgagccgcgcggggctgaggggctgggagggccgctgccggcggggcctcgcgccggtcgttgcgggtaacgagccccgtgcgctgtgctcgcgccggggcgggtggcggggttctgccgtcggcgccgcctttgtgccgcctggcgagccctgcgcgccggccccacccgggtccctgctgctctccattcattccttccacggagtcaggggctgaggaggccggggctggtcgcccctcggagcacggccggttttcgttaatcggaaccttcg

SEQ ID NO: 18968 - DNA, 2300 bp, Homo sapien
cctgtagtcccagctactcaggaggctgaggcatgggaatggcatgaacgtgggaggtggagcttgcagtgagccgagattgtgccactgcactccagcctgggcgacagagcgagactctatctcaaaaaaaaaaaaaaaaaaaaaaaaaaagaatgggaagattggccaggtgcggtggctcatgctgtaatcccagcactttggtaggccgaggtgggcggatcacgaggtcaggagatctagaccatcctggctaacacggtgaaaccccatctctactaaaaatacaaaaattagccaggcatggtggtgggcgcctgtagtcccagctacttgggaggctgaggcaggagaatggcgtgaacccgggaggcggagcttgcagtgaaccgagattatgccaccgcactccagcctgggcgacagagcgagactctgtctcaaaaaaacgaaaacaacaacaacaaaaaaagaaagaatgggaagattggctgggcgtgcggtggttcacacctgtaatcccagcactttgggaagccaaggtgggtggatcacgaggtcaggagattgagaccatgctggctaacatggtgaaactccatctctactaataaactacaaaaaattagccgggcatgatggcacgcacctgtagtcctagctactcgggaggctgaggcaggagaatcgcttgaacccgggaggtggaggctgcaagtgagcagagatcgcgccaccactgcactccagcctgggcgacagagcaagactctgtctcaaaaaaaaaaaaaaaaagctaagattttggctagatgcggtggcttacacctgtaatcccagcactttgggaggccaaggagcatggatcacctgaggtcaggagtttgagaccagcctggccaatatggtgaaacgccgtctctactaaaaatacaaaaattagtcaggggtggtggcgcacgcctgtagttccagctattacggaggctgaggcaggagaatcgcttgaacctgggaggtggaggttgcattgagcgccattgcactctagcctgggtgacaagagcgaaactccacttcaaaaacaaaaaaaaaaaagaaaggaaaaaaagaagggaagattctaacacaaacaagtggtgcgcttcgtgctgttgtggtaagcacataaatgcatcatccgtgctttctagaacagaacttctcactggcttttcatgaaagcccggggggggagggtggttaacctagactgcccagaatacaaacttccaactacctgaaaggtggctttgcaaagaggaatgtggttcaattattatggaaatattgagacaagcaaagacatctgccttgaggaaatatgcaagacatgagaagggcctgccctcttttgcccaaggctttcctattatgatcttgtaaaccatcattcctgaatcctccaagtgtgtctgcatttgtcgcatggatagatttacccagacaggtggaagagtcatgacttaagggttataaacagctgcagaggcctgagctgcttccatagtcttggtagcagggaatgagtccattcctggtgccaggcattaaccagccttagaataggcccccaaataggagcgactgtaattttggtccagtacatgcaccacccattacaactaaacagtaacattaaaatgtaaggaatttccagtccttttaaaagggatcatcttggtgcgctctctgttgctgactcattgtgcggctgctttgagactattaggtttctaaatgggacacacagtaggtattcaacagataaatgtcaacttgttgcagtacttttcatcctttaaggaggatgcccttactatcccaccatcagtaaagcaaatgagagaacagtaacagtgacaaatctcccttctgcttgccgaggttgtaactccccaagaaagagcttccccctctgtcaggtaacgttttacagtgacagccagcacgacttccacccagcgcgaggtagattcgccttccgtccaatcatcgccgagattttggggtgggggaggggagagagtcccaaggccttcccagtccaggaagggggcgggcttaggctgagccgtggccgccacagcccatcgtaatgccgcatggtgcttggcactccagagagccaataggaatgaaagaattcatttgaatcggccaatgccggcgggttagggggcgggggttgaaaaccctataaaggcgtcgatcggccggacaggcggcagcggcggctcctgcagcggtggtcggct

SEQ ID NO: 18969 - DNA, 2300 bp, Homo sapien
tacaggcatgcgccaccacacccagctaattttgtattttcagtagagacagggtttctccatgttggtcaggctgatctcgaactcctgacctcaggtgatcctcccacctcggcctcccaaagtgctgggattacaggcatgagccaccatgcccggcctcttttgagagtgttgatctgaactagatggtcttcctgctttggcctatcacacatctaaggtcttaagcctcttcctccccaaagagaacctacagaaggccagcaaatgcagctccatccagaggccaaagaaattagatttggtaagaaggtggaatagacaagatttggccaagattgattggatgaggagtgtgtgaaggagaagaagtcaggaatgttgctggcctttccagcttggggcagctgttgtagtggtgtgtcactcagtttaagagtgacaggtcaggaagaaggacccatgtggaaggtaaagtgaggagttttagttgagagttgctgggtctgaggtgcctctgggatatccaagtggagatgttcagaaatcaactggaaactcagaagaaagacgtggactagaaataatggatttgaggatcattagcaaagagatggtaatgaaaatcggtgaaatcatcctcggagagggaatggagtgataaaaggatcttgaagaaaaccctaaggaacagttaagggaaggagtgagtaagaaaaaaaattgcagagagaacaaaggacaggctagagatgagaggaaaacctacctcctgcaaagttcaagaggagtgacaaactgagaagcatactggattcagcaaagaagtctgcggtgaccttgtggagagcagttttagtggaactttggggacagcaccagattgcagtgggttgaggagtgagtgggaggggaggggttggagacagctggcggggacattttttcgagctgtttggccaagaatggagagagataggatggtaacttcatagaattgggagcttttttttttttttctatactaacggaggagaggaagaaaattcagggacaaaaggaaataataaagccccgggggaagaagcgagatggaatccagtgcacacacatcggattgttcttcagacaggagggacgcatgtgtatgttttaactggatgcaacgaggaaaggattaaattggctggaagcttgattgttgggtagttctcgcttatggatactgtttcctcttggaagacaggcgatgagtaaggatctcgttgaatgaatacatgaatattttcccgtagctagtcaaagtctagggttaccagcaggacagaagaagacactgtaggccgggcgcggtggctcacgcctgtaatcccagcactttgggaggccgaggcgggcggatcacgaggtcaggagatcgagaccatcctggctaacacggtgaaaccccgtctctacgaaaaattagccgggcgttgtggcgggtacctgtagtctcagctactcgggaggctgaggcaggagaatcacttgaacccgggaggcagaggttgctgtgagccgagatcgtgccactgcactccagcctgggcgactgagcgagactccgtctcaaaaaaaagaagaagaagaagaagaagaagacactgcattttaggcaagagtccggtgggaagcaggttgagattgactgagaggaagtaaccatgggagggctgctggtccactgaatgagagagatttttccagaacctcatgctggggctttgatttaggaatccccttcctcctctagtaagtctgccttccctggcctatggcttacgtctaaagcctcgagcctcatcgttcccaccgaggaccagctggaagccattttgattatgctccaccacgaaggaggacaatacagccccgcccagagccaggcgcgcccccgcggcgggccgggtgcgcgtgtccgcgcctcttcccgccggccgggcgggcgcctggcccaggacgcggtggcgtgggacggggggtgggggtggttatgtaagcgttgcgcgctcccgcgaggcgccagccaatgggaggcttcggctactcgtgctcgcgcacgcagggtggggggagggagcgcacgacgtgcgcgcaccctctcccctcgtccaccgctgccgcctccttcttctgccgctcctggtgctgcttgtgtgctcgtttggtgcggacctggtacctcttttgtgaagcggcagctgaggagactccggcgctcgccatggccgacgaaaagcccaaggtgagctcgc

SEQ ID NO: 18970 - DNA, 2300 bp, Homo sapien
aaaaaagagagagagagcttgttagatcttagtgctatatttccttgattatttttattttaaggctgacaaaatgccatttaagataataaaagtagttaaattgcctgaccaagagctagataacattgaggaaaaagtattggcaatattctttggtctaatactgctatataccaaccattttacccaatcattcaaataggcttagtaatacaagggcgaaaaaggaaaactacagctaatagtgctatccttgttcttttttttttttgagacggagtctcgctctgtcgcccaggctggagtgcagcggtgcaatctcggttcactgcaagctccgcctccccggttcacgccattctcctgtctcagcctcccgaggagctgggactacaggcacccgccaccacgcccggctgatttttttttttttttttttttttttttgtatttttagtagagatggggtttcaccgtgttagccaggatggtctctctctcctgacctggtgatccacccgcctcggcctcccaaagcgctgagattacaggcgtgagccaccgcgcccggcctatccttgttctatatactgattacgcatactatatatggaccttttccttcctcaacctttctatagatttctaagaataaggttttgatgaagtagtttatgtatccttctttttcagttaatcctaatggaaaacggttggaaaaatgaaacaattatcttacaacttatttttctctttcctctcctcccctctctctaaaagagtgtggctccttcccctctcttttccccttcctctctctagagtggttaactctcaaactgtatttaactctggaaaagttttcaattacacaggcgataactccaacttgaggtataacggaaacttattaagagaaaaagagcaaaataatttttttttgagactcagcaaaataatttttttttttttgagacggagtctccgtctgtcgcccaggatggagtgcagtggcgcgatcttggctcactgcaacctccgcctcccgggttggaacaattctcctgcctcagccttacgagtagctgggattacaggtgtccgccaccactcccggctaatttttgtattttcagtagagacggggtttcgccatgttgtccaggctggtcttgaactcctgacctcaggtgatccaaccacctcggcgtcccggagtgctgggattacaggcgcgcgctaccaagcacagctaatttttttttttttttttgagacggagtctcgctctgtctcccaggctggagtgcagtggtgcgatcttggctcaatgcaacctccacctcccgggttggaacaattctcttgcctcagccttccgagtagctggaattacaggtgtccgccaccacgcccgtctaattttttatatttttagtagagacgaggtttcatcatattggccagactggtcttgaactcctgaactccagtgatccacccaccttgggctgccaaagtgttgggattagaggcttgagccacagcgccgggccttcaggggtatcgattttgttcccgtgcctcttgtgtgtgttctagtgtggaagtggaggcgattgctttccagcacaagcccgtttgactgtcggggtttggacaagtggctgcgacgacactaaggtggagaccgggatgtagcgaggactcccagagttgggagacgttgtacgcttactgggacctaaatcccgcacgagttcccacccaagtgccgccgccccagcctacgcacgcgcattcgcaccgtctccagccccggggtcctcctgcccctcccgccgtctccgggggccttttctccgctcggcaccagggtgtccccggcgccgcctgatcctgttagcgcggtactctgagtgcagtcagtcctcggcgctgttttccctgatttgctgtcgacgccaggaaggaaggacgcgtgcagaggaccgcagaggggtggccgtggctgagaggagacagcgccgcagcactgagggtttgggcttgcaggcgctgcaggagacgcccaggcggagtcttgtctcgcagccagctctgagcgggaggcctgagcgggaagcattggcgtccgagcgacttctaggagcctggggttcggcgctatggaggagctcgatggcgagccaacagtcactgtaagggtaccccgaacaggcttgctcgtccttgcgggttgagaactgcgtctgcttagttacttcaggcttgtctgcttccctagtggtcgcgag

SEQ ID NO: 18971 - DNA, 2300 bp, Homo sapien
acctgtttctgggaggtgagagcagcccagaacccctggacaacatcttgttggcagcctttgagtttgacatccatcaagtaatcaaagagtgcaggtaggatctctcccaccccccactgtaaccatttttaggtgtacaaatatcaccaccttgcgtttctagagtggcctgttccttccttacccttcttccctcagacctgctatcttagtccatctcacgctgatattacagaatacctgagaccagataatttataaagaaaaagattattttctcaccgttctggaggctaggaagtccaggatcagggcactggcaatgttgctggtgagggctgctctctgcttccaacatggcaccttgaacactgtgttctcatgtggtggaagggcaagaaggacaaactcccttcatcaagtcgctttataagggcacccaatcacattcatgagggaggatgtggcctaatcacctcctggcctaatcacctcttagaggccctacctcttaatactatcacattggcaaaactggggttttagaggggatcccttcaaaccatagcatctgctcccctgcttgacttgccacaggtagataatggcttttctctgggtgagcttagggacttcctggaggcttgagggctaccatatacataactgtttccatttcagggatgttcatttaaaataacatcgcgggaaactactttgacatttaaaatctagaaaaagccagcaagcctgtttcttggcacctaatggacaccttatgggatggcgtgttccaagagtctcactccagtgacgtgagctaccgaaccactgggcttcaggctgggtattattcagaatttccagccctctatccaaaagagggtgttctatgattgcactgaatctttagcaaggcaggaaagggagtgccaaacataatcaatcaaaggtaaacctttccagaactctccatatatggtaagtcagaaagaaggtccccttccttgttgtgcaccctggatggtgggcattgcactgaagacgtgctgggaagggaggaagtgggtaatggcagaagatggccttgatcaggtgtcagattcactgacctcaactggctgtttgtagatctgggcatgggaagagtttccttcgccctacctgcttttcttgttttggccaaaagaatgccagggcttcaagaaaatgatactagatttggggaatgaaaaacaagttttttgtgtgtttgtttctgggttttttttttttttttttttttttttgagacagagttttgctcttgtcacccagactggagtgcagtggcgtgatcttggctcactgcaacctccacctactgggttccagcaattctactgcctcagtctcccaagtagctgggattacaggtgtccgtcaccacgcccagcaaatttttgtgtttttcaatagagacagggtttcaccatgttgcctaggcaggctggtctggaactcctgacctcaggtcatctgcccatctcggcctcccaaagtgctgggattacaggcgtgagccaccgcgccctgccaagttttttttttttgaaacagggtctcactttgtcacccgggctggagtgcagtggagtgatctcagctcactgcagccttgacctcctgggttcaagtgatcctcttgcctcagccttccaggtagctaggactacaagtgtgcgccaccatgcctggctaattattatttttttttttggagagatgaggtttcactatgttgcccaagctgttcttgaacttgtgagctcaagcgatctgcctgtcttggcctcccacagtgctaggattacaggcgtaagccaccatgcccggcctgaaagtcaagttttgtgtcaatattttcacaggcctgtaaacattgtgagaagtccctgcatggaagaattagtgagaataacttaaaaacacacaaacacaccatcgtttggctttgttggtgtctctgcccatagttgagtattctaaatttcctgtgttataacagtgagtgagtttcaccagggcttcctaatttataagccctgtatctggatttttaggaataaaacagatttgagcagaagaagtctgttggatgcagggagtataaaaggggaaagcatcctgctgtttccagtggcagaagagaaagagaagtaccatgaagaggggtgaacaacatcactctcgtgccggacacagacaaggaatgattaggcttgcagtcccccagtctcagcctctctccactctca

SEQ ID NO: 18972 - DNA, 2300 bp, Homo sapien
ggtaaggtgtgacctggtggaagtggaaagacagtcaagtgacgctctctttctcttgaacttcttcactggggcaggacgaggcacggatccagaaggtgaccaagcgtctgcacacgttagaggaagttaacaacaacgtgagactgctcagtgagatgctgcttcattacagccaggaggactcttcggacggggacagagagctgatgaaggtgggaccgccgacggcaaaggctgcctcccggggctgcgctgcccttcaggagctcagccagcatttgctgagcacgtgccttgtcagagacacgggctgtgcacttggcagtgtattcatgaccttactcatctgcacagcagccacgtcagtagagggtggcgtccccatttgcctcctgggatcagctgacttgtccagggtgtaagggccagatggaaacctgagtctgactccagagaccacactctcggtgctcacccctgctctctccctttccttactaccttggggacatcaagacagagaggcttccttgtaaccctgatgcccatgtggtgcaggccatggttgggtggatattttgagttctgaggaacatgccagcctggaaggcaggaggggactgacttcccctgacccatcctggtgactgctacctagacaaacatcctgggtgatgtggtgtggtggtggtggctggtggcaagaagacgtgcgctgtgatcccagctttgctggtaattgaccgtggcaattggcatatcccggtcattttctgggcatgaaccctgaatgaatcagatgatctctaagggcctttgtggtttgatttttatgtccgagtctctttcaggagctgtttgatcagtgtgagaacaagaggcggactttatttaaactcgccagtgagactgaggacaatgataacagtttgggtgagtgaaagagcgacggtcagggataagccaggcatttggatatgtgggtgggaactgtcacaacaggagtgagaagtctctctttcctgctccaggggacatcctgcaagccagtgacaacctctcccgggtcatcaactcttacaaaacaattattgaagggcaggtcatcaatggcgaggtggctaccttaaccctgcctgactcggaaggtgagatgctctggtccccaactctaggctcctccagaccagcctcaggcccctatcatgaagctgcgggtgtaggctggccagcgtggtggtgttgcacaaggcccaagggagttctttgccattccaagcaatcctccggcttcccggaggcctggagatgtgggtaggaatttccccacctgctttctcgggcttgctttgcagcatcccctggcagagatgccgttggattaggccagaggctgtagcagtgacctctgtgcctagggtgctgcctcctgccacacagccactagaagacccctaattattcctgttctgctctgttgacccatccaggaaacagtcagtgcagtaaccaaggcacgctcatcgaccttgcggagctggacacgaccaacagtttgtcctccgtgttggccccagcacctactccaccctcctcaggcatcccaatcctccctccaccaccccaggcctcaggacctccacggagccgctcctctagccaggccgaggccaccctggggcccagcagcacaagcaacgccctctcctggctggacgaggagctactctgcttgggtgcggcccacagggggcgtcaggggcatcccctgacagggctctgggaggaagggtgtgtggaattaggagccctgagcggggccccagtgtgactgttggggtgggcaaagaaccctgagttggaggtactcagtgaagttcagcgaccctgagggccccagggccatcctcccggtggactctgcctcctgccctgcaccccgccccacaggccccccgcttctgcatcatggactggagcgctccattcccctctggaggctgcctgcagaacagcttctcccggcgccttcacccattgatgtcacttgtcacctgacccctcctcaggcaaggcggggctagggctgcctagctcagagcctcttctcatcctgttttcttctctattgtcaggcctcgccgacccagcccctaatgttcctcccaaagagtcagctgggaacagccagtggcacctgctccaggtaggggcacaggatcggtgacagcactactgtgccaaggacctccactttccagcgtcatgtctcctgggctgcagttagctgtccttcc

SEQ ID NO: 18973 - DNA, 2300 bp, Homo sapien
aacagtggaatgatttgattcaacacaagtgcgcttctgggagcagaatggactgaggagaggtgaggacgggagagacctgggtctctgggccaagcagaggcttctgcaacaattcaggcaaacgtggggtgacaaggacgctgactgagacgatgctgaaccccaactgctggtttgttcaactggtacagttcacattaagtcgtaacaactgtgaagcttatgtctctacagataccatgtgactcccccccaccaagtgtgtccctctcatttcataatgtgactctaggctgggtgcggtagctcacgtgtgtaatcccagcgctttgtaagggaaaggtgggaggatcacttgaactcgagtttgagaccatcctgggcaacacagcaagacctcatctctactaaaaatcaaaagaattagccaagcatggtggcgtgtgcctatagtcccagctactcaggaggctgaggtagaagacttatttgagcacaggggttcaaggctgcagtgagctatgatcgcacccctgcactccagcctagacaacagcgcgcgagactctgtctcaaaaacaagtaacaaaaacaaaatgtaactctaaatgtagcctattaaactcagcttaggtcatttaaattattcaatacccatattaataccttcaaagcaaactaattccactctggttatagcaagttgggcatttctgggcaagtggtttgactggagtcaggatgtcctctttttgtgaaattatggcagtagtgcctgctttgctagaatacttggtaaactaatttaatgaatatctgtaaagtactttgagctccttggagaacacttccatatataaagaagccttatgacctgcctgcaactgcagattttgcaaacgtgatcttactttttctctcttttgggatatgctcccctttaaactgaagctcaacctcctgaagggggtttcttactaggaaaaatcagacaatttgaggaaatagctatcacctccaagatcccggaagcagtactaaataagagacctcagaacaaggcaatactaggtatctcacctatcccattaccagtccaatttctctctccacttaaaggaggcttccaggtctagcctacaggaaagttcacttattaaccctcaggcagagtactacctgctaaccaggttaacacacatttccttcgtagcactgtaattcacagtgcaatgacagcaatacgcttctataactacagcttcagactgtgctcctcagccttactcagaataggctatcaacactgactcgttaggatattcaagggggtatatgtatgtgtgtggggggggaattcccgacaccgatttcaccatgcttctgtggtcactgcaggaaaaaggtagagctctctgttctctatcatcgctctctttggaatattattctcacttcaagcattctgcctgagcgaagccgtcacttctccaacacatggtcacaattctgaagctgccaggcgactgaacgcagtcggcagcacccaccactaccggagactcagccccaatccgaagcttctcccttagtcagggattggggcgctgggttcctggtgtcaccgccgggcggcgaccccaccacaatctccccaaagcgccgaagcatgtcagcccgaagatcttggctgtcgcctttccccgagcctgcggtgcccgacaggagcccgagttcacgccgccgcgcgccagagcaagaggacgcgccgcagcgagggaagcgggggccggactggggcccggcgccctgatagggaaggggcgtgatcgcaggctgctcgcggcgagggcgagaccgggcgtgggctgccaagaggcgacgccgtggagcccggggaggggacgtgggggtgaagacaggggcagcccagcggctcgagggcaggcagaaacggccgcggctactcactgagccaggactccaggctttccccttccgcctccgccatattgcagccgcccggccccgcggcttcaaaactcgcgagagtctgcacgagctgagacggggcggggcctgcatggggtcctgagaggagtgagtgccgtcaccgagggccgcgccagactgcgacggatacagggagggcaagggtttccttttggcgctcccctttggaccccggagtgaaaaactctaacgtccagatcagtggagagaaacgcagatttaggaccctgaggagtctttttcacccgtttcccgtcactcgctcaggcgcgccgagggcagtc

SEQ ID NO: 18974 - DNA, 2300 bp, Homo sapien
ttttttttgtagagacgggatctccctatgttgccctgctgtctcttaactcctgagctcaagctatcctgcattaggctcccaaagtgctgagattacaggtgcaatcccactgcaccagctagaaagctatcaatcttgacccaactcccaagcaccacctatcttgtttcacatgtggagggccctgctttcttgccctggccattcattcacctggtagaaacggcctcccttgaggatgggtaccagcccaatcataggctcacagtttttcagtgcttgatggaagatggtgtaggggttgcgttcgatggttgcctgttcctctgcagaagcggcatggtacttctcaaactgcttccttttcacagcttccagagtctgcaaaagaatatggtggaagaggctgccccaggctccctaaagggtttacccagccaagctagtaccttgccctttactcccatcctctggttctgcgctggcaatgcagctcctctcacagcacatccaaaacaaagtttttaagtgcctccccctttgctagactaggacagaaagagtggattgagatttgtggcatggagggggtggggggtgaggtggggaatggcagttgttttattttttatttgttcctttttttttaattgtgtgtttacttccgaaacaccaaggaatggcagttgctgactcttacagggcttcattaaagcccgtacacatgcagggaagttaatctgaataatagatacatgaatccatttgctcttaagctacactgaaagtaccaagtacaaggctacggggtaggggggcaagaaagatgactgaggagggaagtgctgtttacctgaatcatgagggatctggccagtactttgtttcctcctatcatcatcatgttggtgaatttacttcaaagagaaaagcaacacgtttagctctccaaggctgtatcacagaatcctcaccagaaaccctccctgggatagtcccagtccatgtaacaagtgtttgtttccatctaacctgatgactgggtcttcaaacacagaacttgttttccctgctggagcagctttgatgagctgagtcttcttgagctcccgaacatatttctcctcctcagttagctcctccactggcttgcgataatattccttgtcaatcaagggatccttgaattcaggactatagcggctccatctcacctgagttagcctgggagggggggaaaggaggaggcaggcaaaagctgactccacaagcgagtaggtttgacttaacaataggcatgactgccaacgcgccgacgagggggagcggcgcggagaccgcgagctaaacctgagccacaacaattcaggcccttgtcccaagtaggaggacattccccaagcaggcgggtaaagtctcctcctggtcaagtgctaacggtaaggatgggcttggcgcctacacacccatcccaattcacaggcgatcccagatctgagctctttagctgaaccgcactttcagctccgcgttagaaccctagatcagccagactccttaggcgagaggtagtcactaaaccttcggattggcgcagggtcacgcagctaacttagaagcttgaatccagatactccggcccccagggcaatgctctctctaggggcccacgcggcctgcctgtggcccccttccttcctcgcagcgcccccccgccgctgctcgccaccctctcaccctggaagctgcaagacagcccgccgcacgcccaacgccaggcccgaccatcctcgggcaaccttcactgcgggggcagccatcttggctggccacgaggaccccacaaggactgccctcggcgcgcctgagcgagtgacgggaaacgggtgaaaaagactcctcagggtcctaaatctgcgtttctctccactgatctggacgttagagtttttcactccggggtccaaaggggagcgccaaaaggaaacccttgccctccctgtatccgtcgcagtctggcgcggccctcggtgacggcactcactcctctcaggaccccatgcaggccccgccccgtctcagctcgtgcagactctcgcgagttttgaagccgcggggccgggcggctgcaatatggcggaggcggaaggggaaagcctggagtcctggctcagtgagtagccgcggccgtttctgcctgccctcgagccgctgggctgcccctgtcttcacccccacgtcccctccccgggctccacggcgtcgcctcttggcagcccacgcccggtctcgccctc

SEQ ID NO: 18975 - DNA, 2300 bp, Homo sapien
ccacccttccctccatctgcccggcctgtagggttgctccgacctgggaagccctccattctgcctccctctccagccttggaaagaggcacccactgggagccggcgctggccctggccctggcgtgtgggtcctgggctcctcctcgcaccatccttccctgcctctggtctgggattttggggtctgtctgggccctgaatgctggggcttcctggctctgggctgctggttcccaaggtccaggctgcggcgggggccacgaggatgcagctgcctgaatgcattttttatgaaattccgttaaagtttcttctcttcatctttcctgcccattggtttcttttgctgcagctgagcgttctcttcctcctccgttttcggtgaccactttggcggttcttttaaaaggaggcgagaacgcgggcagcgccggcagcgctcctcccggtcgcgcggcaggagcggcggcagttcttcccccacttctaggtgccctcctgtcacccagggcagacgccgggcggtggggtccgcgccacttcaggggcattcgcaacaaccgacggccgcgagttgccaatggggcccctttctcggggctgcccctatgacctgaaactcgcttcgcccatgtcctccttggagcgggagagggttgtggctggccccggccctgcagcccctgccttctctacctgggttgggggagcggggaaagtggtgcgaccagggctgatgctgttcctcctgccaccaggtccccaccacgcgctctgcaggctcttcccacgccgcgcagcccagcggtgtctcccggcccagtgcacctgagctccggggagggctgggtgcggggccacgcgcaagatcgaggtgccggcgggtccggcgtgggcccggacacggcccaggcgcaccgggtgaaggggtgacgagccaagcgagttccgcttgcggctgggtggcagcgtcgcagggtcccacgcaggcggcgcggcttccggggcggcctggaggccagggcagtgccccgggggcccggcaggtggcgcgggcgagccgacccttccccggcgccgcgcgaggagatgagctcacggcgggccccgcagcgccggacgctggttgcgcgctcccaggcgccgagcggccccgggcacgcgcgcgcgccaccggcccggcaggtgggtcccggctcccacgccgcctctcccgcccgcgggaccctgggccgtgggctccgcagcccgccctgtgcctccgggaggggcgttccgggcgcggggggaacggccgagggctggagaccctaaaggcgcctcctacggccagaggggagcctccggcgggagccacctctccggggcgcatcatcctgccccccagtaagaggaaggctccagaatggagctcaggaattaggagtctcgagtgcgtagggccgggttactgccactcgggagccgatccgaccagcctgtcccagggagaagctggcacgggtctggggagttcaggctgctcccggcaggggcggcggacagggcgcctgcgtccccacccacgcaggccggccccatccgggggatgcagcggcgggtgttgagaccgaaggactcggcgaaagccagaaagagagggttggggagaggggctcggagacctgctggggacagagtcgcaccgcttggagttcccagcctggccctcacccggcatcttcctgggccagcaacgtcaggccggtttatttaagcaactgtaacgtccgcccgcacacaccctgccccagtctactcctgcctcctgctgggactggagggtgggcgctttcctgcttcagcttctcgctcttgtgtaatcccacaagcgagggatttctaaactgagcagcaggtgcctggctgatgcccagtccccaccagaagccaagcctggtgggccttcagccaaccaccgcacgccacggaccgcccaggagtccctgtcccgagcgcgccgtcagccccgtccagggcctgcaggacggaacccgccctgcgctccacacctgaggccgctcccttcgcctcttctcctcaggtgctgtccttattcccagcccagtcaagagctaccggggctggctagtcatgggggagcccagtagagaggagtataaaatccagtcctttgatgcagagacccagcagctgctgaagacagcactcaaaggtgagcacgggacccctcctgagctggggtcaggagctacagagaagggcccctgtgggcagcaccagaggctgagcctggt

SEQ ID NO: 18976 - DNA, 2300 bp, Homo sapien
agcagccttgaacccacccagctgggacaccaccagaaggtccagggctctccccatgagagaatcagagggaatgcaggacgtggtctatggtgagccaacgacacagtgagaaggagcaggaagttgctgtttctcctctgaccagcccacactccaaaggaaacagacgccatcctacacctatcagccctgcctgccaggagaacagaacacactcctggtctggatggggctgctgcttgagtgcagagggctgcggtaggccctttgcaggagtcaggtccctacacttggcctgtttttccaacctatttaatagacattaaagctaaacacacattccttatcttactccatctcccctggcacatctgcctactcacaaagtatgagggaaaggactcctgccttcctcaaatcccatgttctccatagcggcagcccttggcagctctgcttctagtgctgggggagactccaggctgagccagtcactttctgggccccgtgcccagaccttcgtgtctgcagacacaccaccacccaggctgtcctctcccaggaccgggctggtcatggccgtggggctccatggaaagcagatcccagcgcccgtgcaggaagtggatgggccatgctgtgggcaggcgtgggtgaaggtgcagcctctccccagtctacctcactgactcctctttcacccagagctgggtcagccttgctgggtgaggagctatcagcaggacaggtggcatcagcgcccactgcctgctcctcagtgcagagcatgctgcgggtgcatcctcccctgtagccccagaagggccgtggctctgaagcagcccactgatggggatggcagaaggaaggggcgggcacgtagcctggtgagggcacagctggtgcctggggtgttaccagagcagagggacacccacaggcggagaggcagaggagaaaccagttccaggctgaggggaggtctccagaacatgacctccacccttccctccatctgcccggcctgtagggttgctccgacctgggaagccctccattctgcctccctctccagccttggaaagaggcacccactgggagccggcgctggccctggccctggcgtgtgggtcctgggctcctcctcgcaccatccttccctgcctctggtctgggattttggggtctgtctgggccctgaatgctggggcttcctggctctgggctgctggttcccaaggtccaggctgcggcgggggccacgaggatgcagctgcctgaatgcattttttatgaaattccgttaaagtttcttctcttcatctttcctgcccattggtttcttttgctgcagctgagcgttctcttcctcctccgttttcggtgaccactttggcggttcttttaaaaggaggcgagaacgcgggcagcgccggcagcgctcctcccggtcgcgcggcaggagcggcggcagttcttcccccacttctaggtgccctcctgtcacccagggcagacgccgggcggtggggtccgcgccacttcaggggcattcgcaacaaccgacggccgcgagttgccaatggggcccctttctcggggctgcccctatgacctgaaactcgcttcgcccatgtcctccttggagcgggagagggttgtggctggccccggccctgcagcccctgccttctctacctgggttgggggagcggggaaagtggtgcgaccagggctgatgctgttcctcctgccaccaggtccccaccacgcgctctgcaggctcttcccacgccgcgcagcccagcggtgtctcccggcccagtgcacctgagctccggggagggctgggtgcggggccacgcgcaagatcgaggtgccggcgggtccggcgtgggcccggacacggcccaggcgcaccgggtgaaggggtgacgagccaagcgagttccgcttgcggctgggtggcagcgtcgcagggtcccacgcaggcggcgcggcttccggggcggcctggaggccagggcagtgccccgggggcccggcaggtggcgcgggcgagccgacccttccccggcgccgcgcgaggagatgagctcacggcgggccccgcagcgccggacgctggttgcgcgctcccaggcgccgagcggccccgggcacgcgcgcgcgccaccggcccggcaggtgggtcccggctcccacgccgcctctcccgcccgcgggaccctgggccgtgggctccgcagcccgccctgtgcctccgggaggggcgttccgggcgcggggggaacggc

SEQ ID NO: 18977 - DNA, 2300 bp, Homo sapien
gcgggtcaagtctaccgcgccctaaccttggaccccgcctgcaggctgactttcgagtcacacgccagagcacggcgacccctaaggtcgcagcccggcttcgcaaggcacctccttctaacgcgtcggtcgaactcgcgcgcccgcgagcagccggactacatctcccaggaagctgtgcgccgtccagctgtcctgcccttggtcgcgaaggactacattacccggtgatatcttgcgggaggcggttgccagacctcaagcgcacaaccattggtccagcgtctggcggggagctgcacggtgattggcccaggagcccgccagtttcgtccgagctcagtagagttttgctgttaagactgcgcgaggagctagagagagcggagagcgctgagccgggccgcacccgccgagccgtgtgagtaacctctacctccgtccttctcgccgccctctcggggaccagcaccctcgctcctcagggtggtcgggagggagcacacgcacccgggcgctcacgagagggcggggactgtgtacacacgtgtcacaccagaccagagaagcatctccagggacaccggcggccgagccccgcgcacgcccttgagcacctgagctccagggcgtcccctcggactcaaggagaaaaaacacaccccgaggcacacgtggacacctaggtacccacacggggacctctgcagatttgctcagctgagcccttgggcacatgggcacccgaacaccaggaagagcctggtatgctccggtctcctgacagcgatccaggacacctgccactcgggcttgctcctcctttctgcccagatgggcgggaaacacgctgctcagtgtgacctgagcggtccctgggtaacccctggagaggttttgcctctcagtcgcttgccgcgtgtttaaacttcctcatgggcgcctggggaggagttccagggtgggtgagaggagaaaaggaattgatgtctggggtggaggctgccatcctgtaggtagtatctcccctcctcccccacccccacccccactactacaagtattcaagaactagggtaattctgaaggctagttttagggattttttttttttttttttgccataacaaattcaaacagtatagaattatcgacaggtctaccttcctttttcccttctcagcccttctccctgtgatcagttaccaactacctgttgatgtgtgtggttacagacttctttctatgctttgtacaactctacagaccgtatgtaggtattactgtttttgttttttgtttttacaaaaaaggaaaaaagtacatctcctggaagggatgctttttagctgagctctggtggatgagaggagctagccttgaaaaagtgagtaggggctgagagtggggctgtatttcagacgtagggaactggaggagtagaggcaaggcaattgataggagtgctccccgagttttccaggaactgggcagaagcagtcagaccactctggttaaatgagggaaggggaagagtggtccagagtgaggctgaagaggtcagtaggtctgagtcaggggagcccaggagcgtcattttcttttttgttttgttttgtttttttgtttttgagacggagtctcactctgtagcccaggctggagtgcaatggcgtgatttcagctcactgcaacctctgcctcccaggctcacgtgattctccctcctcagcctcccaagtaactgggattacaggcgcccaccacgacacccagataatttttgtatttttattagagacagggtttcaccatgttggccagactggtcttgaactcctgacctcaggcgatccacccgcctcggcctcccaaagtgctgggattacaggcgtgagccacggtgcctggccaggagcatcatttgctagcgtagcatggccccactgtgccggggtggtctgaggtgtgtgcaggaggggaaagggaaaggtgaaggggctcagggcctcagggctcttcctttggacagtgggggattgttaaagaatcccaatccctgttctccagccctgcacgtccttcagtccctcagcgttacacttgagtgggctcactcagtgagcaggagtttgctataaagttgccagatgtcttggaaaaccagttgatctctgggaccaacaattgcctatcaagcctgttcattcgattctcaaatattattaagcacttaccatgatgggctctattccaggaaccggaaatttacgagtgaacaaatgagaccaaggtcgtgt

SEQ ID NO: 18978 - DNA, 2300 bp, Homo sapien
ttagtagagacgcggtttcacatgttggtcaggctggtcttgaactcctgacctcaagcaatccacccacctcagcctcccagtgctgggattacaggtgtgagccactgcacccaaccaagatctcaattcagacaaacatttttgtttgttttctgagctctgtcacttagaaaagcaaacttgtggctgggtatggtggctgacgcttgtaatcccagcactttgggaggccgaggcgggcagatcacgaggtcaggagatcgagaccacggtgaaaccccatctctactaaaaatacaaaaaattagccgggcgtggtggcgggcgcctgtagtcccagctacttggagaggctgaggcaggagaatggcgtgaacccgggaggcggagcttgcagtgagccaagatcgcgccactgcactccagcctgggggacagagctagactccgtctcaaaaaaaaaagaaagaaaagcaaacaacttgttttaagaaggacatttcagccaggcacggtggctcacacctgtaatcccagaaccttgggaggccgagctgggtggatcacttgaggtcaggagttcaaaactagcctggccaacatggtgaaaccccgtttctactaaaactacaaaaattagctgggtatggtggtgcaggcctgtagtcccagctactcaggaggctgaagcaggagaatcacctgaacccgggaggtggaggttgcaccgagccgagatcgtgccactgcattccagcctgggtgacagagtgagactcttgtctcaaaaaaaaaaaaaaagtttgagaccagactgaccaacatggcaaaaccccatctctactaaagatacaaaaaattagctgggcatagtggtgcacgcgtgtaatcccagctactcgggaggctgaggcaggagaatcgtgtgaaccccagaggcaaaggttgcagtgagctgaaatagcaccattgcactccagcctgggcgacaagagcaaaactgtctcaaaaaaaaaaaaaaaaaaaaaaaaaaaaaaaaaaaaaaaaaaagaagaacatttctttctttcagaaaagtgtaaacactaattcatatttgatattaaaagtttttttggggggtcggagtgacagttttgtgtgtgtgtgaagcataatgtatacgtattaaaaagggaatgcttgtcctttaaagacacatactgaaatatttactggtgaaaacacgtgatggtatttacttcagaataacgctgggcagcgcgtgcgaggtaggtgcagaaatagaggaaacaagattgccccatgagtcgcgtaactgctgaggtcggagagcgactctacgcggcttcatcgggttattccacttctgtgtatcttgaaattttctacaataaaaatgtcttaaaattgtgcgtcaaaatgataacacgaatataaaaatgcaattaaaaagtcaggaggcaatactgtcgcgcaaaaccgtgacgctagttgtgtgcgggcggtaggatgagtcatttcctccttcctttctatattttctgtctatatacttttaatattacttttataatgagaaatactaaaactcggggtgagagggggggacactcgtgtttttgccttccccgtccccgaggggactgttctcatctattctcttcccgacgtcctccagctttttgctaggcttcctgccatctttaccaagttgagattatccgggttctggcattaacagagtttgaggaaagcgggtcaagtctaccgcgccctaaccttggaccccgcctgcaggctgactttcgagtcacacgccagagcacggcgacccctaaggtcgcagcccggcttcgcaaggcacctccttctaacgcgtcggtcgaactcgcgcgcccgcgagcagccggactacatctcccaggaagctgtgcgccgtccagctgtcctgcccttggtcgcgaaggactacattacccggtgatatcttgcgggaggcggttgccagacctcaagcgcacaaccattggtccagcgtctggcggggagctgcacggtgattggcccaggagcccgccagtttcgtccgagctcagtagagttttgctgttaagactgcgcgaggagctagagagagcggagagcgctgagccgggccgcacccgccgagccgtgtgagtaacctctacctccgtccttctcgccgccctctcggggaccagcaccctcgctcctcagggtggtcgggagggagcacacgcacccgggcgctcacgagagggcggggactgtgt

SEQ ID NO: 18979 - DNA, 2300 bp, Homo sapien
ggatcacctgaggtcaggagttcgagaccagcctggccaacatggcgaaaccctgtctctattaaaaatacaaaaattagctgggtgtggtggcaggctgctgtaatctcagctacttgagaggctgaggtgagagaatgcttgaacccaggaggcggaagttgcagtgagccaaaatcatgccactgcactccactccagcctgggcaacagtgcaagtctcaaaaaaaaaaaaaaaaccaaaaaaacaggcatggtggctcacgcctgtaatcccagcactttgggaggccaaggtgggcggatcacctgaggtcaggagtttgagaccagcctgaccaacatggagaaaccccatctctactagaaatacaaaattagctgggtgtggtggcacatgcctgtaatcccagctactcgggaggctgaggcaggagaatcccttgaacccgggaggcggagcttgcggtgagccaagatcgcgcaccattgcactccagcctgggcaacaagagcaaaactccgtctcaaaaaaaaaaaaaaaaaaaaaaaacaaaaggctgattccattactctttcctctttcctccctgctttcactttgccgttcaaaccaaatccttcttgattagctcagcaccaagtactggctccctcctcagccatccctatgtgtagttcagtggcacttggggccaactgcttgtcttacagattaggcaactctagattacaaagcactgaaagcaggggcttcatctggttggtctttgaccctgcagagccccttgcacacaggtgatgctcaataaatacttggtgaaagcacaattcattttctgtgtttcaatgggcttcttttctctatagaatcagatgcttggttattctcacctcagcgctattttgttggcttccagaaggcacagtaacgctaggtgtgttgtgttctatcctttaattggaagagctttgggaactgaaaaataagaattatttctccaagcctcatcttctgccactcccccgtactcaccggcctcatacaggaattgaactacttagcactgcacagaacacgactttctctctcacgcctccgttcctctgtacttagcctctgtacttacgtgccattccctttccctgaaatgcccttactctggcttctctgcctggcaaattcctactcatcctccaagactcagatcagacatcgccgcatcacatctgtgaaggctcttctgcaatgggcagtgtagcagtaccccctccatttttttagcttcctcagcaaactccaaataattataacagtacttatggcattatttgtttatttttcttctacttcctagaccgtgaattccttaagggccaagatttctgttctatccccagcacagtgttcggcctatattggagaatccggtccgtacaaactctgcagtgattcaatcaatgagcaaacaaactcaccaatcattcaacacagcagagtttgtacggaccggattctcaaatattttaagacctggtcctctatttggagtgcttcattctggaagatctcttcctcccccaagcccctacccatccaactgcctaggtttggtagaagaggaaaataaagtgattagacgggggaagagtccttcagggctaagctgtcatttacccgctctggcaccgagagggttacggcgacccgggggcggagccgtgcggaggccacctgctgcggggaggtctggcgcatgcgccctgacacctagctggttccctacccgcaggggcccggctgaggaggagcgcttgcgctctgggccttttccgccgggggaagtctcgcgggggcggggcggggcctcgtggagaagttctcgcgggacaccgacggggagcggaagccaggaggtattgctgcttcggcgaccgggcggcggcagcggcggcggcggctgtggcagagtctgtgcctgtggcggtgacggcggcgggagcaagcgctgccctcgcagagcagccttggggtcgccggccgctcgcagcgttgtggaggggcgggccggacgctgagcggagcagctgcgccacggtgagtacgggaggctgcgctcggcgcctctctcgtgccttttcctcttggctctacagcgggagtgggccccgggggaaccgggaccggccccggggttcgcgtcggggcggcgaggcttgggacgtggagcgcaatccccggggctccggactctacgtttccccttttggggcgcttccttcctggggaccgtcctcct

SEQ ID NO: 18980 - DNA, 2300 bp, Homo sapien
tcttattttcacctcatatcagacacctcctgctcagaaaccttcagaggttgcccatcacttgactatgacacctaagccatgcattttgcattttggcccctctctctcatcactcttccccccaattactggggcttggactaatcaaaaacattggttgatggccaggagtgttggctcacatctgtaatcccagcactttgagaggctgaggcaggtggatcacctgaggtcaggagttcgagaccagcctggccaacatggcgaaaccctgtctctattaaaaatacaaaaattagctgggtgtggtggcaggctgctgtaatctcagctacttgagaggctgaggtgagagaatgcttgaacccaggaggcggaagttgcagtgagccaaaatcatgccactgcactccactccagcctgggcaacagtgcaagtctcaaaaaaaaaaaaaaaaccaaaaaaacaggcatggtggctcacgcctgtaatcccagcactttgggaggccaaggtgggcggatcacctgaggtcaggagtttgagaccagcctgaccaacatggagaaaccccatctctactagaaatacaaaattagctgggtgtggtggcacatgcctgtaatcccagctactcgggaggctgaggcaggagaatcccttgaacccgggaggcggagcttgcggtgagccaagatcgcgcaccattgcactccagcctgggcaacaagagcaaaactccgtctcaaaaaaaaaaaaaaaaaaaaaaaacaaaaggctgattccattactctttcctctttcctccctgctttcactttgccgttcaaaccaaatccttcttgattagctcagcaccaagtactggctccctcctcagccatccctatgtgtagttcagtggcacttggggccaactgcttgtcttacagattaggcaactctagattacaaagcactgaaagcaggggcttcatctggttggtctttgaccctgcagagccccttgcacacaggtgatgctcaataaatacttggtgaaagcacaattcattttctgtgtttcaatgggcttcttttctctatagaatcagatgcttggttattctcacctcagcgctattttgttggcttccagaaggcacagtaacgctaggtgtgttgtgttctatcctttaattggaagagctttgggaactgaaaaataagaattatttctccaagcctcatcttctgccactcccccgtactcaccggcctcatacaggaattgaactacttagcactgcacagaacacgactttctctctcacgcctccgttcctctgtacttagcctctgtacttacgtgccattccctttccctgaaatgcccttactctggcttctctgcctggcaaattcctactcatcctccaagactcagatcagacatcgccgcatcacatctgtgaaggctcttctgcaatgggcagtgtagcagtaccccctccatttttttagcttcctcagcaaactccaaataattataacagtacttatggcattatttgtttatttttcttctacttcctagaccgtgaattccttaagggccaagatttctgttctatccccagcacagtgttcggcctatattggagaatccggtccgtacaaactctgcagtgattcaatcaatgagcaaacaaactcaccaatcattcaacacagcagagtttgtacggaccggattctcaaatattttaagacctggtcctctatttggagtgcttcattctggaagatctcttcctcccccaagcccctacccatccaactgcctaggtttggtagaagaggaaaataaagtgattagacgggggaagagtccttcagggctaagctgtcatttacccgctctggcaccgagagggttacggcgacccgggggcggagccgtgcggaggccacctgctgcggggaggtctggcgcatgcgccctgacacctagctggttccctacccgcaggggcccggctgaggaggagcgcttgcgctctgggccttttccgccgggggaagtctcgcgggggcggggcggggcctcgtggagaagttctcgcgggacaccgacggggagcggaagccaggaggtattgctgcttcggcgaccgggcggcggcagcggcggcggcggctgtggcagagtctgtgcctgtggcggtgacggcggcgggagcaagcgctgccctcgcagagcagccttggggtcgccggccgctcgcagcgttgtggaggggcgggccggacgctg

SEQ ID NO: 18981 - DNA, 2300 bp, Homo sapien
ctagtcagacagacccaagtttgaattctagatctgatacttaactgacaaagggacttctttctaagcctcagtttccttgtctgtagaatttgaataataatggaactttctcgttggcttgttaaatgagataatgaacagaagatgtggaggaagtggtcagcaaaaggtagatgaggttgttgtgatgattagttaaatccagagctaaaaaagacagggaaatggccgggcgcggtggctcacgcctgtaatcccagcactttgggaggctaaagtgggtggatcacgaggtcaggaattttgagaccagcctggccaacatggtgaaaccccgtctctacaaaaatacaaaaattagcgaggcatggtggtggccgcctgtaatcccagctactagggaggctgaggcaggagaatgcgggaggcagaggttgcagtgagctgagatagcgccactgcactccagcctggatgacaaagcaagactccatctcaaaaaaaaaaaaaaaaaagacataaagaggtatacagtgaaaaatatgtcactctcccacccctgtcccctacctcttaggtttcctactctgaggcaactaatatatgagtatcctcccagaaattctctttaacttaaaaaactacctccaagggaaattcatgttgaagagcaccgcgatgggagcattctcacaaatattttgctaagtattaggcagaacagtgtgataataaagacagctgcctgtgtggtcttgttggaccctgagtttagggagtattttgacaacatatttagttctctgcagcctgagccagactggatgaaatctttctagctatattaagacacatgggctcagaaaagcaatatgattcagaagcagaatttacagcttccaaagcagagagcccctctccaggagccgcctcgcttcattttcatgaaggatatcagggcggggcgagccacactgggctatctgaaccgtggactgtggtctcattcccggcattccccatttgccaagcccacattgccgacattcccctagggtttagatgcttttcttccctcctggacagacatacttggggtcacatagctttgccttcagctgctagagagtcccaaggacagtgtggaagagacaatgatcagaggctatgtgaaaagagcaaggattccttcctgcattctccccctggctgctggagtccagcttctgttctgtaaaatgtacagatcttatatttatctatgatcgacttgacaaatttaaacttgttgaagtcctaggcacacctgtttattggataaacagggctatttgtgccacactgttaatagggtaactatgtttatttatttatttatttttcgagacagggtctcactttgtcacccaggctggagtccagtgacatgatctcggctcgctgaaacctccgcctcccgggctcaaatgatcctcctactttagcctcccaagtagctaggaccacaggcaccaccatgcctggctaatttttctactttttgtagagacagggtttcgccatgttgcccaggctggtctcaaactcctgggctcaagcgatcctcctacctcagcctcccaaagtgctgggattacaggcatgagccaccacatctggccactatgtattattatagatttacagagcttagatataatatattaaatatatttagagagcttagagagttcactgccttgcctccgaccttatgccaaaaaaacaggtacctaatcaccgcaactgaaagatattctgcagcctcagtaacacattccagtatttaactcacgtcaaaaaggtcccacttgatctaacctgaatttgctaagctagaatttgtctggtttccaataaatagggaaagcaacagtggttgtctttcatcacagtttgtactttaagatgttcactaagcctttgtccctttaaaactaaatgaaagcacgttcaaattctttcatcttctatttgtgtttaatttctttctttctttctttttttttttttttttttttttgagacggagtctcactgtgtcacccaggctggagtgcagtggcatggtctcagctcactgcaaactccgcctcccgggtccaagcaattctcatgcctcagcctcccaagtagctgggattacacacgcgcaccaccacacctggctaattttcgtatttttagtagatacagggtttcgccatgttggccaggctgatctcaaactcctggcctcaagtgatccgcccacctca

SEQ ID NO: 18982 - DNA, 2300 bp, Homo sapien
gtggaaagatgtaatatataggtagcctgctagctcaattcaacaaatgttaatggatacaaggcagcaagtaaggtgctgtggaaactgctaagataagccagctgcccgcagggagtttgaggtcttacaaaaagagcaatgctgtataaagcagacttttgcaaaggtggcaatgcagacacagagaaggaggcccagcattatatatagagagagtcaatgactaaaacccagggagaggctgggagtggtggctcacacttgcgatcccagcattttgggaggctgaggcaggaggattgcttgaggccaggagtttgagactaacctgggcaacatagcaagaccccatctctataaaaaataaaaaaattagctgggtgtggtggttcgcacctgtagtcctagctactcaggaggctgaggtgggaggattgcttgagcccaggtgttcgaggctgcagtgagctatgatggcaccactgcacttgccagactgggtgacagagtgataccctgctctaaaaataaataaatatgtacatacatacaagaaaaaataaaagtcaagaaaggtagcatttgaggtgggcctttaggttgattaagtatttatttgcatgctggctttactgataagaaagaaccgtcaggctgggtgcggtggctcacgcctgtaatcacagcactttggcaggccgaggcaggtggatcacctgagctcaggagtttgagaccagcctggccaacatgttcaaaccctgtctctactaaaaatacaaaaattagctgggtatggtggcaggcacctgtaatcccagctactccggaggccgtggcaagagaatcacttgaacccgggaggtgaaggttgcagtgagccgagatcaagccattgccctccagcctaggcgacaagagcgaaactccgtctcaaaaaaaaaaagaaaaaaagaacctttaaagcaaagcgtagggaaccaaccatgtgacgaaggagcagaggtggaaaggtctctgtcacgtttaaagaatggtggttaatctatgtggctgcaggaatagtttagcctgtggggacttagacctggaaacgtatgtctgagtcaatttatgaaggactttgaacatcaggcagaaagatttggacctatttgcaaaggtgaactatcagtttttgtgtgcaggttagtgacatgattcttatggcgttttaggcaacagctaaactgggtcatacaagattaggtactaaaatgccatcttcttgtccagctgagaaagggattttaattacgtaattaaactcatgaatgtgggaaggggctcttacttcacaaggccaacctcagctctttcccaattatataaacaagtttttgtttgtttttttgtttttgttttttttaaacaagccttccagacttagatctctgggaaaagagaagtaaatactgacacaggcttgctttgttttcccaagagaggtctcccaggcgatttatctaattacctagaaaaaaaatttaacttgtttttccctttagatttcagccgagctggaagcgggaggggggaattgcagtattgccttagattttctagatttggtttggacgcaatattcgtcctgagggagtccctccaaggcctctcggagcgggcagcctctaggcatttgttcaaggcaacaaggagggagcttagaagaacttaagagaggcggggagctctgcaaagggcttattttaaaaagaaagggaaaaaaggtggggcgcgccgtctatctttttagaataattctgtaggaaaacgaatcggaggtaaagccatgccctctggtcagggtttctggactagaaactgcctgagctttacgcacaggaaaggacagtggctcttcactctcccggccgcatcactcggcacctaattccgccaggctcccagaggggcggttgcagctacagcctagcacgccgcgtagccaataagaagccagaattccccctattctcaaatcctgaccaatcggtggcctgaactttagctctctggccggcgcctctgttgcccggaagggaggcaagcccccttagagttgccagtaacggacatggctgcggcccccggaggaggggacgtgaagtgaggagggggttgggaggggagaggacgcgggcgaggaagaccagccccggggccccggtaagtacgagaaggcccgtggcccgaaagtggggagcaagggggcgtggggctcggccttgcgcgtcctttggattcttggccaagga

SEQ ID NO: 18983 - DNA, 2300 bp, Homo sapien
cctggccaacatggtgaaaccctgtctctactaaaaatacaaaaattagccaggcatgatagtgcatgcctgtaatcccagctatttgggaggctggggcaggagaatctcttgaactcgggaggcagaggttgcagttagccgagattgaggtcacaccactgcactccagcctgggggacagagcagaatctctaaaaaacaaaacaaaacaaaacaaaaaaccaaaaacagtcagaaggtgtcttggaggagtaggctttggaggagctggcatagtggtcattgatggtaggagggttgtcgtcccctggcttagctcaggagcggtttagctcttgatggttctctgcttctgatccatcagttcggtctctccttcaaagccctcacccctgtccccggtcctccagcccacagtggccctgctgtggcagtgacagcctgggttcctgctgcttgggtgcagggctcccttctccatttgctgaggtgggtagtgtaggaagggaggcagggcccagagagggctgtgctggggcctgcacagcacgtgggctagtccctgtgtgctgttctttttggggcctgtcacatagaagggacagtgtttgtggacttgtagctcccacccgagcagtgcctcagggacaggagagaggggacaggagtctttctctttggctacagccagattgcagagcagcagcatcctcacagtggctggcgtggaagctgacccccactgccaacctttccttctctccatggagtcttcctgttcttaacctctggactgcccgggccctcccttctgttctcactcagcactctgtttgggggccgcacagggagttgcactcatgaaagggaatggggaggctggcttgggctgctgaggctccttcttccctgcagcttgagatggtgtcgtctaggaaacggagggccctggagaaacatgctcaggctccagctcacactctccagctctgggacctgttaggctgtttcctctcccctggggtgtgtaaccccattataaggatggttttaggcagagaagtgtcccatccactccccatgcctcggcccctgcttcacccagggtgcctgtgctgagagcatcctgtatgtcaaactcgcggtccctgaatgatgcctctggagccatgactcactcaggctctgcctgatgctctggcatgtgctgaggcaggagccccaggtatctggcctcctttctgcctgggggatgcagggcctgggcattcccgggcagcctcatgggcccagcagcacttgggccggtgtgtctgaatgtattggggcatcaccggctgctggcccggctcttccctgcatggctgtgagggtctccgtgctacctggcaggaaggtgttggagtcttcagaggccctttgggctggctcttccctccctactggatccttccttctgtcagctgcctggccttgggctttgccttcctagaagtcactgctcaaatcttctcagcggccagtccatcccgtccccctccacacaggatgtgctactattaataacccacaagtcccctctcccctccttcctgcagctgtaactatggaaagggctgttggcttggctccatgctggggagttgccgtgtgatttggggacttctcatggatgatgggctcacccagtgacttggggacaaaggacaggtagtttgggaagagagctgggatttgtgtgtcccagggttccccttgatactggcagttgtcttcaggtttctgggacaggggcagtttctcctccatctatccctctgtctgtccatatcctggctgcatggtgcccctcagctaaccccactgtggcctcctctgaagaacaggccaagctcctggatatctggcagcgcgttggacaaactttctcttctcaatgctcctgtttcctccctccttctctttcctcttctcccctccctcccgcccttccagggctgctgcctcctcctccctccctgaatctgcagcgtgactagaaataggctgaattaatcagcagattgaagctctgctctgctgcgcctgattctgtgcagcacccggcttcttgctcacacactctcagctgtctccgtctcttctctcctcttctctctctctctcttttcaccctccccgctttgagggaggtgttggaagttcttgcagctgactgcttgtggctcagactctggcccatgctctttaagcaggcagagctatggatgccccatcagggcaaaggcaacaaagtg

SEQ ID NO: 18984 - DNA, 2300 bp, Homo sapien
cgtgtttgccttgtttggcgttatctgtccacatgtctcatctgccccactgggttgtggctccttgaggagctatgttgttgtctccaccttgcacccctcacaggccctctgcaatgtttgtgaagtgtatctgaatgggatgggggtacaaagaacgagagctccaggtgttgagaggaggtagaggctctggggctggagtggccgggtagggctttataagggaggcatccttgaaagcagggaagtgttggaacgagtggaggggtttgacgcagacctcctgggagaggaagtgggcagacagtgcttccggaagtgctgctgtatctgactggggggcagggccgtggctgagagggttgtttccctctttccattcccctcagatgccctcagggatggcagggagatccagtggcccagtgccatgtatccagacctccacatgccttttgcgccatcctggtccttgcactgggcctacagagacggacacctggtcaacctgccagtcagcctgctggttgaaggagacatcatagctttgaggcctggccaggaatcgtttgcttctctgagggggatcaaggtagcttgaggctttccttctcccttggaaatgcggtgggaacatccacaggcaacgatgggagggtccccagacttcatccggaagcttcccggccagcttactggctttttggcagaggctctggaacatcttcctccaccctgctgttcttttttttgaaacagggtctcaccctgtcgcccaggctggagtgcagtggcacgatctcaactcactgaagcctctgcctcctgggttcaagcgattctcccacctcagcctccccagtagctgggattacaggcacatgccaccacacctcaactggcttattttttattttttggtagagatggggtttcggcatgttggccaggctggtttcgaactcctgacctcaggtgatccacctgccttggcctcccaaagtgctggaattacaggtgtgagccaccacgcctggccccctgtgctgttctttattctcgctaaaagtctagtcccacaggccctgtcccagtggactctgggctaactgatggctcctaaccccagcgaatgtctgtacttagatgaattgtccaggaagagtggcctctgataggaccctctcgttcccactctcccacttgctgccggcaggatgacgagcacatcgtcctggagccgggagacctcttcccccccttctcccctccaccctcaccccggggagaagtggagagagggccacagagcccccagcagcaccggcttttccgtgtccttgagacccctgtgattgacaacatcaggtaggggtgctgccccgcctcctcctgtccctggtgtcttctgtgaagaggggaatgggactgacaaggaaggggccccgttcatctcgaggttctcttgagggcaggcatctccttaggctcctgtccttaacatcttgtgagaattcttagactgagtggtgccctctcccagtctctactctgaggggacagctctggaggtgaacacgggctagggccagggcagagcgtggaactgcaggactcacggtgcttgaagaagcggtatctggcagagaggcccagaatcctcccaaggtgtaggtttctagcctctctgccaagtgagactgacagtcacttctttctgcagatggtgcctggacatggccctgtcccgaccagtcactgccctggacaatgagcggttcacagtgcagtcggtgatgctacactatgctgtgcccgtggtcctggtgcgtgtggcggggctgtgcggggctgcatggggcagaggagagggctggacacgggggggtctcagggccactcacatgagcgggagtgaatgcagagggtcccagagtgagccagcctgtggagtagcaaaggaaggggaacggcagtgcctgggtccctctagaggggcggggtcaaggctgtgcctctgctgttcccaacaggccggcttcctcatcaccaatgccctgcgcttcatcttcagtgccccgggggtcacttcctggcagtacaccctcctccagctccaggcaaggaccaccctgtcctctctgtcatgcttccctccgacccgcagggctggctcttctcctagtaccctggctgtccctccctctctgcagcccagaggtcccctcacgcttcagcttaagaacacctctttccagctgggcgtggggactcaggcctgtaatccaagcactttg

SEQ ID NO: 18985 - DNA, 2300 bp, Homo sapien
cgtgagggggctggttagcgacactcagggtttgaactctctcccccaggcacagagcagatgctgtcccatggcaccgctgatgtggtcttagaggcctgcacagacttctgggacggagctgacatctaccctctctcgggatctgacaggtgggtgaggaagcacatgccagcagcaagagcagtcgcgctgccggggcacctgcccttcacaggcaggaacactcacctcacctccgcctgcttccctggcagaaagaaagtgctggacttctaccagcgagcctgcctgtctgggtattgctctgccttcgcctacaagcccatgaactgcgccctgtcctctcagctcaatggcaagtgcatcgagctggtacaggtgcccggccaaagcagcatcttcaccatgtgcgagctgcccagcaccatccccatcaagcagaacgcccgccgcagcagctggagctctgacggtacctcatgggtctgtccagcggggctggtgctggggctcccctgggctgccgaagcccaggagcagggagggcgtctggagggccccggcaccccccacagcaaagggggcagtggccacagccccaggctgggacgccagtgtggcactctatccggggacatggggagtcccttagtttcctcccttatcagtgggtgctcacttggcctgcctcactggttggttgtgatgctcaagtgggttacgtgtatcagaatgctttcctgggaagttaccaagcagcgttcctagagcattaggcttagtaggatcagacaggagatcaggtctgtcaccctgctggtgcagaggggcccagaagctccaccacgccaccccattcccaccagacacgcacacttcccaggttttttgaacccaagagactgtgaattgaaacagttgctgagggtagggccagtaccccctgggcaggagctgaagccacgccttgttgtagcttccagctcagattcggctacctgactgatgcatacctttcactgtcttttctcctgtgtctgtcggctccttcgtgtgtcttggctgtgtgtggtcccctggggcccatatgctcattgatttgggtgtggcatctgtgtgtgtggccctgggctggttcctgggtgtcctgatcgggctgtgtcctgtgtgtcctgcctgaagaagggatcggggaggtgctggagaaggaagactgcatgcaggccctgagcggccagatcttcatgggcatggtgtcctcccagtaccaggcccggctggacatcgtgcgcctcattgatgggcttgtcaacgcctgcatccgctttgtctacttctctttggaggatgagctcaaaagcaaggtggggagagccatcccttctgccaccactaactctgtttccacgggcttttgggcccgtatgttcatggccgtctgcctttcacaggtgtttgcagaaaaaatgggcctggagacaggctggaactgccacatctccctcacacccaatggtgacatgcctggctccgagatccccccctccagccccagccacgcaggctccctgcatgatgacctgaatcagggtaagggcaaaggcgtggggtggggacggggtggcggtgggaggattcccctcctcagagccacagccaggaagagcctccggagagccctccagttaagtacattcccttgggaaatggctctgatgtccctgcgggaaacagtagtcagcaggaaggagtggacacaggcaaaaaattctctgcagggcaaggacaggttcccagaaggctggtcccaaggtgagggagaggcttttgtccccacagtgtcccgagatgatgcagaagggctcctcctcatggaggaggagggccactcggacctcatcagcttccagcctacggacagcgacatccccagcttcctggaggactccaaccgggtacgatggcaggatctgtctcacgtgttcctgtagtggtcccatagctggtccaggggagaggtagagaggtggtgggcaggcggtggaggggagggatgctgatccccatcccgaagccgctggcatctctgctttctccaggccaagctgccccggggtatccaccaagtgcggccccacctgcagaacattgacaacgtgcccctgctagtgccccttttcaccgactgcaccccagagagtgagtgctgtggccatgggtacttgggcaacctggtcccgtcggctgagctctgcctgggcctgcgtaccccgtgggctctggagggatgtaggttt

SEQ ID NO: 18986 - DNA, 2300 bp, Homo sapien
tgctgttacttatttgggcacctgctatgttaccacgttctgctctgaggtctctatatgcaccctcatttaattcttcttaaagccagggaaggcagtgctgttagcatttcttctttacagatgacaaaattgagaattaaacaaaataaaatcaagagaaattcaagtgacttgcccaaggtcacacagctagcaagtagtggagctgtgatttgaccacgggctgccactggggctcgccctggaggcacaggggagattgagctggctgctggcagcaggggcggaacttgggccagtgtgggcatcagaggccagctccttaggggtagggaaagagctggaccagggttgccggaccgcagctgcagggacaaccgtttgccacttgcctggtgctgggagtgaccgtccccgccccccacccctggccgcaggtgctagaacagcatcccgacggccgctggaagggccacatccacgagagccagaggggcacagaccgcataggctacttccccccgggcattgtcgaggtggtcagcaagcgggtgggcatccctgcagcccgcctcccctccgcacccacccccctgcgcccaggcttctcccggacaccgcagcctcctgccgaagaacccccgcaccctcttacctacagccagcttcctcgggtgggcctcagcccagacagcccaggtacatcctcccagggggcagtgctgggcactgtgtgggcgtgtggcctgggcaagctgccagacagctgtcagagcgacacttgggactctgaccccttggcttctgccccccacagcaggtgacaggaatagtgtgggcagtgagggcagcgtgggcagcatccgcagtgccggcagcgggcagagctctgagggcactaatggccatggccctggcctcctgattgagaacgcccaggtaggatgatggggtcacggaccaggtcagggctcactccccactgccagttccccaaatgctgagttggctcctgccctgtctcctccagccactgccctctgctggagaggaccaggtgctgccaggactccacccgccgtccctggcaggtaggaagggtcaggggacctgggttggctaggagaggtgcaagtaaggaggccgagggtgggcaccccttcctcctgccacctttccattccatttttctctctccttgaagacaacctgagccaccgccctctggccaactgccgctctggggagcagatcttcacccaggacgtgcggccagaacagctgctggaggggaaggtgtgacctccacggggtgcaccgtgggcctcgggggggaaggtgtgacctccacggggtgcaccgtgggcctcgggggggaaggtgtgacctccacggggtgcactgtgggcctcggggtgggtagggcagggtagaggcaagagcctctgtatggactgaagccccgctcaggcaggtcctgagcccctggtgggggctagggccttggtccagctcctgctaattctgcccccttcccccaccccgcaggacgcgcaggccattcataactggctaagcgagttccagctggagggctacactgcccactttctgcaggccggctatgatgtgcctaccatcagccgcatgacacctgaggtgggtgctgcagccgggaagcagcacccagcgggcgggggagggcccagcaggcgggggaggggcctgatggccagactttgtgtggcaggacctgacggccatcggggtgaccaagcctgggcacaggaagaagatcgcctcagagatcgctcagctcagcatcgccgagtggctgcccagctacatcccagtgagccatcaagggtggctggggagtggggcacgtgctgtcaccctcagctgtggctttgcggtgccttttctcctctggctgggggcggaggctggctgggagttgttctgaggacggtgctcttccagacggacctgctggagtggctgtgtgcactggggctgccacagtaccacaagcagctggtgagcagcggctacgactccatggggctggtggccgacctcacctgggaggagctgcaggagattggggtcaacaagctcggtaaggactgtcctgaggcctggctgggcccccacctgcctccggggtctccaagagaagacagtatggggcccagcggtgaccaggacaaccccagccccagctaaccttgccacttccgtcccccatctcagggcatcagaagaagctcatgctgggggtgaagcggctggcg

SEQ ID NO: 18987 - DNA, 2300 bp, Homo sapien
accctcctcaaatatgcagatcacagtgacccacccccacccaccaagcctctgtgaactgagcgctcggcctcagcgggatgctcgtcccacccggtactcacttgtctttgtggccttgaccttcgccaccagtttctgcacaccggtcacatctccattcttgacggcgaggatcaggtcctgttcacgacccatactggctcctgggctgagctctacactcaggagtccagggcaaaggcaggcaacgggtccaagctggggcgtcagggcgccatgccacagccccttggagggctcccggttccgggggagcaagtcaggtgtcccaggcagtgggctcctcgtcaggtactgagggatactcccaaaggtgctccgtgaactgccaccacacgaaggaaagctaatctttgagggggtgaaggctacatggaaatctggatggatatcagcttgtggcttccgacagctccaggatgggctgggactgggcacaccaatcttcccggcttggctgtggaacaccagtgcccacccagagagcagccagcattcccttgggcctcaggcagcagcggtgcactggtctcagggctctggaaaaagcacggggcctctgtcgaatgctgggccacagcctgcaagggtcccagaagtggagtgcagaggatgagcaggacaagacctccagggagcccccaagccaccctggctcccctcggagtcgatggtgatgctgagccactgaaagtggggaggaagctgctatgcatgagaggagtattggtgggggggaggtggcattctgggagggggaggctgagtcactggggccccagggcacctggcagtacctcaaccttgggcaggaggggccctggcagcatgacatactggggcaggccgggccagcagcctgttctccacagcccgaggctccgacacccacagacaactggcgggccaggaggtggggccgggagggtcaggcacaggcaggcgggcaggggtcactccctgtcaaaggcaccagcccccagattcctccctacggaggcttcaaggcttcgctttaatggctggatgccctagtcctaggactctttgtgaacggagagcatgaagtgcttctggccccccatttctgggggctctgcctgctagagagggaagctgcacagcacctgttgctgacccgccctcgccccttgtgtcgggtggaggagcagctgggcagagaacagagagagctggggcactgctgacaaacggggctcccaagccccccaagcctgaacctgaagcccagaccctggactccaccgcagagaagcttacgtcagtttctcggtggcagcgaatttactgccagagtcttgtggcatgagatccgcgcaggcctggggccctggccgggaacccctcactccccaaacgtcccaagcccaacccaggggcactcccacgcggagcccgcggccgacacgggcggagggcgcccttggcagtgcctggggtcgggctggctcccccgccccccggaatgtccctccagcgcctcgcaaccccccagcccagcccagcccagcccaggcccaccggggaacaaagcggcgggagaagccgggcgggccaagcgcccgaggtataaacgcggaggatggaaaaaggggcgcgaggaggacggaaggagcggggagatggaggtgcccgccgaccccgcaagaaaagttagtttgcgcccgcccccaggggcgctgacccccagcgcgggccccgcagcctcacctctcccggccgcccgccggggtccggctggccctgctcggtccctggcactcaggacggtggctcccactcccccctgcccccctttctccttctccttttccaaggccggctcggcgcctcccgcaggaaatcccgcccctcccccctccctcccgccggatcgggaacggagggaccgtcccggccgcgcagtcaggctgtcagtcagcaccggcggctccgcccccatccgcgccagatcccgccccaactcgtgcccgcccggaccgggggcgctgaccggatcagcgcatgcgcccaggtgaaacggaggggcggggggcgcgggggcagaggtgacctggggctctggacttagacccaagggctagacaccccgggtctgactggtgggagagaagacgtaatgtgaagggggttggcaaccaagacgcgggaccccacttgcagtaccccccgtctgcggccggcgtcgcccacccgcagccgccggccgggcaatg

SEQ ID NO: 18988 - DNA, 2300 bp, Homo sapien
gtcactggggccccagggcacctggcagtacctcaaccttgggcaggaggggccctggcagcatgacatactggggcaggccgggccagcagcctgttctccacagcccgaggctccgacacccacagacaactggcgggccaggaggtggggccgggagggtcaggcacaggcaggcgggcaggggtcactccctgtcaaaggcaccagcccccagattcctccctacggaggcttcaaggcttcgctttaatggctggatgccctagtcctaggactctttgtgaacggagagcatgaagtgcttctggccccccatttctgggggctctgcctgctagagagggaagctgcacagcacctgttgctgacccgccctcgccccttgtgtcgggtggaggagcagctgggcagagaacagagagagctggggcactgctgacaaacggggctcccaagccccccaagcctgaacctgaagcccagaccctggactccaccgcagagaagcttacgtcagtttctcggtggcagcgaatttactgccagagtcttgtggcatgagatccgcgcaggcctggggccctggccgggaacccctcactccccaaacgtcccaagcccaacccaggggcactcccacgcggagcccgcggccgacacgggcggagggcgcccttggcagtgcctggggtcgggctggctcccccgccccccggaatgtccctccagcgcctcgcaaccccccagcccagcccagcccagcccaggcccaccggggaacaaagcggcgggagaagccgggcgggccaagcgcccgaggtataaacgcggaggatggaaaaaggggcgcgaggaggacggaaggagcggggagatggaggtgcccgccgaccccgcaagaaaagttagtttgcgcccgcccccaggggcgctgacccccagcgcgggccccgcagcctcacctctcccggccgcccgccggggtccggctggccctgctcggtccctggcactcaggacggtggctcccactcccccctgcccccctttctccttctccttttccaaggccggctcggcgcctcccgcaggaaatcccgcccctcccccctccctcccgccggatcgggaacggagggaccgtcccggccgcgcagtcaggctgtcagtcagcaccggcggctccgcccccatccgcgccagatcccgccccaactcgtgcccgcccggaccgggggcgctgaccggatcagcgcatgcgcccaggtgaaacggaggggcggggggcgcgggggcagaggtgacctggggctctggacttagacccaagggctagacaccccgggtctgactggtgggagagaagacgtaatgtgaagggggttggcaaccaagacgcgggaccccacttgcagtaccccccgtctgcggccggcgtcgcccacccgcagccgccggccgggcaatggcaccacctagcggacggcaccagtgcggggaccccagcctcgaggaggcgctcgtgccgggcggaggtggcgcttcagcaccgtcgtgggccggacagcgcctcccgcccccggccctcgaaacctggcttcggagcccagccgtagggaccggacggaagacaccgaaggaatggcgaacctccccggaccgctcctgacagttcccgggtggccttcggcctgcaaagtcggaatttgcacaccctccgctcgtccttccctgagcccttctgccctccttgcccagcccgggcggtggggactaagcagcgcgaggctgcagaggggcggtcacaagtgtgaccattcgcactgcactccagacgccggctcctcaggctttactggagagaagccccgaggagggctaggggcaaaagaggggccttctgcatctccagcaacctgcgggctgagctcccagacccggcgtcggggtgcgcttccgggcgggcgctaggaccggggacaatcaggagggcgcagagcgggctggggcggtgcagggggcggggctgccgcggcattgcggatcggcgggcactagggcagcgcggagctccggcggtgggcggggcgtggcggcgcgcgcagcggcaggcggcggcgggatggagcccgagcccgagcccgcggccgtggaggttcccgcggggcgcgtgctcaggtgcggcgcggcccggccggagtgggtgtcgggggcgcggggccagcgcgggtagggaaaccggcgcccgggacccggccaggcggcccccgatgcgcggcgctgaccccgcgtcccct

SEQ ID NO: 18989 - DNA, 2300 bp, Homo sapien
caggaaggtcacagtgtggtcggtcagcagcagctggtaagcttcctggatagacagtggcaggtcttggtggaagaggtggatggagccctggaagtggggccaacagctcagcttatgagccctcactacagtgccacagaggaatggggcaacttcccagctctgatacctccccctccccctctcagcagcgcatcaagaatgtggccaaccaggaaagtggggcagcatcactaatgtggactggaatccctgctccctgcaacgtaccacctcctgctttagaagtttggttatcagttctctaaagaccgggttgtgtgtgctttttctccgataaaacgtgtccttcccgttctttggtcccaactccttccccacctcccgggccccacttacacactccagaagatacaaggcctcttccgggtgaaggcgctgccggccctgctctgagaagcccatggtctgccagaatttgccctgtgtggggcccagagcaagtgtcacaagggagggagggcagggagggcagggagggcggtccccggtccccgagcccgccgctcaccgcgggagacttcaactccacgaagccctcttctggcctccactcggcagccaccaagctgcccctggcgaggagtggggaggggtctgcgtcagtccattccggagaccccgcggcccgcctcgcccccgcttcccttacccctgggcccgcccctctcacaggcgctccacgcgctgctctgccagcagctgccagagctcttcccggcaccggcgcagccgctcggcctgagctgccgagccgtcgggcagaaagtccttggggccatgcgagcgctggggcagcttctgcgaccgcgagcgggcggcgaagagctcccgggcgctgggggagaaggggacgcggggtcagcgccgcgcatcgggggccgcctggccgggtcccgggcgccggtttccctacccgcgctggccccgcgcccccgacacccactccggccgggccgcgccgcacctgagcacgcgccccgcgggaacctccacggccgcgggctcgggctcgggctccatcccgccgccgcctgccgctgcgcgcgccgccacgccccgcccaccgccggagctccgcgctgccctagtgcccgccgatccgcaatgccgcggcagccccgccccctgcaccgccccagcccgctctgcgccctcctgattgtccccggtcctagcgcccgcccggaagcgcaccccgacgccgggtctgggagctcagcccgcaggttgctggagatgcagaaggcccctcttttgcccctagccctcctcggggcttctctccagtaaagcctgaggagccggcgtctggagtgcagtgcgaatggtcacacttgtgaccgcccctctgcagcctcgcgctgcttagtccccaccgcccgggctgggcaaggagggcagaagggctcagggaaggacgagcggagggtgtgcaaattccgactttgcaggccgaaggccacccgggaactgtcaggagcggtccggggaggttcgccattccttcggtgtcttccgtccggtccctacggctgggctccgaagccaggtttcgagggccgggggcgggaggcgctgtccggcccacgacggtgctgaagcgccacctccgcccggcacgagcgcctcctcgaggctggggtccccgcactggtgccgtccgctaggtggtgccattgcccggccggcggctgcgggtgggcgacgccggccgcagacggggggtactgcaagtggggtcccgcgtcttggttgccaacccccttcacattacgtcttctctcccaccagtcagacccggggtgtctagcccttgggtctaagtccagagccccaggtcacctctgcccccgcgccccccgcccctccgtttcacctgggcgcatgcgctgatccggtcagcgcccccggtccgggcgggcacgagttggggcgggatctggcgcggatgggggcggagccgccggtgctgactgacagcctgactgcgcggccgggacggtccctccgttcccgatccggcgggagggaggggggaggggcgggatttcctgcgggaggcgccgagccggccttggaaaaggagaaggagaaaggggggcaggggggagtgggagccaccgtcctgagtgccagggaccgagcagggccagccggaccccggcgggcggccgggagaggtgaggctgcggggcccgcgctgggggtcagcgcccctgggggcgggcgcaaac

SEQ ID NO: 18990 - DNA, 2300 bp, Homo sapien
gatggaaaagaaaggttggggagaagagttcatgtcataacgtttctcattgtattgtcaggctgttggagaagtctgggggcttggaaatcatctttgatgtttaccaggccgacgctgtggccacattccgaaagaataaccctggcaaaccctatgcccggatgtgcattagtgggtacgcagtgagccagcactgcccctcccccagctgctgccagttctcctgtgaaccaagtgggactcctctgtactcccctggccagcgtgccaatctctgagaggaacaggaggtccagagaggctaagtgacctacacaaggccacacagccagtttgtgctgccctactctgagctcctcgttgctggcattttagggtagtctttctccaatgccattttagtctaggactcacccagcagaagggatgtggattgtggggatttacaggctaagagtggtgagcaccttgctcttcctagcacctccccaaccagtgctctggggcgctcttcatcagagccctgtgttttggagacagaactcatgggtcagaattcttgcaccccaactccttccgtagaatctcttctctgggagccctagagcttaggagtgggctatggctgggtctcactctaaccctttgtccctgcagatttgatgagcctgtcccagacctctgcagcctcaagcggttgtcttaccagagtggggatgtccctctgatctttgccctggtggatcatggtgacatctccttctacagcttcagggacttcacgttgccccaggatgtggggcactgacctcacagctctgcagaggatggagcttgctccgggggaccgggactgtctgttctcagggaccatctcggctgcctcctgtacccagactctaacctgtagcttcagaggccagtctgggccttggccctgggtgtctgatactcacagagtgaaactgtgaccctctcccttccctgctgccttgcagtgacccctctggaactcaggactcgattttaaggacccaggaggtggggcagaagagaggactgtgtgcctttaacgagagggtgcctgcttcgtgctataaagccaaagccattaaaaatagatttcttttctgctgtttctgtatgtactgggtaaacccctctcgcccccgtcccgttgtcagtggaactgcccccagcccctcacccctgctttgcccactcaaggagatccgcttcctctggtgcgggatctaagagtgagagaagcccgcgggatagcaggaacgcgacctcgaaccttttgagcctttcccgggcctgcgtcggaggggatgggacgtcgcaggcttcccgaagggaggagggaggacggcgcgccatcggcccttccctgggcgcagcggggtgcgggtggcgagaggcgccacctgcagctgggcggtggagcgcgctgcagccccggcctccgcgccctttccgctcccgcctctcgtcgctccaacctcctccctcgcttgtgctaaaaattccacccgctgttgcagaccctccggccgacacggaggaggtgggcgcccccccgcacccccccccgaggaaaggcgtctcgccgcgacgccccggtccctacaccatccctctcgtggggctggaaacccggccctgcgtcccccggtcaccctctctgggctgggctctggcagaggagctggcccggatccgcccctccctcggcagctcccgggagttggagggacggctcccctggagtctgggaggcggcccgggaccgcaggcgttccgggaactatttccgcttgcgggaggcggcgggacactgggcgcggcgcgccgttctgcgtccaggtgcgcgcaggtgaggccggggcgggcctgcggaaccccgaggccgttcgcgaggccccgccccgcgcttcccggggccgcggattggcaggagcgcagcccccacccccgagggtgcccccgcccctgcggcgccgagctggggggcgggccgggggcggggcgctgggccccggcaggctcgccctttatgtaaatagcgcggctccgccccaggctcgccgcgccggaggtgagcaggaaggagacggccgcccagcagcccgtgggcaggcgcggcggagcgagcggggccggcggcgggcgccgagggacgccgaggcctcgggcgggggctggcccggggttccaggtgagatgcgtgccggactcgcccagccgggcccgccccctcggggcttccacctggggcggggaggccagggagg

SEQ ID NO: 18991 - DNA, 2300 bp, Homo sapien
cccataaggcccccatgccactgaggagggctgggtccgtcacccagggtgcacgtggtggaggcaccgagtcagttcctggaaagcattgagaggctggtatggtgtcggggaagatcagctcgcaggggtggccatgaggccaagggcagagtcacaaagggacagggggtggggcctggtaaatatgggttaggctccaacactcaggtgtctgggaggaaccggaaaggtaccgaagccctgcttcctgctgggtcgtctggtgctgcagctgcagcagccatggtggcgcgaaggggacaggtctgcaggcccaccccacgtgcttctcgttgcagacggtggagcatggcttcccgcaccagcccagcgccctcggctacagcccgtccctgcgcatcctggccatcggcacccgttctggagccatcaagctgtatcctccgtcccctcgctcccactcgggcagggccttggggtgggtgagatttggggagggacatcttttccttccttgcccgtgggctgttgggataaaatgagggactttcctgatttccagttttggacatgattttattccaaaatggggcaggtatggttgatggtggagcaggcacctgggcatgagtgcatccctggtgggatgcgaccctgtcctttgcaggaggacagtgaggtttgaaatggactgaggagatacaggcttattttgtctcctgtgtcctttcaggacccttcatgtggtctgctccctttactcagtttcccctctcacctattcctggaggtttcaggaatcccccagtcccgggcagggggtgaggctgctggggggctcagagacctgttttgcaggggttgtattggtggatccagagggaaggacctgacgcccatgtctcagccagtgatcattcagtgagtggctggctggtgcgccagtagcaaggcctaggcccttctgtgcccctgcctccctcagctccccacctcaccaccagaaaagcaagttacagggacccctcttgtcgctagggatgtttttaatttaaaaaaatttttttcggcactttgggaggctgaggcgggcagatcacttgaggtcaggagttcaaggccagcctggtcaatgtggtaaaaccctgtctctactaaaaatattttaaaagttatcagggcgtggtggcacatgcctgtaatcccagctacttgggaggctgagatgggagaatcgtttgaacctgggaggcagaggttgcagtgagccaagattgtgccactgcactccagcctgggcaacagagtgagactctgtctcaaaaactttttttttttttttttttttttttgtggagacagggtcttgtgatcttgcccagcctggtcttgaactcctgggctcaagcaactctctcgccttggcctctcaaaatgctagggttacaggcatgagtcactgcactcccagcctgcagttttgttttttaacctatctcgataagaatcagaggtggactggccccagggccctatccacaagcagagatggggtggccttgggccaggagagcagggctcggcagctgtcttccaaattccacccccactcccacaggcggcagagagtggagagggctctgcctggcagggacagtccttccccggcctgaggctggatgttgtccagttgggtcatcttttatccagagcactggttctggccgactgggggctcccagtgttttcagagatgaaaaaccggatcaggttgggcaccccgccagtctgatctgtgctcccctcagggcagggcccaagggagttgagagatgagggaccacctccaatagcttggctgccacctccagcggagcctgacctccctcttcccctctgcccggtgtgggggaggggtatggagcactcgagttccaggctgggctggtgtacacagggggccagggccttgctgcgggctcagccttccctcggctggttaatcattgccaggccacagccagactctagttaccaatccctggtgccaagactaatgggccaaggctgttggtgataggccccctggggtgccgtgtgttttttcacaggtgctaccaagcgacagccaacatgtcttttgcagctcaggatcagggtggcagcctgacagttgccagggtagggcttcgcctttctatggagttgctcccaccggcctgactgggaaaaatctcccagggatcaggtcactggcctggtgccccagggccagggctgctgtgtctcctccccac

SEQ ID NO: 18992 - DNA, 2300 bp, Homo sapien
gcatgactgggctgggaggattcccacttggagctgtgtccctctgagtgcagacctctgcctttcccgttcagcagggtagggctggggcagtgtgtccaaggtcagagcagaacactttgcaggatgacaggtaccacagtgggacacagcctgtgggcaggacggcatgggacctgcgccccagcaggtggccacaccagtgcccagcctcaccctgtagttagctggcgggaatctagtcggcgggggggcccaagtgccctgagagcccctcctgccagtttatttatattatattatattatattttatttcatttttgagatggagtttcactcttgttccccaggctagagtgcaatggcacgatcttggctcactgcaacctctgcttcctgggttcaagctattctcctgcctcagcctcccgagtagctgggattacaggcatgcgctaccacacccagctaattttgtatttttagtagagacagggtttctccatggtggtcaaactagtctcgaactcccgacctcaggtgattgacccgcctcagcctcccagagtgctgggattacaggcatgagccacagcgcctggcccagtttgtttatttattaaaaaaaaaaaaaaaaaaaaaaaaaaaaaacaaagaaaaaacattttttttgagagagtcttactctgtcccaggccgaagtgcagtggcaagatctcagctcactgcaacctctgcttcctgggttcaagtgattctcctgcctcagccttccgagtagctgggattacaggtgcacgccatcacacccggcttatttttgtatttttagtagagacggggtttcaccatgttggccaggctggtcttgaactcctgacctcaggtgatccacccacctcggtctcccaaagtgctgggattacaggtgtgagccaccaggcccagccccttttggcagtttaaattctcgtcctcttgatgacacttatctaagtttttaaaacgtgcaaccctttagtctcataactgtctctgagaagtctctgtcctaaagatataggataagaatgatcattgtagggctgtttttaatggcaaaaagttggaagccctctaattgtctaacaattttcatctgtgtaaggacattatttgcatttattaagaatatctagatggacacagttgctcacactttgggaggctgaggtaggaggattgcttgaggccaggaatttgagactagcctgggcaacatagcaagaccctgtctctcctcacaaaaaataaaaattagttgggcaaggcggcacacgtctgcagtctcagctacttgggaggtgggaggatcacttgagcccaggagttggaggctgcagtgagccatgatcaggtcactaccctccagcctgggtgacagaatgagatcctgtctctaaaaagattaaaaattaggccgggcgcggtggctcacgcctgtgatcccagcactttgggaggcggaggcgggtggatcacctgagatcaggagttcgagaccagcttgggcaacatggcgaaaccccgtctctactaaaagtataaaaaattagcctggcatggttgtgggtgcctgtaatccctgatactcgggaggctgagcagggagaattgcttgaaccccggaggtggaggttgtggtgagccgaggtcacaccactgcactccagcctgggcaacagagcgagactcccatctcaaaaaaaaaaaattaaatattgaatattaaagtccccttcaactctcactcttgattcaaattctaatgtcagtgaggtcagtgctagcagtagatgtgccagatatagataatgtggagagcttgggtttagtgtggcttgggtccaggctgggtccacttcccacatccttgctgttggctgttggtcctgtgcctgctgccttgtggtttttttgttggctgcaacacctccagccctcacggcagcattccaggcctggagacggggcaggggtcaaggctccagggccaggccaactcacacagagttttgttttatggggctaaaaaacttctttattattaaacactcccttttgcaaaaatgcactgaatatgaatgtacagtttaacagattcttgtagagcatccttgcagccttcctgccgggcatagaaatagaactttgatgccctccggaggtcttatgcacccttcctagtcaaggctccctcttgcccccacattgacttttccagaagtcactgccttgccttgccttataattgtaccg

SEQ ID NO: 18993 - DNA, 2300 bp, Homo sapien
ctcacggcactcccctcgcccaggttgccagaggaggcccgccaccggcgtgtgttcgagatggtggaggcactgcaggagcaccctcgagaccccaaccagatcctgatcggctacagccgaggcctcgttgtcatctgggacctacagggcagccgcgtgctctaccacttcctcagcagccaggtaggcagtgcccaggacatggcaggcgccatgttgctctcccagggccccaagtggcacatacacactgtgcagaggcatggggtgcaggcgatgggaacgccgcctcggtccagcgtgctgccctctgtccctctcctcttcctccatagcaactggagaacatctggtggcagcgggacggccgcctgctcgtcagctgtcactctgacggcagctactgccagtggcccgtgtccagcgaagcccagcaaccagagcccctccgcagcctcgtgccttacggtcagtgtttcacccgccgggcagggcccacccccagtgcctcctggattcaggtgcaggttgctcaattctgaagcaaactccagggccagagagggtaaaggctttgtccaaagccacacagcagggttcgcctcacccagtttcttggggaacttctcggagcaagattcccaagcacaggtctaccatgtggatgtggcatgagctagagggatctgtgcctgtggggactgacacttgtctgagagtttgaggatccgttcaagccgattcctttcctttcaggtccctttccttgcaaagcgattaccagaatcctctggctgaccactaggcaggggtaggtatccatgctggtcctctttcctctccagagccttcctggagggctagaaaggtcacttaggcctctgcctgggaagttggtgccagtgaacactctcaggtcccgtgttggggtcttggacaccagggaggggagacagggtagacgctattcacgtctctcagcggcccaattcctgccaagttcattcttgctcctttcttccaccttcccagagagacggtactgagcagcaggtcttaaactcctttagttggcagccctgtttcttcagacaaaatcactctgggtgatgttcaaacagaattggtgggggcacccagcatgaggcaggagtggctgctgagactcagagcccccagcctggatgccctcaccttacctccaagtcctcctgggctgtagcagttggaaggagatggggtccagtctcccctgctcctggggaccttgactgagtggtgactttgattgccggcctgtggctgttgaggctgtgccaggagccccagcccactgccgctcctctgtgcctgccaggttgcccttcaccatcttccagggtggcatgccacgggccagctacggggaccgccactgcatctcagtgatccacgatggccagcagacggccttcgacttcacctcccgtgtcatcggcttcactgtcctcacagaggcagaccctgcagccagtaggagagcttcgggagtgggtgcccagggttaggtgtgggaggcatggggcaggaccatcagtaaagacagggccaggtgcagtggctcctgcctgtaaccccagtgctgtgggaggccaaggtggtaggatcgcttgaacccaggagttcaagtccagcctggacaacgtagggagacccttgtctctacaaaaaataaaaaaattagccaggtgttgtggcacgtacctgtagtcctagctactcaggaggctgaggtgggaggatcacttgagcctgggaggtggaggttgcagcgaaccaggatcatgctactgtactcagcctgggtgacatagccagactgtgtctcaaaaaaaaaaaaaaaaagggctctgcacagatgttcctaagcctaccactgtcctgagtcccttagcctcactgcaccccaaggtgcagtgtcatcaagccctacagctcctttctctgcctccctgccaccctccccagctagagacccagcccagccacacctcctgtctgccccgggctctctgccctttccagactgtaatgggacttagcccacagggggctgatctgtactgttggatttaacacccaccccgctgaggcaagagggtcctggcttagagatggcaaagcccgccttctgggcagggcagaaggtggctgtgcagcctcctggagctccagcaggaccggcagagccctgagtcagcctcgtaaattgtgtgacaggcaagaccagaaagggctgatgttgaaacctggagagg

SEQ ID NO: 18994 - DNA, 2300 bp, Homo sapien
gctgtgccgggttgtgacccagctgtccttggtaggctctcctgtttaatgagcaactgctatatgccaggccctgttctagaaacagatgaggcccctgttcccatggaacttagatctgagtatgtggacagagtgagtaggttgccagataatgtcagaggtaagaaaaaagccaggcagaggacagcagtgctggtttagacaagggttggcaaggcctccctgataaggggacgtatttgcgcagacacggaagcagtctgatggaaggcttgccctgtagggacctggggtgcagactgagctgggagggctcttggcttgctccaatgaggtaggggcgaagagagggcagaatggcccccgtgctggtccagatgtggccagcgccagatcgtatagagccgtggaggcacggtaaggacttggggtttgagggagatgagggccctgagcaggggtgccatgatctagcctctgctccagaaggatctgtctggctgccatgtgggggacacggagtggagcaaagacgggagcccagtgagagtcgagggagaggtgacctcagcttgggctgcggtgcaggccatgggactggcaggaggtggctggggttacgctgtcttttctaacattcagcattggctcaggggccaggtcagggctcacagactgttgctataaagggctgggtggctttcttccccacagctactcagcctaatgccattgcagagcacatgtagccatggacaacacaaggggcgtatccgtgttccaggacagccatattgacaggaataggcaggaggccagatttggtcctcaggctgtaatttcttggccccttgtctagggagaggtaaacgaggggaggagagatcagtcaaggatgacgtgagggtttgctgggagcaccaggaatcctggagaaggtagtggcaagagggtgcagcaagctcagctgggcggggatcaagtctgaggacttaatgtctcctctgatctccagacccataagggagatgctgagtagacaactggggcttatgggtctggagttcagaggagagatcgggaaggtgtccatttggagtcatccacgcagagatgtgtgaaggctgctcaatgattttgaggtttaaagaaaaaaagagatgtgaaaccaggggccctgatgaggctgcccaggtggtaaggaagacagaagagaagccatgggacagctgagcccgggcaccctcaagccttggaggcatgaagtttggtggggatctggcaaagaacacctgggagcagccagcgggcagcagaccccagagtagcagggaagacaagcacttcaaagaggcagcgtcagccaggggcagtggctcagctgtaatcctagcactttgggaggccaaggatggcagatcacctgaggttaggggttcgagactagcctggccaacatggtgaaaccctgtctctactaaaaataaaaaattagccaggcattggtggtatgtgcctgtaatcccagctactcgagaggctgaggcaggagaatctcttgaacccgggaggcagaggttgcagtgagccgagatcatgccattgcactccagcctgggcaacaagagcgaaactccgtctcaaaaaataaaaaagaaaaacaaaaattagccaggcgtggtggtgagtgcctgtaatcccagctacttgggaagctgaggcaggagaatcgcttgaacccgggaggcggaggttgcagtgagctgagatcgcaccactacactccagcctgggtgacagagcaagactccatctcaaaaaaaaaagagaaaaaaaagactgggcacagtggctcatgcctgtaatcccagcattttgggaggccaaggtgggaagatcacttgagcccaggagttcaacaccagcctgagcaacatggcgaaaccctgtctctaccaaaaatacaaaagttagctgggtatcgtggctcacacctgtaatcccagctacttgggagcctgaggcaggaggatcgcttgaacctggaggtggaggttgcaatgagccgagatcacaccactgtactccagcctgggcgacagagtgtgaaaccctgtctcgagaaaagaaaaaaaaaaaaaaagacaaatggtttaatcatccagcgcacatttattgagcactagctgggtccaggcctgagtgaggtgatgtgattgtgtgcagtaaagaaaatgccacccctagcaactggtgtgctgaagaccacgcgtgctgctgcctgtggggagaggctt

SEQ ID NO: 18995 - DNA, 2300 bp, Homo sapien
tctactaaaaatataaaaattagccaggcatttgtggctcgtgcctgtaatcccagctactggaaggccgagacaagagaatcacttgaacctgggaggcagaggttgcagtgagccgagattgtgccactgcgctccagcctgggcaacagagcaagacttgtctcaaaaaaaaaaaaaaaaaatgcaggagagctggggttggacagaggcctttgtccttccttgagccttgggcccagctcctttgctgtccccactagtagcatcctgcggccctgccgtccctttgctgagggcttgctgagccacctgccaccctgcgcaggtgctggtactggaactgaatgacgaggcagcggagcaggctgtggagcaggtggaggccgacctgctgcaggaccaagagggctaccgctggaaggggcacgagcgcctggcagcccgctcagggcccgtgcgctttgagcctggctttcagcccttcgtgttggtgcagtgtcagcccccggctgtggtcacctccttggccctgcactctgagtggcggctcgtggccttcggcaccagccatggctttggcctctttgaccaccagcagcggcggcaggtctttgttaagtgagcaggggcggctgggtcccggggctgggagtggggcccgcgaggactcccaggacctagcagcactgacagcctgccatccccccaaggtgcacactgcaccccagtgaccagctggccttggagggcccactctcccgcgtcaagtccctcaagaagtccttgcgtcagtcattccgccggatgcgtcggagccgggtgtccagccggaagcggcacccggctggccccccaggagaggtgaggcctgaggtgaggctgcggccggccacgcacccaggttcggctcagagcagccagcaggggggccacacggcccctgctccccaggcttgctaggctacaaacaagattcagggtccaggtcgcattgtgtgacctcagacaggtcacgctgcttctctctgcctcagcttcctgagcagaaaggcagtaactgtaatgcttatcctagaagtaatccccagtaaacgttagtgatttcctttttctctctacaacatgctgggggcccaggcaggctcccccaagggcacctccctcttggacaagggtccctctagacgcaggcctggcaggtggctggcatggctgtggcctgccttccgatgcaaggatcagcactgagcgaagcactgttcctggggaggggagtccagagctgacccttaggctggcccaccccttgcaggcacaggaggggagtgccaaggctgagcggccaggcctccagaacatggagctggcgcctgtgcagcgcaagatcgaggctcgctcggcagaggactccttcacaggcttcgtccggaccctgtactttgctgacacctacctgaaggacagtgagtggccagcctggggttggggggcagggggtagtgggcagcagacaccccctgacctgggggcatgccgggggctgctgcctgcctggctggtaggagctaagaggtttccccttgtgagcaggggcagactgcagcccctgcctgcttactcccctcccctgcctcagcctctgagtcagcttcccttggctttatatccaggccgtagcaccctttagaagcatggcctcagacccatcacttagcctttcagggcctcagcttgcttctctgtaaatgaggaagtgacagcttcctcctagagcagctgtgacgatcggggacagcagagcctgctggtctccagatgacgtgtctctccctggctggttctcccctgctgtatcacagcaagggctgagctgacctgggattggggtcttctatgttggggcctgtgtggttgtcagagagccttccagcctctcccaggagggaaaacctgggagtaaaccctggttgcccagctccacccgactcccacgctaagggtcagacacccaaacatggcttctcggcaggctcccggcactgcccctcgctgtgggctggcaccaatgggggcaccatctatgccttctccctgcgtgtgcctcccgccgagcggagaatggatgagcctgtgcgggcagagcagggtgagtgctgggcagggagagcagagggtgctcgggctgcctgggctgggtccagggagtggctccagccctgccaccccctcaccagccccaacacccacctcctccccctagccaaggagatccagctgatgcaccgggcgccggtggt

SEQ ID NO: 18996 - DNA, 2300 bp, Homo sapien
agctgcttgagataatgggagtgctagaagcaaggagccagcaagtctagcagacatgcaagtcctgcctgagcttctctcccaacactcagcttttctcccaacaattctcttctagctatttggaaatgtacaatcaattaatgttatctatagtcatcccactgatctattgaacactagatcttatttcctcaaagtggcactgaaattttgtcatgtttcagagtgttggaaaagaatggtggtctcccattattggtggcaatataaatcggcacaacctttgtggagaaaaatttggaaatctcaaaattacaaatgcaagtgccctatggtgcagcgattctacttatagttgattctatgcagatgctggtgaaattgtattccagtattggctgtaacttaagcaaaagatgagaggaaggaaggatccacctttttttttttttttttttttttaagagagtgagtcttgctctgtcacctaggctggagtagggtggaacaatctcagctcactgcaatctccgcctcctgggttcaagcgattctcttgcctcagcctcccgagtagctggggttacaggcatgtgccaccacacctaggtaatttttgtatttttagtagagatggggtttcaccatgttggccaggcagatctcgaactcctgacatcaggtgatccacccacttcggcctcccaaaatgctgggattacaggcatgagccacctcacttggccaggatccactttggatgtagaaacccatcaataaggaattggttcaaccatggtgcatttatttgcaaggaagagagggaggagagaagggaggaaggcaggctggctttttatggtattattatgaaatcaccagattacattgttaagtgaaaaaggcaaagtggagaccccggagctacataagctaccacttgtgctaaaggggaaaaatataatatttgcttttctctgcatggaaagtttttgttgttgtttctttgtttttgagacaaacaaaatgctgtcacccaggctggagtgcagtggtgtgatctcagctcactgcaagctctgcctcctgggttcatgccattctctcctgcctcctgggttcatgccattctcttgcctcagcctcccgagtagctgggactacaggcgccccccaccacgaccggctaatttatcgtattttttagtagagacgggggtttcaccatgttagccaggatggtctccatctcctgacctcgtgatccgccctccttggcctcccagagtgctgggattacaggcgtgagccaccgcgcccggccaacctggaaaattttgcaaggaaatacagaaatgggtaacctcaggggaacactgagtacataggctgagggtcaggaatgggagacttttatcttgtaatgtttggatgtttgaattatgtgaatgtattacctgttttaaaaatagatattttaaaaacacacacattggggcaatcaggaatgtatggggtgtggttctgttccacaactccaaggaggtagacaggcatgttttacaccagttcaagatgtacatttatgttttatgtacttttcggtaaattgtatttattccacaattgaaaagaacaaaaaccctagcgactcatggagtgctgccgtgtgccagggtgggcctggccccagtcccttggaaccctcagaaggaagaagtccagacaggttctctgggcccttccttgctgggcaagcactgaggtgggagtggagcatggaccccctcagtctggcgcggtgcgaggctggcctggctggcagcgcctcccggcggcactgttgccctgtccgcagctgtagcgtctcctgtttcctgggcgcctctattccattgttggccgagggggtcaggacccgccgccttctgcattattgatggtcctgtaaggcgggcacctcggggagtagagcctgtagcccctgcgagagcagagccgggtggtgcactgcacagaaggtcaccgcgggaggccaaatccccggggaggggaaaggacctgggcgtcgggaagcccgtctcctttgggccagccatgggcaggaaccagcgcaaagcgccccagcgcctggagaggcccgggaggccggcctcaggggagcaggagtcggggtcggccagcgcggatggcgcgcccagccgggaacgccgttccgaccgcgggcaggcggacagggcgaaaccggcggccgagcctgccaccgccgggggccagggaacccctggtggccgcag

SEQ ID NO: 18997 - DNA, 2300 bp, Homo sapien
ttttatcttgtaatgtttggatgtttgaattatgtgaatgtattacctgttttaaaaatagatattttaaaaacacacacattggggcaatcaggaatgtatggggtgtggttctgttccacaactccaaggaggtagacaggcatgttttacaccagttcaagatgtacatttatgttttatgtacttttcggtaaattgtatttattccacaattgaaaagaacaaaaaccctagcgactcatggagtgctgccgtgtgccagggtgggcctggccccagtcccttggaaccctcagaaggaagaagtccagacaggttctctgggcccttccttgctgggcaagcactgaggtgggagtggagcatggaccccctcagtctggcgcggtgcgaggctggcctggctggcagcgcctcccggcggcactgttgccctgtccgcagctgtagcgtctcctgtttcctgggcgcctctattccattgttggccgagggggtcaggacccgccgccttctgcattattgatggtcctgtaaggcgggcacctcggggagtagagcctgtagcccctgcgagagcagagccgggtggtgcactgcacagaaggtcaccgcgggaggccaaatccccggggaggggaaaggacctgggcgtcgggaagcccgtctcctttgggccagccatgggcaggaaccagcgcaaagcgccccagcgcctggagaggcccgggaggccggcctcaggggagcaggagtcggggtcggccagcgcggatggcgcgcccagccgggaacgccgttccgaccgcgggcaggcggacagggcgaaaccggcggccgagcctgccaccgccgggggccagggaacccctggtggccgcaggaagcccactgcagaggggaacggcggctgcagacgcccaggggctgggctgtccccgaaagcccaggagaggcaaagcaacgcgcagcgtcagggacgcgggcccaggggcggccgcggggggcgcctggaggagggaagcctctccggaggagaagagctgggcggccgccgtaggaggaagcggaaagataaggggccctcggctcggcggggccgccggacgcccaggagcctcaatggggacacgtcgggtggggacggaggcagctcctgtccggacagcgaaacccgcgaggcccaggagagcggcagccagcgcggcacagcccgggagctgcggcccacgccggagcctacggacatgggctcggaagggacaaaaaccgggccggagtcagcgctggagccaagcagcgacggcctggacagcgactggccccacgcagatacccggggccgggaagggtcgtcggggacggggcccctgggagccagcgagcattccggcggggactccgactcgagtccgctggggaccggacctggacggggctctcgggcagctatggcctccaggaccttcgaggacagctcgcgggctcctcgggacactgggccggccaaggacgcgagcgacaaccgggcgcagcggggcgccgagccagaaacaatgcaggcctcgacggcccgggctccgcgccaccaggtcggaaaggcggtggggcaggtgccagcggcggcaggcgagggcgaagcgggagccgcagcaggagcggggccggaggacccagccccgctggcggccctcctggtggtccgcaggctcctcgcgaggcccccgccaggcgccgcttcccaggccgtgggcccccgccgcgctggcctcaaggagcggctcctgagtgtagcgcgagccctgggcctcctgcgctggctgcggcggcggctgcggctgcggcggcggccgccagagggcgaggggcagggtaccgggccacgggcgagcgaggggtggggccgccggaaaccggacgaggggcggggtcatgggagaggaagcaaggggcggggccgcgggaaagcggatgaagggcggggccacgagcgaggggacgagggtcggggccgcgggaaagcggacgaagggcggggccacgagcgagggtacgaggggcggggctgcgggaaagcggacgaggggcggggtcacgagagaggtgacgagggccgggaccaccagagagggtacgaggggtggggccgtgagcccgggctgcggcaccgtctagcgttgcgcctggctggcttagcagggctggggggtatgccgagggcttcccctggtggccgctccccgcaggtcccgacaagcccagtccccggcgacccttttgatcaggaggacgagact

SEQ ID NO: 18998 - DNA, 2300 bp, Homo sapien
tccccttttctctggggacagagggctccctggcacccctggagattctccttcctcttcctccccgggctaggcggtgaaccctctctggagccctgcagagtgggactgaggggctgggctctgtttgcattccccctgctccctccacactctgatgagagcttgttttcctccccagacctttggggggcctgtcttgcttgttctgaacccccaccggtccttgcctcttttttcacctgaggtccaggcaagctaccaccccaggaaggccctcagcaccactccgtatgtgactctgccccactgaccctctgctcacctcccaggcagcccagtccctgcatgtccccttgactgaggtcccggggcctgtgagcacctctgctacacctcggagggtcccaggtccccatgtctggcaaccttctcatctccctcagacacatctttgccatcgtggcatcagcctatgacctggctcagaatactgggcaggacccatgcatcctcctgtggtgagtggtggccttcctgggtggctgaacccatgggccacactgagggttgatggggcggggcctgaggtcttcactggaagccactggtatgctccactgctgggctacagttctggactcctcagggccgagctcctggctgaaatcatcacatgagcccctggaatgtggcatcttggggactttttcttttctgtcgggtctctccatgccctgggactatctttccacatttatgggggtctctccaggctagctgtcacttctgggtggcacatcccacttcctgggttcactggggtggtcctatgtgcccctccctggagaccctaccaaccaacacatccttagctcctcccactgcagtgggcacagtggctcagggaagacggaagccgccaaaaagatcatgcagttcctaagcagcctggagcaggatcagacggggaaccgagagtgtcaggtgagggccaggctggaggtacctcatgggttgagctggccgtctgtcttcctccaggggacagctgaccatgtccaagggactatctttctcctttcagccaggagaggggtggtctccaggcctctggcgtctcctggggtcagctgcaggcactgccctttctgatgggactgacgcctccctggacctgcccctagctgggatgcctgctggtgggggctactgctgcccagggatgcttgaacacccctccctgtacaggtggaggatatgctgcctatactcagcagctttggccatgccaagaccatcctcaatgccaatgccagccgcttcggccaggtcttctgcctctacctacagcagtgagtggcagggttgcagggggcacctacaatcacttacccttcctgggtccttgggctgcttccctggggtccagaccctggtagggcttcttctgcacggggcccctgggtgttctgcatcctgggcactcacacccatcttctgtgcccacagaggggtcatcgtgggagcctctgtgtctcattatctacttgagacctccagggtggtgtttcaggtaaaggcagcccttctatccacccctgcccagttcccagagtaggaagggcagagggtgtcactgtcggggtgtggcctctaagcccctagggcactgagcccctaagccagtcctgtccccaaggcccaggctgagcggagcttccatgttttttacaagctgctggcagggctggactccatagagcgggagcggctctccctgcagggaccggagacttactactacctcaaccaggtcgggggagcccttgtggtgcggcggggaggcctgcccagaggaggatctcggcccggaggtctgaggagtagccggagtagagggaggctatggggtggcaggccccgctccctcacccctgctgtgctctgcagggccaggcctgcaggctgcaaggcaaggaggatgcccaggactttgaggggctgctgaaggcactgcaggggctcggcttgtgcccagaggagttgaatgccgtctgggctgtgctggccgccatcctgcagctgggcaacatctgcttctcctcctcagaggtgggcttccccgtgggcaggggccatctggggtgctgggtctgtagaatcagggcagtggtaatgacgccaaatgctggtgtgtaggagactacagagtgctgggctgccctgaaaagtgggtagatccccactgtgtagatgagaaagctgagacatagagcttctccactctcccaatgtct

SEQ ID NO: 18999 - DNA, 2300 bp, Homo sapien
tgcaaactccgcctctcgggttcacgccattctcctgcctcagcctcccgagtagctgggaccgcaggtgcccgccaccatgcccggctaattttttgtattttttagtaaagacggggtttcaccatgttagccaggatggtctcgatctcctgacctcgtgatccacctgcttcggcctcccaaagtgctgggattacaggcgtgagccaccgcgtccggcctaagagtgatctttgaaagacctgtttaaaagcacatgtgattgtgggaccattctcccaggaatgattgctaaatctgtactaaagtgccccatccccatttctttttttttttttgtttaagtacttacttattttagaaatggggtctcactctctcacgcaggctggagtgcagtgacaccatcatagcttactgcagcctcaagctcccagtctcaatcagtccttccacccagctaatgttacttttttcttttctttttttttttttttgagacggagtttggttcttgttgcccaggctggagtgcaatggtgcggtctcggctcactgcaacctccacctcccaggttcaaatgattctcctgcttcagcttcctgagtagctgggattacaggcatgagtcaccatgcccagctaatttttttgtatttttagtagagacagggtttcactatgttggccaggctggtcttgaactcctgacctcaggtgatccacctgccttggcctcaaagcgctgcggttacaggcatgagccactgcgcctagccccacccagctaatttttaatttttttttttttttttgagatggagtctcgcactgtcacccaggctgtagtgcaatggtgccatcgtggctcactgcaacctccgcctcctgggttcaagtgattctcctgcctcagcctcctgagtagctgagattacaggcacctgccaccacgcccagctaattttttgtatttttagtagagttgggatttcactatgttggccaggctggtctcgaactcctgaccttgtgatctgcctgtctcggcctcccaaagtgctgagattacatgcgtgagccaccgcgcccagcccaatttttaaattttttgtagagatgggatctcactaggttgcccaggctgatctcgaactcctatcctcaaacgatccgaccacctcggcctcccaaagcgcttgttttggggaacaaagccaaacctacccttatagtcagtgtaggcagtactcgtgctcaccgggagagggcgccatccagaaggacagcctgtgcagaggcgtgaagggagctcatggctcctctcctaggccacggaccacaccttcctccagaagagccactatcaccatggtgaccaccccagctatgccaagccccggctgcccctgcccgtgttcaccgtgcgacattatgcagggactgtcacctaccaggtacctggcctcagggacagaccagggtgaatcagcgagggcagtgtcccctcccaagctgagtcacccgacagcggagaggagtgggtgtggggaggccccttgcaaggcttggacacctgtccctacctgagccatgggccctgcccagttctgagcacggtttactgagttctaggtgacaattatggggtcagggagtggaagccttgggaccctccagacaagtgggcagagcacaagcatgggacctgatgaccttggcagtttacttcgccttctgagcctccgtttcctcacctgtaaaatgggtatggagacctaagctctggcgttgctgtgagggtgagatgtagtaacgtggagatggcctggcaggtgcctggcacatagtaggtgctcactgaatggacttcccttcccccttccgagttctatgcctaccaagaagctgcacgcgtgcctaccccaggaggagaggaactgggggtgggggagcgggggctggaataaagggaagggcagtagggagaatcagttctccctggaggagatggcacactttgcttggagaagaaaaactacaaactacccaggagttgcccccaaaaaagaaatacaaggagttcaagaaagctaggaaaatgtaaatcaaaatagatttaatatggagagacagacaacattcttgtctagtcaacctattgactagcataggttaaagccccagtggggagagtgtggtcttgctggggactggacctgtccatggggtggaatggaaagtccagtggcagacccaaggctaggtaaagggctggaaacaccaaggcagcctt

SEQ ID NO: 19000 - DNA, 2300 bp, Homo sapien
tccccgctgtcagctcttgccctccttcctccccagcctttggggctgtgagtagcgctgaattgctctgaaaataaccgttgaatgtaattgtctcaccatagagcgttactggagataacagttggtgttattgaatgggagacgttatttagatccacgatgccacacctttgttgtacctgcggtagtgccctgcttttgaagtcatgaccttaaagaatgtttattgacaagggaaattgtccagacttcagcagtaaatacaaatgcaggttcaaaactgcacatacaggttggacatggtggctcatgcttgtaatcccagcacttttgggaggccgaggtgggtggatcacctgaggtcaggagtttgagaccggcctggccaacatggtgaaaccccgtctctactaaaaatacaaaaattagccagacatgcgcctgtagtcccagctactcaggaggctgagacaggagaatcacttgaacctgggaggtggaggctgcagtgagctgagattgtgccactgcactccagcctgggcgacagacaagactctgcctcaaaaaaaaaaaaaaggcattaagatgcatttctgtccagcccctctgcctctcccgaggtgcctgctccggtggggctcccctgggctgtctgatagctggtgagcatggactgagccctctccttccttgcaggaaccgtccctgcccaggccagggcagccactggcgaagcccctaacccagctggatggagacaaccctcagcgtgccctggacatcaacaaagtggtgagtgacacattggagaagggacaggataggcgcctgggagccccgcacgtcctgtccttacccggctgtgtcggcagatgctgcggctcctgggggacggatccctggagtcctggcagaggcagatcatgggcgcatacctggtgcggcaggggcagtgccggccagggctgcggaatgagctctttagccagctggtggcccagctatggcagaacccagatgaacagcagagccagcgtggctgggccctcatggctgttttgctcagcgcctttcccccactgcctgtcctacagaagccactgctcaagtaaggggcctgggaggtggggacctggcaggtggggtcgctggatcaccctgcctccactgcagcctgtgcccgccctgcaggttcgtgtctgaccaggcccccaggggcatggcagcgctgtgccagcacaagctgctgggggccttggagcagtcgcagctggcctcgggggccactcgggcccaccccccgacccagctggagtggctggccggatggcggcggggccgcatggcgctggatgtgttcaccttcagcggtgagggctgcctctggctgaggcctcccaggcctgaagtggggccagccctacccctttgccctccctggaaccccttcctgccccagtcttcctgctgccctgtcctcagtgaccctgatccccctcccctctgtcctgcttttgaaactctcatggggacagcagccccttcctgtcagggtggactctgctgtccctcactcttgcccccgccccccatgcccctgcagaggagtgctactcggccgaggtggagtcttggaccaccggggagcagctggctgggtggatcctgcagagcaggtatggggaccggggatgggggacagtgtggccaaagtgacccttgtcctataccctcctccttctccaagcccagtctcaggggccgggaggagaggtgccccggggtgggcaggggccagactgcagatggcgatggggagccgggggcagattaggaatgaggggcttgggagctcccacggcagattctaactcagcaggtcagaaaagaaatgcccatgctggagcccttgtggaagtggagggccgtgaggtgaggaggggagcagcccccactgctgagcaaacctgggtcccggaccaggcggatccagggccaccctcccttcctcagccccctgcccccttggcccaccctgtggtccttgcccccttctggatggccgcctgcctcactgactggtcccctcccacccagaggcctggaggcgcctccccggggctggtctgtgtcactgcactccagggacgcatggcaggacttggctggctgcgactttgtgctggacctgatcagccagactgaggacctgggggacccagctcgcccccgcagctaccccatcactcctcttggctcgtaggtgccacccagcacccctctccctggcctgc

SEQ ID NO: 19001 - DNA, 2300 bp, Homo sapien
ggctgggccctcatggctgttttgctcagcgcctttcccccactgcctgtcctacagaagccactgctcaagtaaggggcctgggaggtggggacctggcaggtggggtcgctggatcaccctgcctccactgcagcctgtgcccgccctgcaggttcgtgtctgaccaggcccccaggggcatggcagcgctgtgccagcacaagctgctgggggccttggagcagtcgcagctggcctcgggggccactcgggcccaccccccgacccagctggagtggctggccggatggcggcggggccgcatggcgctggatgtgttcaccttcagcggtgagggctgcctctggctgaggcctcccaggcctgaagtggggccagccctacccctttgccctccctggaaccccttcctgccccagtcttcctgctgccctgtcctcagtgaccctgatccccctcccctctgtcctgcttttgaaactctcatggggacagcagccccttcctgtcagggtggactctgctgtccctcactcttgcccccgccccccatgcccctgcagaggagtgctactcggccgaggtggagtcttggaccaccggggagcagctggctgggtggatcctgcagagcaggtatggggaccggggatgggggacagtgtggccaaagtgacccttgtcctataccctcctccttctccaagcccagtctcaggggccgggaggagaggtgccccggggtgggcaggggccagactgcagatggcgatggggagccgggggcagattaggaatgaggggcttgggagctcccacggcagattctaactcagcaggtcagaaaagaaatgcccatgctggagcccttgtggaagtggagggccgtgaggtgaggaggggagcagcccccactgctgagcaaacctgggtcccggaccaggcggatccagggccaccctcccttcctcagccccctgcccccttggcccaccctgtggtccttgcccccttctggatggccgcctgcctcactgactggtcccctcccacccagaggcctggaggcgcctccccggggctggtctgtgtcactgcactccagggacgcatggcaggacttggctggctgcgactttgtgctggacctgatcagccagactgaggacctgggggacccagctcgcccccgcagctaccccatcactcctcttggctcgtaggtgccacccagcacccctctccctggcctgctcctgccggggaaccccacagccaccctgccacactcaggggtttataggagctgccacaggcccagccctcccacccagcctcctcccaaccatggggtgacccccgcagcagcttctacctcttgccccagcctgggtgaccctcagccttggccacccccttagctggatcccgtttcctgcagagccgaggccattccccttgcccctggcattcaggccccctcactgcccccaggaccccctccaggtccagccccaacgctgcccagcagggaccacacaggtaaggctggagtgggcacatggaggttggcagagcatgggaagccccacgccccgggccatggctccaaccctctccctgccccacaggggaggtccagaggtcagggagcctggacggcttcctggaccagatcttccagccagtgatatcctccggcctcagcgtgagtcgggcacagcccccaaatgcccctgccccaaccccccggggcctctgctgccccttccatttttctcagggctctcactctgacctgtgaccattgtccctttaggatctggaacaaagctgggctctgagcagccgcatgaagggagggggcgccattgggcccacacagcagggctaccccatgggtgagtgaggggctgattcctcacccagggcctccgggcccggcagcatggcaggcatggcctgggacccctctggcagtggcgatcgatgccctggccagcaccccggtgcccgatgctcttctctgtgcctggggctggagggaggtggcatgtgggcccaggcagggactgacagggagggcgtgttccctcagtgtacccaggaatgattcagatgcctgcataccagccaggcatggtccctgcacccatgcccatgatgccagcaatgggcacagtccctgccatgccaggtaagtctgggctgggggcaccagagtcccttctcaggagagcagccaccagctctgggactggaggagggagggtcctgctaggagtcccgagtgcaca

SEQ ID NO: 19002 - DNA, 2300 bp, Homo sapien
gctaccccatcactcctcttggctcgtaggtgccacccagcacccctctccctggcctgctcctgccggggaaccccacagccaccctgccacactcaggggtttataggagctgccacaggcccagccctcccacccagcctcctcccaaccatggggtgacccccgcagcagcttctacctcttgccccagcctgggtgaccctcagccttggccacccccttagctggatcccgtttcctgcagagccgaggccattccccttgcccctggcattcaggccccctcactgcccccaggaccccctccaggtccagccccaacgctgcccagcagggaccacacaggtaaggctggagtgggcacatggaggttggcagagcatgggaagccccacgccccgggccatggctccaaccctctccctgccccacaggggaggtccagaggtcagggagcctggacggcttcctggaccagatcttccagccagtgatatcctccggcctcagcgtgagtcgggcacagcccccaaatgcccctgccccaaccccccggggcctctgctgccccttccatttttctcagggctctcactctgacctgtgaccattgtccctttaggatctggaacaaagctgggctctgagcagccgcatgaagggagggggcgccattgggcccacacagcagggctaccccatgggtgagtgaggggctgattcctcacccagggcctccgggcccggcagcatggcaggcatggcctgggacccctctggcagtggcgatcgatgccctggccagcaccccggtgcccgatgctcttctctgtgcctggggctggagggaggtggcatgtgggcccaggcagggactgacagggagggcgtgttccctcagtgtacccaggaatgattcagatgcctgcataccagccaggcatggtccctgcacccatgcccatgatgccagcaatgggcacagtccctgccatgccaggtaagtctgggctgggggcaccagagtcccttctcaggagagcagccaccagctctgggactggaggagggagggtcctgctaggagtcccgagtgcacagtgggcagcgagcttcaaggctggccatggtgcccaccactctggccgcctgccgccctcacagccatggtggtgccgccgcagccaccgcttcccagcctggatgcagggcagctggccgtccagcagcagaactttatccagcagcaggcgctaatcctggtgagcgctggcagggccctggggccacctggtggaggagaggtctgtggctcggggatgagggtctgaactggctgctcctcctgcttcaggcccagcagatgacagcccaggccatgtccctgtccctggagcagcagatgcagcagcggcagcagcaggctcgggcctccgaggctgcgtcccaggcctcaccctcagccgtcacctccaagcccaggaagccccccacacccccggagaagccacagcgtgacctgggatcagagggtggctgcctgagggtgaggaggtgaccatattctcaggaagggatgtgagggtggggactgcaggggcaggggacatgggcagggtgagtaggcagacacagggaagaggctgctggcccaggactggggacccgaggggtgtggcgagtgtggcacccaggctggctgagctgccactcatttctgcttctgccaggagacctccgaggaggctgaagacaggccctatcagcccaagagcttccagcagaaacggaactatttccagaggatgggtgagggcacttggggtggcaggaccgtgcagaaacatggccagtgcccctggcccgggccagggagggtggggtgtgctctgctccccggagttggtgcggcccatccaggagcccagctgggccagtatgggtaactttgaaggccatctggacacttgcagggcagccacagatcacagtgaggacgatgaagcccccggccaaggtccacatcccccagggggaagcgcaggaggaggaggaggaggaggaggaggaggaggagcaggaggagcaagaagtggaaacaagagcaggttgtggggagctgggcagggcctggggctccggtggctctgcacgcggttaacagtctttcctgtttcctggtcagtgccgtcccctcctcctccccccatcgtgaagaagccatgaagcaaggtggggccaaagctccaaaagaggctgaggctgagccagccaaggagacagcggccaagggccat

SEQ ID NO: 19003 - DNA, 2300 bp, Homo sapien
tcccgcctgggtgacagagcgagactgtgtctcaacaacaacaagaagtagggaccattattcatctagttttatagataaagtttaaaagcaaagtgcgtacagtgcacaacacaggctctagcacacagtaggtacttaataaatggttgtcactttgccacctctgaacgctcccaggagtgagcctctgttccccctaattctgcagtagcacctgccccctgccccgaacaatcttgtatctgggctgatccaagggcagttaccacggggtctctgggcagtgagtgaaaagggagggctggcagttgcaggggaggggacaggtgagacgtgtgaatggaggtggcccaagccctccatccctccctgccccacctaggccctctgctgagcacacaggccatgggggccagggcgccctccatcggcctcctcaggttttccttcatgcatgtggatggctgctctgggggtgggctctgtctcaggacctggtggtgaccacctcgctctgcccccagatcctacgggacaccttctccgagtcctgtatccggatttcccagaatgagcggcggaaaatgaaagacctgctgggtatgggtccagggaccatggagttgggagcttgagtgctgggggccgcgcctgccctgaaggagggagcagcatgggagcaaactctagagccccctctgtgtgagcagagggcagcctgggtccttcctgcccacaggaggcttggaggtggacctggattctctcaccaccaccgaagacagcgtcaagaagcgcatcgtggtggccgctcgggacaactgggccaattacttctcccgcttctttcctgtctcggtcagtggcgctggggtagggagtagggatgccaggcccccagcctggatcctggggtgcatgggcacagaccacaagcaggagagccggggagcagacgccaggggaaggacaaagcccagccactggccctgggcagctccagggcatcttgggcagtagcaggacccaggagactgcccgagacccaccaccttcctgtagggcgagagtggcagcgacgtgcagctgttagccgtgtcccaccgtgggctgcgactgctcaaggtgacccaaggccccggcctccgccccgaccagctgaagattctctgctcatacaggtgcgctagcccacgaccctgggctagaggtgggggcaggtggcaaggtgacctcagttcatgcccgatccctgcgcagctttgcggaggtgctgggtgtggagtgccggggcggctccaccctggagctgtcactgaagagcgagcagctggtgctgcacacagcccgggcaagggccatcgaggcgctggttgagctattcctgaatgagcttaagaaggtaagtgtggggcacgggttgagaggccgggcagacagccctcaccgatgctgcatctccctgtccgtcttccctgtgggggcaggggctgggagtttgggccaaatccctggaagtctggggtgctaggtggaggggcaggccagcagggggagcaggtgggcaggcaggacagggaggcacaggcagacttgctgctccaggccctcgcctgcttgcccacaggactccggctatgtcatcgccctgcgcagctacatcactgacaactgcagcctcctcagcttccaccgtggggacctcatcaagctgctgccggtggccaccctggagccaggtatcgccagaggccggcaggggctcacacagggagggcatccacttggcagaggctgcccgggggcagagggtccagtgggtgagccacatccctgggtgccttccaggctggcagtttggctctgccgggggccgttccggactctttcctgccgacatagtgcagccggctgccgctcccgacttttccttctccaaggagcagaggagtggctggcacaagggtcagctgtccaacggggaaccagggctggctcggtgggacagggcctcagaggtgaggaagatgggagagggacaagcagaggcaaggcctgcctgagactgaggaaggaaaggggtttgaccactcccgaggctgccatgcggtgggaccaccctgctgtccgtctcctgtggctgcccctctgcccgctcctgatggctcgccttgtctctccagcaagactgtgcactccttgcaggcaggggctgggctggatgctgctcttgtgtcccacgtggtacttagttcaaggctgccccagcagatgcttaataaacagctcttcacttt

SEQ ID NO: 19004 - DNA, 2300 bp, Homo sapien
tggcattcccttggcgccagggccagaccagaggtggcacgatgccgcaatccccccttgagctggtaggacatcagggacattgccgttctagcagcagcacacatggggagggcagagcccaggccagggccactcacgcctggcctgtccctaggtatgacgaaggttctggaggcagcggggatgaaggcagagatgaggcccacaagcgggagtggaacctcttctatcagaagcagatgcagctgcgcaaggtgaggggaggcactcagtggcctgtgtggggcccctggtggccccctgctcgcacctctcagccccttctctggtgctggatgggactgtcctgcggcagggcaggacgcctcatgggtccttcatgttgtcctccagggcaaagaccccaagatagaagaatttgtacccccaggtcagtacagaaatgttcctggaggcttgtgggctcttcccggggcatggagggaggattctcatccgggctgtgggggacctcagagcgcagaaggtggagcgaaaggaccaaggaccaccccccccccccacagatgagaactgtcccctgaaagaggcttctagcaggaggatccccaggctgactgtgaaggtaagagacgggcagctcctcagccacccgccggggccctcccccagccgcgaggccatgcgaccagtctcactgtcctgtgccaggcacgggagcactgcctgcggcttctggaggaggcgctgagcagcaaccgccagtcaacacgtaccgctgatgagtgagttccacgatcactgggctgaggagcactccaagctctcgttcccttggagactgcaggaccctgtcaaccctggcctgtttgggccacctctccccagattgtacctctcctactccaggggactgcccctacaaccccaccagggccaggcatggctacaacttaggtgctaccagcagctgctgagggacagtaagccacagggtgctcagagagccctaatcagaatccctgtgcccaaggcctaccccaccaggcctggagtcccgcaagagctcagcagggagaagcccaggcccacctgataccttgtgcctgttaccttgcacccacagagctgacctccgggccaaggccgtggagctggaacatgagacattccggaacgccaaggtggccaacctctacaaggccagcgtgctgaagaaggtgggcctggtgcaggcggacccagggtcgttgcaggggcccctccatactctgacgcagaagctgtctgccagctctctgggctcaggcagcccagaactcaccctccccagcccaccccagagacagtttatgggggtagagctccattctccactggctggacatgtttctagccaaccctgtgaggatgggaggcctaaaacttgcccagtggtcagttgcctgtggccactggccacagaaacccacttgtagtgcctagtagaaaaggagggctaggtggggcatgtcaggaggagctggcgggtgccacagcctccctgcctatccctgcccaggtggccgatatccacagagcctccaaggatgggcagccctatgacatgggaggcagtgccaagagctgcagtgcccaagctgagcccccggagcccaatgagtatgacattccaccagcctcccatgtgtactcggtgagctgtggcccagtggcctccagacctgtgaccaggaaaggcttcacttcccctctgccctcaggggtgcacctcttgccaaggcctggctccccaccagggtcctgcctgcctcttccctcccacactcctgagagccccgtcccaatgtgagttactgctccagccagcggtgccctcaagggggcctagtgggctgaacctcctctcctcctgctcacatttacagctcaaacccaagcgggtgggagctggtttccccaaaggctcctgcccgttccagacggccacggaactgatggagacaactcggatcagggagcaagccccccagcccgagcggggaggcgagcacgagcccccgagccggccctgtggcctcctggatgaggatgggagtgagcccctccctgggcccagaggggaggtccctggaggcagcgctcactatggggggccctcccctgagaagaaggcaaaaagttcctctgggggcagctcccttgccaagggccgggctagcaagaaacagcagctcctagccacagcggcccacaaggattctcagagcatcgcccgcttcttctgccgaagggtg

SEQ ID NO: 19005 - DNA, 2300 bp, Homo sapien
tgtcctaccagctcaaggggggattgcggcatcgtgccacctctggtctggccctggcgccaagggaatgccaggcaattccagcgggttggagccctggcttctcggccccttacctgctgaagtccccgtagcccttgcggcctccctcatacagctcggggtcaaagccgttcccctgggagggcccgatgcaggtcttgctccagctgctgctgcgctccaaggcctccagccgcctccgcacggccgtggggttctggcagtggtcgcagcctttggcgcaggcaggcagcgcatccccgaagtacttggcaatggcggcatggcggcacctggagcaggcagcaccgcagaggtgaggggcggagagcccagtcggccagcgtctgttcacccgagcctgaatcgctagctgagcgagcactgccgcgtccggcaccatgccgggagccccacacccctcatctcatccaagctgcaccaggcatcgtttggctctccccactacacagatgaggacgataaggtgaaccaactttcccaaggtcacgtaacacatgggggtctcccgggaagcaggatgtgaaccccactctgtccagttactcctctgctcctcccctctgtcctctggcaatgggatgtagatgctggctctgccatgaagggtgtcttttgggtgacacacttcacctcctaaagcccatgcattcccgtcagtaagatggtgcagaaaggcacagccctcacggactgagcgaagatggctgaggtgatgtctgaagtgcattacagtacagtcatgccccatggaatgactgcacagccaatggtggtcccctacgattctaacactgtatttctactgtactttttctatgcttatgtgtgcttagatatgtgaataccactgtgttacaactgcatacggtactcaggacagtaacgtgatgtacaggtttgtggtctaggagcaacaagctgtagcgcatggcctgggtgtgtaggaggctgtgccgcttgatatttttttccttctcttccctggaattgctgtttgatttccctaagtatactctgtgaccgcacaatgacaagttaaatttctcaaaacgtatttgcattgctaaggcaggcacggctgtgtagtaatatgtcccatcatcaacccgtgagggtgtcacaggtggggcctttagccagggagacgcagcctcgcctggagtcctcctctcgtcttcctctgtctcaaccctgctgcagccctcctggggtgagcggcctctgcccatgctgggagcagggagcagcctctggctggcccacgaggctctgtcgcatctctgttccctctgcatgggggtggctgtcgacccttggggcagctgcagaggccgcaagaggggccatagctctctcaggctccttataaacagccattcctgccaccaggaacgtggcacagggtagggaagcccaagaggagatgctggaacacaggcagggctgtctggggtgccacatcccagggacaagaatagctggcattaactgctctaactagaactcctcccagtgtgagcactgctgcggctgcaagaagccctttgaggggctgcgaccccaaggcgcaggctcaaggatgcaaggctgattgcaacaccccggtaaggaagcagggcctggctgactttcttttagctgagtgaatgcagctctgaagcctgacctgggctgggacagccgaggcggccaccagagggcgctcctgcccccactctgctccaatgagtaaatgcaacaaatggttcatccccaggagtccgtgcgcccgcacagcggccgcctgtccagcctctgggaggctctggcatccgagtggtgtgaccacatggctggcttcctccccctgccctcctcaggccctgactcactggggttttgtgctcggactcaaagagctccattgacagcggggctggggtcggtttctctccacacagcctagcctgctgggaggcacaaccaggcaaatgtcacagggcccggcccctggactctggagccctgccctgacagctgggccaggagtgcggtcacagccccagcagaaggccctcacctcacaaggaacatgaggcgccttgccgggcgcgcaggccactcccaggtcactcaggattccaagttctcccccaagacgccttcagatgctgagcggcacaagggcctccccagggactggttgcaaagcctcctgctcagcttgagagggccaccagctccccactgtttac

SEQ ID NO: 19006 - DNA, 2300 bp, Homo sapien
aaccagggcaaccagtccctcccaaccccacgcttggtagtgcccacctgcgaaccagggcaaccagagtccctcccaaccccacgctcagtagtgccttggttggaggcttctcagggtcctcaggggttcctgagtggctgccagagcaagtggtggctccctctggccttaagagggagtgtagcccagctgccaccaggccctcctgctgcccaggctgcccagccagccctgcttggagccttcagagggtgtgccctggctgcagtagcggtcagcacaggggaaacactcagggcagagaaggctggcagagccggagggatgggaagcattcctttatgtggcatctcctggcacacggagccttgcaacaggcaggcatcccgcaggccagacagctgccacttggtcccgaagcttccctgtttcctcctcgcagagctgatactccaaccccaggcgcctcacgaggaagggctggcagcaggcggcgtgtttgagactgataagcgaggtgtgttggcagcgcggggccccagagggctgcttgctctgccctgttgtttcgtcatggtgggttttagtcacccttgccctgttgggcattatctcgtttgaggtccacctagaaggaggcataactgacacttgtgggagatttgcagggtcctgtgcctgagcagccgggggggatgcccctatttgtggcactgagcctttgggtgactcccctttttgccctggctccaactggaagtagaaagtggtgcttgaacccctggcaggccctgctcctgtagccacccagggcgggaggaagcgctttctgctgctggtgttagaaacagtaggcgctctttctgcagctacagaagctggctgttcattcaccctccgtcctggttcagggactgtgttggagagaccctgtccactcgtgtcctgtggatgcaggacagggatccccacctgcctgcctggggcgtcttgtgagtgacagccactggggtctccaggctcaccgctgtgccccgaccccgacctggcctgactcttccctactgtgcgcctcccaacaccgcaggagcttgtctccccagacaccagccccagccgaagcccccagcctctgctgagctgagaacacttgggctagtccttggtttccacatttccctgggtcattgtttttgtttctcactagatgccagcttgtttgctttgaggaaaacatatggggggtggtggctttaacgctggcttgaggacagggcggcaggaggagtaggcagcctcggctcacgggccctgcccaggagggctgctctcagtgttccccaaagaaccaaacagccgggtcctgcttccttaggggtggtgtcatgtcagcctgtgcatcacggtggcacagcagaggtcccggttgccagcgtggtccctcccagcctcacttctgtgaccttctgcccacctgagcctgagttgaaagtcagtcctccaggttcctggtttggtgttcaaggctcatcaccagagggagatctaggagtttatggggttctagatgggcccagggaggaggacccaggctgagccgtgagctgagaacaccagcagtgagtgggccaagcccctgaaaggacacagatgggcagagtcctgctgcatcctgggggcgccgcatgctggctgggcagaccctgcgctgacctcgacagggctctgccctaatcctgggaaaaagggaggctcagcaggccggcagccattctctcccaagctggacagccaaatccctcttttaagccccctgaataaaagagctgaaatgaacttgcagaataagcaggccctcggggcccctctgctgcacagcaggcggagcaggaggcgctctgagcagagcccccagccctcccctagtgcagggtcccagcagcagggagagtgcaggtgtgtgcaggaggctggctgacttccctgcagggaagcgacccagcatgtccccgaagacctctccgtgtttatggtagactgtggcccttcaccctgggggcaggggacccttgctgctccctccctgtccccccttcttctgtggccattgccactcacctgggagctcaggtgttgggggctgagcagcagtgccccagcgcggagcctccacgtgctgtcctcgtacttccttcgtgggcgccgctgctcccctgggcgcctcagcccagctcctctgctgacagccagctgctgtctctgcctggcttttttgttgttggtcgtcctggagatcc

SEQ ID NO: 19007 - DNA, 2300 bp, Homo sapien
aagtgtggttttggaaggagttgggtgaacctgagatagaaagacgggaaaaatatgggatcatcagtagccctcctgggcttccctgccttcctcctgccaaacctaggaagggaaaggggaggagaggtggccagcctcagagctcccatgttcccctcgccacagctgggaacactaaggttcccttaggagcagcggctggggcacatgccacacagtcacctgacggctgctggttatattgggcaccaagtgtcaggcactccttggcctggctttaaatagcccgctgggaagaccacctggggaccggctggaatgcgcctcctcctctttagagaacaggacccctcagctcccccacctgcgccatgaaggttcagtcgcgggtttacgctccaaatgacaagatatcaactgcaaaacaaagggggtcccggggttcctctccagctctctgggggcagaacagccacgtccaacggtcctacttctgctcactgtgtgacaggataccgtgagtacccctgggtcagaccctggggctgggtgaggctggccatgcctggctggcaaattcagcttccagtcagccccctagggaagccctgggcgcaaagctatgacactgtccacagccgcagcctgctgctgctgggaactgacacttttccccgctggaggccggggtccacccggcatgagtctgcagctctcccactttgcagcccctggaggaggctggccagagcttctcagcaacaaaccccacttttcctgcaccagtaaattcagcctcagtccaaccttcctcctccctgttctggtgagcacagccccaggtctctcgctcacaaggaaaagtgccccctgcaatctctccctgggtctctgggtgtggcacaagcgaaaaagctctccctgcccgctccctctttgaaggagtgtctctgctgggctacattaggccgtgtgggcacagtgccagtcaggctgaaaacgccagaccaagtgtagacagagagggaggggagaaaggcagcccagctcctgaaccacgcgcaaactgtcccgtaagggacactgtcggcattgtcgtccctctaagaatgagggaacctggaaagctggggcgtgaggatggcacggaggtcccggaaccaagaggggaccactgtccttgtgcaagcctgctccacctggccagagagaatgtcccattcagtctgaccagagggttcagtcctacactcaggctggctagactcacaagacctgtacctgtggtgacaaggactccaggtagtctcaaagagcctggtgtggccccggcctggtggtgatatgctgataaaagcagcttcagatccacaaatgtgggctggggctggccgagcacagccagctggcttccagggggctctcgggccctggctcctgtactgagcccactgcacgggcagtaccctcagcggggctgctcctggctatcttgctggtctaagctggagacaggcctccatggagagacagcgtggggcaccagtgggggtgctggctggggccctgtcctgctgtgtaacctcagagaagttgcttgctctctcgggtctcagcttccccacgtatagaaggaaggaggcgggagcggatgatctatagcattctaggaccctatgcctctcagtacatttgaaaactgagatcctcacctccacagaaacgcactcactccaggtgaggtgtgagaagctgggtggatctaactcagggaacccacggcttttgacaagaactcatctaattttccacggagccatcttctgcctgctaccctcatcatcacttaaaaaaacagctccccaggccgggcgcagtggctcacacctgtaatcccaacactttgggaggccgagggcggatcacctgatgtcaggagttcgagaccagtctggctaacatggtgaaatcctgtttctactaaaaatacaaaaattagccgggcatggtggcgcacactcgtgatcccagctactcgggaggctgaggcaggagaatcacttgaatctgggaggcagaggttgcagtgagctgagatcatgccattgcactctagcttgggcaacaagagagaaactccatctcaaagaaaaccaaaaccaacaacaaaaacatagctccccacctccagcttgcctaccttccttcagggcacacaccgcagacaccctaggacagacacccaaaaggtgttgggggtgctagtgacggtgcacgggggtgacagcccccaaagc

SEQ ID NO: 19008 - DNA, 2300 bp, Homo sapien
gtgtggtagcatacacctgtggtcccagctactcctgtggaggttgaggcaggaggactgcctggggcatgacagtggcactgcactccagcctgagtgacagagcaagaccctgtctcaaaaaaaataaaataaaaataaaaaatgacaataaagccacggatacaagaatctcattagaaaaacttggcagagagtatataaaagtttcctcccaaccgggcatggtggcacacgcctgtgatcccagctactcaggaggctgaggcaggagaatcgcctgaacccgggagacagaggttgcagtgagccaagatcacaccactgcactccagcctgggctacagagtgagactctgcctcaaaaaaaaaaaaaaaaattatccaattggggccggcagttaattgaaagagctggtcaaagcaacttttgttaaagaacacctaagttctctacacatctattacttttttacatatctcacattaaatggaaacatacaccttttccttggccggccttcctggccttttctctgagtgtgggcttgccaaccagagctcctggattgctatcttctagttttggttgagtgtgggcttgccaaccacagctcctggattgttattttctagttttggtttctttaaagcagaacaaaaacttaaagtcattggaacttaaaggcaaaggaagctgggtgtgaaaaccttctgggtttttacaaaatgtccctgatgtttagttatcatgtctgcatctttttcaacaggaacattatctgagtgattccaaagtcatcccaaagtagtcaataggtatttctagaaagaatttctttctccactcgctctgaggtgcagcacaggtgcttcagcgctcagactgtgtgctgctggattcaaactccaactcagttacttactagctgatgacctcggctaagttatttaacctctctgtgcccgttccccacatgtaaaattggggtttcagctattattgttgcttcattggttcccgggatgttaaattcaattatgtaattacaagtacaactgccatgaacaggtttgggaaccaacacttgactcttgataagcatctgacttaactgacggagctgcacgcaaagggtgagctagagactggcccactgctgtgagcgttcagcatgccaagggccttagtcagtaagtttcacacaaggaaacagaaaacatcaggtaacccgggtcagtgacgcccatgatagttaagaacgactgttctaaatctgcctccatctgtcatccaaccctggccacacctggggagaatcacctggggatgtgtaaacaatacgacatcctggcaaccccagagactgatataagtggtaccaggtggggcctgggcatttctcaaagctcctagatctttaccagctgggataagcacccgagggctagaagggaagcccttggagggcagggcccgcctctctgatctcacaactggacacacagtgcctggcatggttcctggccatagcgggccctcacatcctagcttttaaaggagtatatggtggccactaggtttcaagcaccagggcacaggcttgatcccctcttcccagcttccctattgtgccagtgggcagaaaccaaccacacaatgttgctgaggccgtgcccagggagcagacaaaggcaccaatgggaagcctcagggggggagcaacacttcccccagaaacagttccaggaggcaccaggcgccagccagggctgcagttaatcattcaccccacaacacaggaagtgagccctacgccagtcccagccccagggcttcctgagctcggggcaggtccgcagtccacacgtcacccagacagaggacagcccagcccagccacaggtgaggcggcctgatggcctggggcaaaggccctcggtccagtctcttccccgtccaccccaagtctgacttctctcaggagggactcatgaacacgtgccctgagcacccccaaaatgacatcacacaagggcagaaaggagctgaagggggaacgtgaaaggcagaaagggagccgtggttgccaggcaaccagccctagcccacctttgtttgtttggtgacagcaactaaggtctggtcagggccgcttggccacgctcatgccttttcctctcaacagttgcttctttgagtcagggtgcagctctggtcacctggcggcctcttcagctcagccctccacaaagtgtgagcctgaaggaccaccctgaattgcccttgtaggacccag

SEQ ID NO: 19009 - DNA, 2300 bp, Homo sapien
gtgcaggctgcagtaccatctagatttatgtaaagactatccaccgtaatgtttgcacaatgatgaaattgcctaacaagtcatttctcagaacgtatccctggccgggcacagtggtccacacctgtaatcccagcactttgggaagccaaggcaggtggatcgcttgagttcacgagtttgagaccagcttgggcaacgtggccaaacctccatctctacaaaaaatacataaaaattagccaggtgtggtggtgcgtgcctgtagtcccagctacttggggggctgaggtgggaggattgcttgagcccgggaggcggaggttgcagtgagctgagatcatgccactgcacttcaggctgggcaacagaccaggaccctgtcttaaaaaacaaacaaaaacaccaaaaaccaaaacacaatatgtattcccatcattaagtaatgtgtgactgtattttaagctactccctgtggaaggtcaaaggcaaggctcttagaaccatcattcctttttattgcttactaatagtctagaagagtcggggtgcatcccagcctcctagccccacactggcaactaataggaagtcttttatatctggccatgaccttcaagaggcgttttgggctacagcctgaagccctttggtctgattaacgacaaataataataccttgtatgatttacggagcatgtttgcatacatggtcttcgtgaacctcacagtgaccctgagttagggacgaaattttatagtgcgttacatttgaaagaacaccgacttcagaatcagagttcgaaccctgggtatgctgccaggtgtagtggttcacacctataattccagcactttgggaggaccagatgggaggattgcttgagcccaggagttcgagaccagcctgggcaacatagcaagactccatctctataaaattaaaaattagccaggtatagtggcatgtgcctgtagtcctggatacttgggaagccgaggtggaaggattgcttgaggccgggggttgaggctgcaatgagctgtgattgtgccactgtactctagcgtgtgcaacagagcaagaccctgtcttgaaaaataaaaaacaaggccgggcacagtggcttatgcctgtaatcctagcactttgggaggccgaggcaggcggatcatgaggtcaacagattgagaccatcctggctaacatggtgaaaccccgtctctactaaaaatacaaaaattagctgggcatggtggcgcccacctgtagtcccagctactcaggaggctgaggcaggagaatcgcttgaacccgggaggtggaggttgcagtgagctgagatcactccactgcactccagcctggtgacagagcaagactccatctaaaaataaaataaaataaaaaacaagcaaaataaataaaatgaatcctgggtctgtggtatcttgttaagagccagttttgaaggcagacacccctaggcccaaattctagctctgctgaccctttactgtgtaaccttgtacaaatttacctttctgaatctcatattctggagaatgggctacctcacatgatggtgactaacaattaaatgagacatatataaactggcacataggaggtatttaataaatattattcctttccctctccaaagaagttataaataacttattcaaatttgcatagctcataagtggcagagcctcattttgtttctttaggtccagtattttttccactgggccctggctgagttttttggcccctcatatgtgctggatttgcccccccttaactcctgctgtggcctctaagctgggctgcttctagaagggagacgtgctgatgggctacaggtgtcttaactattctaactctgggactatccctctccctccctatctgctggcctccctgctctcctagtcatgattactcctccaaaggacactcagcttctccaccatctcatgctgcttgtccctttggatcctacaggtttgtcgcccattggaatattgccaagtctatggctgggtactaccaggagtctggccgggctggcagggatgggaagccttcctggtgccgtctctattactccaggaatgaccgggaccaagtcagcttcctgatcaggaaggaagtagcaaaactccaggtaaggcttgggcagtagaaggtctttcagtctgacccaccactctccagttttgtgaagctgatttctgaactctgatgatgcttgtgtaagctagaggaggctgctcccaacctgtaagtatag

SEQ ID NO: 19010 - DNA, 2300 bp, Homo sapien
ttttgggctaccatcttcattgccctaagcctcacctgaatcaaagcaatgagaggagagactacaatggtgatgcctttggccaacagagcagggagctgatagcatagggattttcctgcccctgtgggcatgcacacaaagacgtccttgttacctgaaaaaatacaagacaacaatatctcagtgcttcctgccttttcattgaagttgttgaaaattaaatgagaatgtaggaaaagcacctagcagagtgtctggcacatgggagggtctcgatgtaatcctaattcccctcctgtcctttctatgaaaaaggcaaggatcctgggaaacttggatacatgcccaaaccatttctagtaatggttaaaaacaagatttaaaaagtctgggtcaagcgcagtggctcacgcctgtaatcccagcactttgggaggctaaggcaggcagatcacgagggcaagagtttgagaccagcctggccaacatggtgaaactctgtctctactaagaatacaaaaattacccaggcatggtggcacgtgcctgtaatcccagctactcaggaggctgaagcaggagaattgcttgaacccaggaggcggaggttgcagtgagccgagatcgcgccactgcactccagtgtgggcgacagagcaagactctgtttcaaaaaaaaaaaaaaaaaaaaagaagtctgagtctgctgtgatatggatgattgaactaaacagccatgaaagcagagtactgctagatgagtgggtacatctgtgtagacatgagaggacattacttagagggcttttgtttagacatgtatcattaatattacattgctgctcgcctcttggcaacttccatttgtcaccgtatctcaggtttataacattattactctttccttctctatctgggaccaaggccactcaacctgcaacaagggaattacctaggaggccagtgaccgagttaagttattcctaccaccctcactgttgctgttcgtttgtgtgtacaaacgaacaataatgagaatctgaagtgttttcaaagaccatgtgtaaatctagctatgaaatatagaccagctgggtggttctgccactaaaactacaagctttgggccgggcgtggtggctcatgcttgtaatcccagcaccttgggaggccgaggtgggaggattgcctgagcccaggatttggagaccagcctgagcaacatgccaagaccccatctctaattaaaacaaataaacgaaactacaagctttgacaactctaaagatttccaaatccagttatggaccaaaggtgaggcagtacgaagggtgaggaggagggtgttctgccgcagcgttatggtatagccagcataaatttaaaggaaggtagcttggtaatgttaccttttactacagccatggtcgcactctcctgtaaaggcgtcttaaaagagtcaaacccaaagaccttcttcagcgtactccggactcgccgctcagggtcaaaaggaaaggtggtatggtggctgctcatcttagccaagaacagtggccaaaggttaaggcaaaggtagtaaaaggttgccacgagaaccctctgttttgcattaaaaatacagattatttttctgtaacaatttgctatattacacttaaataatgtattatttttaagtaataaagctgaaggtgaactgcctcaagcaatacattcctcagtaattaacatctccacttttacgctcaatgaaaatgaaaacattgaactattccaggccacggtatagcacagagctagaaatcagatcaagagaagaaacataaatgtcttcagaacagcttggagaacggggaaccgttttcctaagatccaccacctgctcctacttctataagcgcaaccacgacgaccgttcttccaccccgggaccccgaaccccttctcccgtcttcctgagcccaagatccgcaattttctctcttggctggccgacacctccctctcttcaccctaagatatcagaaccggccgtggtccgcccaagaattaaaggctgctggctggttccggaactgttcgaagacccctatacacaaccccaactcagagaagccaaagcgctgggaattcagctttaggcagaacccacgcaatcttatatccgtcgcgcagtgatgacgtagcgcgagcgctggcatgagggcggagccaggcgcaggaaactgccgttttgattggtttccagtgtggcgcgggggtctcctgggatccgaaagaacctgcctttccgc

SEQ ID NO: 19011 - DNA, 2300 bp, Homo sapien
catgggcgacagagcaagattccgacaaaaaaaaataataataggttagctaggcatggtggcgcccacctgtagtcccagctactgggtaggctgaggtgggaggatcacttgcgcccaggagttcaagactgtagtgaactatctatgatcacaccactgcactccaatctggacagcagagtgagaccctatctcaaaaaaaaaaaagaaaagaaaaagcaggtgaaaacgaattttcctttcttatcttgttaataaactgagaagacttaaatgagccccaaccaagattaaaaataatgcagagttgactgtagatataaatgatacaccagttaggatgaatgcctgctataaatggagtaaatcatttaaacagggaaaaatcaacataaaacacccattgatatctgggttaaataaaataatccactatcttttcccccaaatttcaattcaaagattaataaaaaatgatccatgtgaaaatacattttcaaacagatctgatatccaatccagtttcttccactaatactaaaacaaaacgggagagcaagggatggagctaaccatgaaatggaacactgttggcacagttccaaaatctgacaaatgaaattgtgctttcagtagctctggatctgggagatttacctaccgactgtctactgttctcatcttcttcttcttcataaccatcttcatcaccccctagacgagaaaagtcatcctccccataggcatcagataccaatccgcctttctcctctgaaaggttaaaaaacaaacaaacaaacaaaaagcaagaaaaaaaaaacaagagttacaatgtaagaaaaaatgtccagagatttgagtggccaagactatctctgaagatacaaagggaacctaaatctcatgttaagttacaataggcccagattcggctctctgagaaggccagcatttactgaataaaatcattaaaaggtcagggaacaaaaccgagtactaaattctgtttctaatgctataaacactagataaacactaaagtgtttataggaaaccatcagagaactttctgactggaagagaccacacaaaatcacaaaacatggaagtacctaacctaatccaatccccttcactttccagatgaggaagctaaggtcctgatatgttgttaggtaacttgttctttattctcccaaaggaatctgtttccattatctaacattgtgcttctcaacctgaggaggagaacatcaccgttaggctttaaaaactcacaaaataagaaaaatcacctgggatccttaaaaagttcacaaatgcccacatcctaccccagttctaccgaattaggttctctcactttgggcatcagatacgtttgtttttaaaagctccaagatgtgtttagggcacattcctaactaaaagttataaagttaacgaacacaatctttaccatcttccacgtatgttttacttatcgctctccctcatcaaacaacgagcccaggggaaacaggcagtggctgagcagccgctccctcttcgtccatccctctgtctatcactatagccggcacggagtctttcagtaagtttaggcaaattaatcgaaataacgggaaggagattcttcattcttagtccacagtctctaatgctctatctcaccccggaccctggaccattcttcggggtccggtgcttggagcacaatgaccatcttgttccctcccgcccagcgagggtacagcattccgggcagacacccgattcccccttccagcttcgcacttgggccttaccagccgcgctgcccaccgcctcgattccagcctcgccatcagactcgggctctgaatcttccgcgtaaactgcgagagacgacagaacattcttcttccccgccatcttattcccacagcccgggcgtggctcactcctatgactcaagacgccgacttccgggcggaaaggcaggttctttcggatcccaggagacccccgcgccacactggaaaccaatcaaaacggcagtttcctgcgcctggctccgccctcatgccagcgctcgcgctacgtcatcactgcgcgacggatataagattgcgtgggttctgcctaaagctgaattcccagcgctttggcttctctgagttggggttgtgtataggggtcttcgaacagttccggaaccagccagcagcctttaattcttgggcggaccacggccggttctgatatcttagggtgaagagagggaggtgtcggccagccaagagagaaaattgcgg

SEQ ID NO: 19012 - DNA, 2300 bp, Homo sapien
ctccctgggttgacatctcgcctctcagctgctacagggctccaggccccctagtcattttcagaagggtttgcaatgaagagaggaaggggctgctgagcccagtggcctggggcatcgccagctctggacctgggtcttctctaggaagaagcctcagcccccacccacagtggggtgtatatgaccccctagttctctaatgggtgctgctggcagacccaggcccctcaggcaagctgtttttggccgttctctgagctcctgctccatgtttctgttttttggggtggataggtacctgctggagtgactcaggtccacagggcacttgtgctggcctgacacacacagatctgagtgcttcaaccaaactgggactccttccacattgttcccaaatccaggagcaagcctctctgaacactttctctgtgcagaacagctctcagatgaccaggaaaggtggcgactcacacatttgcaaccagcacccctgcaatcactctgagaggtagcagtggaggaatctgtttacagatgacagcatggaggctcagggaggctgtgtgaccatcccattcactcaaccacccttttattgagcacctgctatgcaccaggcatggtgctaggtgctagagagtagctgcccttggagtcacagtccaacagtgtggcgagattcctaaacatcatttcaaaccaatgtggcaaatgccatgtaaaagccatggcccaagggttatggggacacataaaccaacttggggtgtggagaggtcaaggaaggctctctagcacgtggttggtgcaacgtcttcaaggacaagaaggataaactgggctcaatgtcatgggaagggaccagcctgttgaaaaagcacggtggcttgaaaccgcatggtttggacagtgctgtgccagcagtctggtgttgtttggcattgctggccagtaagcctagagaaaaatggagccctggctgggcatggtggttcacgcctataatcccagcactttggaaggccaagacgggtggatcacctgaggtcaggagttcgagaccagcctggccaacatgatgtactaaaaatacaaaaattagccgggcgtggtggcgggcacctgtaatcccagctactcgggaaacaggcaggagaagcgcttgaacccgggaggcagaggttgcagtgagccaagattgcaccactgcactccagcctcggcgacagagtgagactccatctaaaaaaaaaaagagagagaaaacaaaaagaaaaagaaaaatgaagcccttctctgacctgaacacccgtggtaagcagtggcaatggagagactgctctcagaggactgacgggagggaggggccagctctgtaaccagcttgttaagaacaactgtaacaaggcatcgagtgccaatccatgccaggtcggcactgacctctccagggtatcactgttcacactgtaaggagatttaagtagcttgttgaagggtgcaccgaggacccgacccttcctcggctctccctctggatacaacgtgaggttaggggttggaggctgagaggaccccgtgaactgcagagcagagctgggacggggagtcaggcctcccgaccgggccgggggcactccctgggcccatgcctcgcgctggcacggagagcggggaggggggtacgcggctgacgaccgtcggggcagcagcagcagcacagcccggcgttggctagcggcccagagtcggggcagggagggttcccgtgcggacgggggctaagaggccgcctccagcccggggcagtccgcgcacccgagcctggagcccggagcctggaggggtggggaggccccgcgcccagggccggaccggagggagagggagagcggtggctcctcccccggcccccgccgctagccgatcggggcgctgggcgggcgccgcgggagccgcagccctttccggggggcggacccggctccggcggcggcacccagctcctgccccgacaggtgcgcgccgcgcgaaggaatgcagccggtctgactcaccagcgcctccttcctacctgcgcgcccgccccataaagcgctgcccgcctcgtccccacccccccaacccccgcgcccgccctcggacagtccctgctcgcccgcgcgctgcagccccatctcctagcggcagcccaggcgcggagggagcgagtccgccccgaggtaggtccaggacgggcgcacagcagcagccgaggctggccgggagagggtgagtgcccgccccagctgggc

SEQ ID NO: 19013 - DNA, 2300 bp, Homo sapien
gccagctgcctctctggggcgaggaagggcctgggtccctgaggggaggagatgtgacagcgggagaggatagtggacaggagcaggtgtgcccagaggggtccccaggggttgggatgggggccaggggagctctgagcctgtgggtgggtgggcatggcctgtgtgtgtgtgtgtgtgtgtgtgtgtgtgtgtgtccctgtgggggggaaactgcctgtgctgcagtgtgatggcattcagggtggcagtcacacactccagggacctgctggtacataaagtcggggcagcctggtggggtccgggccgcctggagagtaggtgtcctgagcgctgggcccagcccatcgtgatacatctaatgataaacacaaattcctaacttttatgggaaatctcgttgtttctaacattggctcctacttttaaaactttctaaacaaatgaagccaaacactcttgggtgcctcgccaaccctctaactgccattttgtagcttctgcgtggaggctgccatggaggttaaaggcagggcctgcagagcagggccctgtcctggccctcccagtgctgtccgcgggatggggaagttccacagccttctgtgcctggtctctcatctgggaaacgggcagaatgaaatcatctcccgccgggctcctgtgctgagcaatctcctccgtgaagccctgggctcatatggcagtcacagtgtgggaatcagcactgcctgaggggctgtggccagggacagtgggaggaagagctgggctcagctctccaggcctgtacctgcctgtgtaatgatgcctgggaggcctgagcctgcagcctgtattgtgtagcatgtgggtgtggcggctacaccccgaggctgcaaggaagtcatttccctctaggaaccctgctgtccccaccctttccctgctggctcagggctgcctcccagtccctgtgccacaacaggtctgacctgcatgtgttggcgctgctgtggcctcctccaggctgcacgccttagaagcaggctacgccttcctgcccttggcctgagaagggcttctccagcacctcggggaccccagcccccagaccctggggtggccactgccccagaagccgggctgagacaggattcaatggggagggcccgtgggcagggcagaggcttgggcccctgggagacctggccctagagaaagaggcgcggtgctcacctttgccccggccttgcaggcctggatggctctgccgccagcctcttttcttgtccaggcttcaggctgagcatctcttagagggcctcagggatgtccagtcctgccctgaaggccgctgaggacttaggatggtttaatactgaacccacagccgctggggacgccttgaggggagccacagtgtgtgtgcatgtctcactctgggctaacttgtgaaagggtgaacagctcaggggcccagaaaacttaactctggggcaggcagaggtacaggggagggcagatgattcagaccccaccctgatgggccgggcagtcactgcagaacccaacccggtgcagtaagccactgcgggcagctgtggcccagccccaggccccagatattgggaggggcccctctcctcccggctgtgccaccctcaccaaagggtaagtgggccaggacagaaggagcaggaggcagagctgcggccccctctcagggaggcaccctcattggatgaccctgtcatggccaagcctgacccaggctcactgggagctaaaaggcaaagaagaataaacccacatctgccctcagggagcccagtgctgagaggcctggcactgggacaaactcgcaaaccagagtccttgagggctggagggggcctcccggggcagggcataggccactgcagggatggcacggaacagggcagcggaaaaggcaggagtccgaggcccagggccctgcctctggcggctgggcgcccttggtcacattgttggtgctcagagcctcagttcccacagctgtgcagcgagaggaagctgacggcaccgaccatggctgtggaggcctcatgtgtcaattgttgctgttctgcaggaggaagaggatggcagggccacgccccagcccatgggccaggctgctcctggcagccttgatcagcgtcagcctctctgggaccttgggtgagtccacgttgccctgcagccccctcctggcaggatcatcccttgggcaggcattgcccttgcacggggatctcacggtgtctcacctaaacacgcttggccattcagca

SEQ ID NO: 19014 - DNA, 2300 bp, Homo sapien
gcctgcacccaggtgaaataaacagccttgttgctcacacaaagcctgtttggtggtctgttcacacggacacgcgtgacagttctttgttgcagaaaaatatttcactttgatgaagtacagtttatttttctgttgtcacttgtgcttttgatgtcatatctaaaaaaccattgcctggccgcattggctcacacctgtatcccagcactttgggaggctgaggcaggcaaatcacttgaggtcaggagttcaagagcagcctggccaacatggtgaaaccctgcttttacaaaaattatccaggcatggtggagggtgcctgtaatcccagttactggggaggctgaggcaggagaatcgcttgaacctgggaggcggaggttgcagtgagccaagatcgcgccactgcactccagcctgggtaacagagcaagatctgtctaaaataaataaatacgtaaataaataaaaataaaaaaacatgactaggtgtggtggctaacgcctgtaatcccagcactttgggaggccaaggtgggtggatcacctgaggtcaggagtttgagaccagcctggctaacctggtgaaaccccagtctccactaaaaatacaaaaaattagccgggcatggtggcacgtgcctgtaatcccagctactccggaggctgaggcaggagaatcgcttgaacccgggaggcagaggttgcagtaagctgagatcacgccattgcactccagcttggacaacgagagcgaaactccgtctcaaaaacagaaaccaaataaacatttcctaaccaatgtcacaaaactgtacccctatgttttcttctaagagttttcagaattgcccttggaatgcagttccccactctttgggcacacccctgagcaggccccaagctaaatccctggccataactccccacactactcccaccctaaccccaagcaagctgcttacatttcagtctttcagtttcaaggttccatgtagggtgggcagctgtggacaggtatcaaggcagcagttggggccggccagcaggtttaggatgcaggatagcaagagaagagtgcctgactgggaacaaggccacgcctctgagacaagggcttctgggctgaagtagtgcctgctggggccaacagcacaacctacctggacagctgtggcaggtccttaagggaggggctgggcccactgctggccaccgccaccctagtccaattctccattgctaggagctgttgcgtattacctagaaaaggagcttgtaaaattgactctctggtcaccaccaaacttgtcttttttttttttgagacagagttttgctcttgttgcccaggctggagtgcaatggtgtgatctcagctcaccgaaacctccgcctcccaggttcaagtgattctcctgcctcagcctcccgagtagctgggattacaggcatgagccaccatgcccagctaattttgtattttttagtagagatggggtttctccatgttggtcaggctggtctccaactcccgacctcaggtgatctgcacacctcggcctcccaaagtgctgggattacaggcgtgagccactgcgcccggcccaaacttgtctgtctttatctctacttacagtgagtgtcaggtcaccctcttggagaccggtgatcagaggctgatgacctctcacagctgctggccctggggacctaggggatccctttgggaatcccaggtcaaccgggtgccagctccattgctctggctgtgtgggtggtggtgggtggtgaggcacatagaaagtcaccagcgccagggaagggcagctcagaaatcctggtcatgccaagtgccactcagggctattctcactctagtgagtgctcattggttcttcccgaagtccagagggaaggacaccatcgggggcgctgtatcccacccggcaccattagcccctgccacccaccacccagcagctggattcccacgggagttgcgggtgggggcggaaccggctgaggtctgggggcggggcgtccgggcgcggggcggggctggcgggaatgtgcgcacccccgcgcggggccccgcccgagcatcccgcgccgacggggctgtgccggagcagctgtgcagagctgcaggcgcgcgtcatggctgctttgagacagccccaggtcgcggagctgctggccgaggcccggcgagccttccgggaggagttcggggccgagcccgagctggccgtgtcagcgccgggccgcgtcaacctcatcggggaacacacgga

SEQ ID NO: 19015 - DNA, 2300 bp, Homo sapien
actgcacaccagcctgggcgacagagtcagactccgtctcaaaaaaaaaaattaatttagttgaaacctatgcatacctgtatctgctactttttcttttaatagtttagaatatttgctggaccagcatcagaactatagagtagaatgcccaaggctctatttcaattttctgggctttgcttggctagtcttaaccttaagcctgctatggtattttatatacttgaggcaactgaagaactgactattacaatctacccaagacatttacttaggcaaaggtagggattagcatatttacacatttgtcatgtttcttcagaagtaatacctgccaggatatgctattaaacaaaagggcacatatctagtttagttatcttttgtttattctttatggacatgcaaatactatagtaggactatttactttctagctgtagtcatttcattcacttgaagtacataattcaagtaacatgttgcttagtaagttacctcttgtttaagcatatggaaatcaaaaaatattttgtgacaccttaaaaacatacaaaacagttcctctaaaataatttattaacatgtttatttgtatttattatttaccccttcccaccccaccaagagacctgctttttgttaaaaatgtatgtgcatgatatatgaaatacttgataatataacatgatttactgaattctaattctcacactacgcacttaactatcaaaatattatgaaaggtaaataatccagggaacacattttattttacatcggaaaatatttacaaaaattttgttaaagtagcctctctgggtgcatagcattcgcttgatgcctgtgagtttagactcctgctcattctgatagagaccaatgcaattcatttgcattgactttctattgcagagctttggaaccaagggaaggatccaaacatagctccattttatccaatcagaagggccgcttagtgctaaactctgattcgtccattcctctttgcatccatccaatcattaggccactttaacagccaatcagcggcgtagatatgcaccaatcatggaacagtgccgaagcacggcctttgtgtcgggggatgtcagcgcgtcggcgaaagcgcccaccaatagaaaaagtcgttggtgtatgcaaataagggttctatgacgcagagacgcagcgtgaagcgtgcctataaaaacggaggcgacgcgggggcttggagcgcagagcggtttggtcgttcgttgggcggtgctggtttttcgctcgtcgactgcggctcttcctcgggcagcggaagcggcgcggcggtcggagaagtggcctaaaacttcggcgttgggtaggcgttcgtaggtttacccgcggcttcaggttctgccaaccgttggcgccgcgcgccgcggccgttgggagccgagcggcgggggctgctcgggccgctggcgtcgggtcgggtatggggccgggaggtttccccttggggctttgttccggaactgtgtccccgccttttcccggcggtgattcagaggtcccgacgccgggttccgggcagtcgggcctccgcccgtcgaggaagggaagtgactcctccccgcgctccccctcccgggggaggctgccgctcctcgcagcctgagtcattaggggagggggaggaggttggcggccctcggccatctgctgccgcgaggtggggcgcggggaggcgggaggcccggcggtggggccaggatctgttcctccccccgcagccctggggggcggcccgggtgagcgcggcggccttatcttcggggcgtctttcttaggtgaaagaaaatggcccgaaccaagcagactgctcgtaagtccaccggtgggaaagccccccgcaaacagctggccacgaaagccgccaggaaaagcgctccctctaccggcggggtgaagaagcctcatcgctacaggtaggtcgggcgggggaacaatggcccggcggtggccggctttgtgcggcagcgtccgctcactcctcccctgctcgctgcaggcccgggaccgtggcgcttcgagagattcgtcgttatcagaagtcgaccgagctgctcatccggaagctgcccttccagaggttggtgagggagatcgcgcaggatttcaaaaccgacctgaggtttcagagcgcagccatcggtgcgctgcaggtaagacaaaggcctggagccgggggagggctgggcggtttccgctccccgagtgggattaatagtgcggctctcgtcctcaacaggaggcta

SEQ ID NO: 19016 - DNA, 2300 bp, Homo sapien
cgcggtggctcacgcctgtaatcccagcactttgggaggcgagaggcaggcggaccacgaggtccagagatcgagaccatcttggccaacatgggaaaccctgtctctactaaaatacaaaaaattagccgggcatggtggcgcatgcctacaatcccagctacttgggaggctgaggcaggggaatcgcttgaacccaggaagtggaggttgcatggagctgagatcgcgccactgcactccagcctggcagcagagcaagagtccgtctcaaaaaaaaaaaaaaaaaaattaagaaggctgaaataataacaggaatttgataccagagattgagatgaagctgagctagtttttcaaagtgtgcatttttttctcattgtttgatacttgaccactggtgtgacaagtcaatattgaggtatttgtacttacgtactgtaattctctgaaggtcaggcatggtggctcatgcctgtaatcctagcactttgggaggctggggcagaaggattgcttgagtccaggaggtcaaaactgcagtgagccgtggtcactgcaccactgcactctagcatgggtgactgggcaagaccccacttcaaaaaaaaaaaaaattaccggccaggggcggtggcccatgcctgtaatcccagcactttgggaggccaaggcgggtggatcacaaggtcaggagatcaagaccatcttggctaacacggtgaaaccccgtctctactaaaaatacaaaaaaattagccgggcgtggtggcaggcgcctgtagtcccagctactcggaggctgagtcaggagaatggtgtgaacccaggaggcggagcttgcagtgagctgagatcgtgccactgcacaccagcctgggcgacagagtcagactccgtctcaaaaaaaaaaattaatttagttgaaacctatgcatacctgtatctgctactttttcttttaatagtttagaatatttgctggaccagcatcagaactatagagtagaatgcccaaggctctatttcaattttctgggctttgcttggctagtcttaaccttaagcctgctatggtattttatatacttgaggcaactgaagaactgactattacaatctacccaagacatttacttaggcaaaggtagggattagcatatttacacatttgtcatgtttcttcagaagtaatacctgccaggatatgctattaaacaaaagggcacatatctagtttagttatcttttgtttattctttatggacatgcaaatactatagtaggactatttactttctagctgtagtcatttcattcacttgaagtacataattcaagtaacatgttgcttagtaagttacctcttgtttaagcatatggaaatcaaaaaatattttgtgacaccttaaaaacatacaaaacagttcctctaaaataatttattaacatgtttatttgtatttattatttaccccttcccaccccaccaagagacctgctttttgttaaaaatgtatgtgcatgatatatgaaatacttgataatataacatgatttactgaattctaattctcacactacgcacttaactatcaaaatattatgaaaggtaaataatccagggaacacattttattttacatcggaaaatatttacaaaaattttgttaaagtagcctctctgggtgcatagcattcgcttgatgcctgtgagtttagactcctgctcattctgatagagaccaatgcaattcatttgcattgactttctattgcagagctttggaaccaagggaaggatccaaacatagctccattttatccaatcagaagggccgcttagtgctaaactctgattcgtccattcctctttgcatccatccaatcattaggccactttaacagccaatcagcggcgtagatatgcaccaatcatggaacagtgccgaagcacggcctttgtgtcgggggatgtcagcgcgtcggcgaaagcgcccaccaatagaaaaagtcgttggtgtatgcaaataagggttctatgacgcagagacgcagcgtgaagcgtgcctataaaaacggaggcgacgcgggggcttggagcgcagagcggtttggtcgttcgttgggcggtgctggtttttcgctcgtcgactgcggctcttcctcgggcagcggaagcggcgcggcggtcggagaagtggcctaaaacttcggcgttgggtaggcgttcgtaggtttacccgcggcttcaggttctgccaaccgttggcgccgcgcgccgcggccgttgggagccg

SEQ ID NO: 19017 - DNA, 2300 bp, Homo sapien
agctcttgggaggctgaggagggtggatcgtgaggtcaggagttcgagaccagcctgaccaacatggtgaaaccacgtctctactaaaactacaaaaatcaggtgggcgtggtggcacacacctgtaatcccagctactcaggaggctgaggcaggagaattgcttgaacctgggaggcagaggttgcagtgagccgaaatcacaccactgcactccagcctgggcaacagagcaagactctgcctcaaaaaaaaaaaaaaaaaaaaaaaaaaaaggctgtctctcttacttcgtagtcatgcaggtatgtttcactttttccagattggtacaacggaggaaaagcaacacaggaaatgaggaagaataaaaaatgtttatacaatgaaaaaaagcagaagaaaacaaaacaaacaaaacccaacagtgaatgtgatgtagtcttgtaggctactgtcctagttcctcttgttaccaacttgctgagtaactttgtgcaagttacttagcttctctgggtttcggtttcctcttttgtaaattaagcagtttggatgatatcatctcccaactccaccagtacacacttattctgaagctcatgatatacatctattatttaaaatccagtgctgtgaactctatttcttcagtcagatcacacttgagtattgtgaggctaacataaaccaagtaacttgcgtttaatcataggattaaagcaatatactacaacttttatttgtccttttgtaatttttcattttcaaacgcccctagtggctaaacgatttagcctgtttaggaaaaaccagtttctcaactctgtgatgtggcttctgatgtgagggaacttggagctaaataaaataagtatgtgtcactcaaacattaacgattttccattagccccaccacccttcatccctaaggttatttggaatgtgtttctttaatgagataatcatttgttaatataatcccatctaagaaaatataaatcaaaaccagtggatttgaaatagattcaatatgaaaaaccaaattaaatgacaacggttaaaatatctacggagaacattctaaaactcacagaaacaaatgcctaggtctggggcatctggcttattttataaagtgaagaactttgcttgactggtgggaagcagagaggggaaagataatgtcccaagtaaaaaggctgacgtccagacaagaaaactagagtggataaatacgggcacgccctactcaaacccaggcctttcctctggaccctgtgatgcttctcaacactggcaacttgtcagtgtacctcagagactattctaggcggagattaaattcgtccttggcccttaatgtactggaaacaagttggtcaggccaggtgtcaggctgagaaagcacacaagtcgtggagttccaggtgtcgagtttggcaaaggtaaatgaagcgcctcggcaaaggcgcgggaactgtagcgtgcggtgtacctcctccttagcaaagctttctcaatgcctcttaggttagacccgccgcagggatgaaggggttgctggcggattgcaggtgcctgcagcacagggcccagaactaagaaccgacaacacagattcttaagccctgcttggagcactgctctgagctggcattagaaccgaacctagctgtactaagtataaaggcaaagtagttatgacactgttggcagtgaaattatacttggaactctttcgcagaaatcgctagggcctccctagctctgggccccttctcctccaggcgctccagtttcatggaaaggcttccctatgaaactgaaaacgcgctggtaagaaggagaaatgcgaccggactgcaattcccagaagccgtcgcaggccctcagcatccgggacactagcagcaaggatccctgggtattgtggtcctgtgctttgccagcaaccctctgccgacggtaaaattccagccggacatagaaccacaactcccagcaacccctgctgccgtgtggggggtcttcacgttctcgtggcgcggcgcaggcgcactgggtcctcggcgcggaccgcgcagactgaataataaaaggggagcggcgaagaggcaggaagacaagaccatgtcgaagggccccgggcccggcggctccgcagcttcctcggcgcccccggccgctaccgctcaggtgctgcaggcacagcccgagaaaccgcagcactacacgtacgtagagcccccccccccccgccgcgcgcgcacgcctgacgtcagcggccagcgtgagtc

SEQ ID NO: 19018 - DNA, 2300 bp, Homo sapien
agtaacgtctgttttactattgaagtaagagtactttataatgaatacaaaaatgtatattaaatatccagtagagcatgctaaagtgaacatttctgtttttatttcagcaacttattttatggtattgtagttatggcctgtccgaaactctctgacatattctaaacagctttcagagagtcactgaggcttatttgctactactgttgtttttcctttagctcagttaagaaatgtttagttagccgggcatggtggctcacgcctgtaatcccagcattttgggaggctgaggcgggtggattgcctgaggtcaggagctcgagaccagcctggccaacatagtgaaaccccgtctctactaaaaatacaaaaaactagctgggtgtggtggcgggcacctgtaatcccagctactagggaggctgaggcaggagaatcactaggacccaggaggcgcaggttgcggtgagccgagatcacgccattgcactccaacctgggcaacaagagtgaaactccgtctcaaaaaaaaaaaaaaatgcttagttaatagtcagcatggtagttaagagtactgactccagggtcacaccacctgggtttgaggcccagctctgtcagttactagctgtgagatcttgggcaagtgacttacctctttgtgtatcagtttcctgagaataggaatattacctgtctcatggggttgttataagggtgaaataaatgagttcatacatgtaaagcgcttaaaacagtgcttggcacttagcacagcgtaggtactgttctccgccattatttgaacagggccctagtcactgctttcagttgcattgctccttgcttcaacagccctgattgaatgccttctttagttgcatccacactaaaatagatccttcagttcctagggcacgcacggggcagcagcatcttcagagaacagttctctcttccacgtccacttgaattcttatttcattctccagtctttgtagcgcctccatcatactgcttgtatcttacatgatggatgtgtgttctaaactgacccatgcagtttagggccaaatacgttgttgtacagaaaacaatgtacaaagaacatgttagtttaaacatattactaaagggtcataaaactggaggttttccaggctagctttttcaggttagctatgtacagaaaaactttgtgggctttttgttgttgttgttgttgttgttgtttttggtttttgagacagggtctcgctctgttgtccaggctggagtgcagtggtgtgatctccgctcactgcaacctccgcctcccgggttcaagtgattgtagtgcctcagcctcctgagtagctgagattacaggcacgcgccaccacacctggctaatttttgtatttttagtagagacggggtttcgctatgttggccaggctggtctcatactcctgacctcgagtgatctgcccgtcttgacctctcaaaagtgctgagattacaggtgtgagccaccatgcctggccagaaaaactttggataaagtcaaggtattatataatttgggggaggatgaacgggggtttgtagtactctcgaatattctctaacatcagtgacgtgagtgacccttatatgaatcttcctcagtttcaccagctctaggccccacagggcaaggggacagttatagaaagaagggaccatggacacacaggactaattgcacacccttcctggctcttgttagttcttggggccaggacagctcacaggtgtcagaaagttccagtgagccccagtgaaaagtgggctgaaataattgccagtgattggctcccccactgtaaaacactgacttgcttgagtgcccgtagcacttgaactgtgggttgctgtgtgtgtgtgcacgggcgtgtgtgcccaggtgcggtagggagtttcatcgcatctaggagcttcatagtagccataagatcatattgtatttactctgactaaaggccagtgtgggatcaaagactcccttaaaggttcagacacacttacaaattcaccagacacttattttatttgcctgaataatactccctgagcttgctttttctgccagagagaatattctaaatcaggatcactttagaagatttggaagccacatctctatagctgtgtagtgtgtcagatccatccaaatatttaaagcttttttttttttttttgagatatggtcttactgtgtcacccaggctagagtgcagtgacgtaatcatagctcactgcagccttgaact

SEQ ID NO: 19019 - DNA, 2300 bp, Homo sapien
gccaggttcacaggggaccaagggagaagccagacaggttaacccctggcttcgggtgcccttcctgccgggcagaggctccagggaggcccagggctggcccagaaggctgtttgcccacagaattagaatggtatggaatgggggtttctgagggcacttcaaggtttagtggctagaagaatggcacagaggcctgtgccactgcgggccggctgtgcatctcctcttgtgtgtgtcaggggatgttcctgagggcgggatgggaagcacatggcaccaccgctctcactctcccccagcagctgcagacaccaggagctccctccccgagagtgccagcattttgctcgggcccagggaatgagcccttcagagttctgattgggtttggtggcttcccttatctcattcctgatcccagaacagcacatggatttctcagcgccttccagtttgaagaggctgttctctgttacgttgattctgtcagctttaggtgcttggtgttgcatttttcggacttgccccatattcggataggatctgttttttttttttcgagtagggtctcagtctgtcacccaggctggagtgcagtgcagtggcatgatcctagctcactgcagcctggaactcctgagctcaggtaatccttccacatcagcctcctgagtagctgggaccacaggcgtgcaccaccatgcccagcttctggtggcgtctagacttagctccacttactggccacacactccttcctgcaccatgtgactattgagcacaggtgtattgatacaggtgtaagtgcaacagtccctgctgtccagcagctgtggccagtgtgggaagcagaggtgcccagccattgggatcctcctgagaatcatagaggggcctacctggacagcagagtcaggagagcttctccaagggaggaggagagatgggtgggacaggagagcttgctgcagggctggtctcatgtgggtggggtgaccctgaggtcttcctctgggatggggcagatggctcagacagtgcatgccacagggtctccgcacaggaccatgtccctcctctgtgggtgcacttgtgtgtctcagagagcaaagcgtcttaaatctggttctggaacatcctggttggattagtgggaaagggagcaaggaagaagtcaccagaaagtacatatgggcagagtgaggccagaggtggatatgggtccttctcggaagcccggggctgccctgggggccagagcagggggacctgatgttagtaaacatctgttgagcgagtgagcagagggcagctgggttggcggtgggtgggaggctgtgcacgcagcatagttgactggaaagcataggcctttggaaccacactccctgtctgtgtcctggccctaccacttacaatttgtgtgattcttggtaaaacattttatccagggtccttgtctgtaaaacaagggggatggccccaaggctccctgagctcttcctgccccagctctgccatccgatgaggctctggcctgtcttttcccctttatctcttcctgggcctcacatcaggctgcaaaaaggccctagcctaaaagtgaagccacaatcataaattgccactatcgggggcctgggactgctctcacatgcagtacttcctgagtcccctgagttacccggtgaggccagtgtgggagtcccatttcccacatgagggtgctgagcctcggaagttgagtggcaccaactagcaggtgtcactcaaggttaggtctgactccgcccacgccacctgcaccttcacagccttcctgtccctgcaaaattctctggcctgacactagctggagccttgcacacccatccagtggacagccagtccctggaacctctgaggcagggctggccagggcctgggcccaaagccctccggagctgatgttcttcccctccttggggcaggtctgaacgggatgaacagcagcatctgggagcattttgcctctggaagcttctccccgggcacttcccccgctttcctatcagggccaggggctgccgagctggcccgacttcggcaagagctggatgaagccaacagcaccatcaagcagtgggaggagtcctggaagcaggccaagcaggtaccaggccccgtgcctgccggccttccccagtgccaggtggcatccagcccaagaccttccttcacagagtgggcgtggggtgggggaaagcgggggctggaagaacagagcagaaactcagttttgttcgctcgctctcccc

SEQ ID NO: 19020 - DNA, 2300 bp, Homo sapien
ctgcatggggcatggccaggctgccacaagacccacccctcagagaggcttcgcccagtctcatttgaccttgtaatccccagatggggaaaatgaggcccagaaagggctgggacatgcccagggccacacccgggggcttggctgcccgagaacagaggaaagacagctcttcccaccatgccacgttggccccggggacccagcaggagacctgggaaggcaggggtagccctggggtcctgggcctcactggaaggcccgctgctccatggagggtgtacaggaggacgcatttggggcccaggcatttgtgagaagcttggtcagggccgccctcaggggtgctgggggtggcaccgacacccctcacccccagccttttcaccttccccagtgcactctcctcacccattcccagcaggccggccttttgagtgctggcccagtgctgggcagaggctctcaggagggtggccatccctggagcagcctggaccaggtcagagtccaagagctggctgaggccaccgtgcatcccacccagtgctccccgacctgggctgaccttgtccacttgttccaggtgggcccgcagttgtttctggagggagtagagggtggagagtgagagcgcctccaggtcggagaaggcgggcagggcctggggctcaggccccgcgtgtagccgctccagctcctcctggagcttcttcacctgcacctccagtgcatcccgctgctcccgggccagctcgcactcggcgcccgccgcactggcccgctcaccagcctcctccgcctctttcttccaggcatcacaagcctgtggggccagcatacagtctcatcacaatggccctgccctgcccctgtccccagagagcatcatcttttgggggccactctggctgcgaggcctggtgggaagctgggttggctctctgggaggagggcaaggaggaggctgatgctgtctgcacagaggtttcagaacctgcaggagactctcccctctgtggccagggaaagggacctgggcctagcacagcagggacacagggtagagctgggattctggccagcacccatagggtagccggctgcagctggacagggggcccatttcagaacccagaaccttggacttgaaaccctggagaggcgaggctactgggaggaggcaggtgatcctgggacagactacaagcagctcacagagagaatttgaagcctgcaacaacagtaaccacccagggtcctgactggcaaagcgagtcctcccagggggagagcgagcgaacaaaactgagtttctgctctgttcttccagcccccgctttcccccaccccacgcccactctgtgaaggaaggtcttgggctggatgccacctggcactggggaaggccggcaggcacggggcctggtacctgcttggcctgcttccaggactcctcccactgcttgatggtgctgttggcttcatccagctcttgccgaagtcgggccagctcggcagcccctggccctgataggaaagcgggggaagtgcccggggagaagcttccagaggcaaaatgctcccagatgctgctgttcatcccgttcagacctgccccaaggaggggaagaacatcagctccggagggctttgggcccaggccctggccagccctgcctcagaggttccagggactggctgtccactggatgggtgtgcaaggctccagctagtgtcaggccagagaattttgcagggacaggaaggctgtgaaggtgcaggtggcgtgggcggagtcagacctaaccttgagtgacacctgctagttggtgccactcaacttccgaggctcagcaccctcatgtgggaaatgggactcccacactggcctcaccgggtaactcaggggactcaggaagtactgcatgtgagagcagtcccaggcccccgatagtggcaatttatgattgtggcttcacttttaggctagggcctttttgcagcctgatgtgaggcccaggaagagataaaggggaaaagacaggccagagcctcatcggatggcagagctggggcaggaagagctcagggagccttggggccatcccccttgttttacagacaaggaccctggataaaatgttttaccaagaatcacacaaattgtaagtggtagggccaggacacagacagggagtgtggttccaaaggcctatgctttccagtcaactatgctgcgtgcacagcctcccacccaccgccaacccagctgccctctgctcactcgctcaacagat

SEQ ID NO: 19021 - DNA, 2300 bp, Homo sapien
ggcccttgaagctccttgaggggcaaggcccaggagttccagccctcaggttcctgagggtccaccctcagtccttccccccgccgcccctccccggactccccacaagagcctccctggccccagggccgcctaccaggctggtactcattctatgaccaccgcccccaaccagctgcccccagctctccctgccccctcccctctctggcagctagcagggcaattggcggggaggagtgcggactgaggactgaggaccaagggggcccaggccctgccctcctacccggaggggctccgtttgcattccttggtgctctctgagtgcagctggtgtcccgccctgttctgggcggacgcctgtgtgcgtgtgtgtgtgcctgtccagtgtatattgtgtcttagcttccattttaaaaattgttctgtacagagagagatgcagcaggggcgggagggcagagtgggcggaggggagcagccgcacccccagcaccgggtgtctgcggtaggaacaagagggctgagagggtctggtcctggcccaggctcccccttgggctcagcacgaaagggctttcaatgaattaagtgaaaactttttccttttttacaaaaatgcaaaaatcaacaaagctccaaacctattggaaataaaatatgaacttgcagtggtagcttgtttacatgggggtgagggggagtgggtcccaaaagagggcctctgaactatgaggtgggccaggagccttgcctcagccatggaaacggctgctgcccacacccctgagctgtggtaaggcagctggagagggctggaaacttcctgggcccatcaggccccaagacagttcaagtgctctccgacctaggcctagcggttgatgacacagggacccttagccttggacacagaggccccccaggccctaggactctttagggctgtgtggtcagcggtgactggcaatagggcccgtaactgtttctcagaggaacagtgtcttcccaactgggcatggtggcgcatgcctgtggtcccagctactagggaggctgaggtgggaggatcacttgagcccaggaggtcgaggcggcagtgagccatgattgcacagctgcctccagcttgggtgacagagtgagatcccatctcaaaaacaaaaacaggccgaggcgggcagatcacttgaggtcaggagttcgagaccagcctggccaaaatggtgaaaccccgtctctactaaaaaaaaaaaaaatacaaaaattagccaggtgtggtggcacatgcctgtagttccagctactcaggaggctgaggcaggaggatcctttgaacccgggacgcagaggttgcagtgagctgagattgccccattgcactccagctgggcgacagagtgagactccatcacaaaaacaaaaaacccagtgccttcccattgggatgatttgctggtaggacccagaggaagtcctgccttctgccttcttcaccctaccctgcccctgagggatgaggggctgaggcctaagaggtacgtcctccctcccacctcctcaactaggctgtgcggtggggggtgagaaaacaccctggtgggatcctctttgcatggtctcgggccttggatgtcatctcagctaacctcgactcctgtcctcattttgtgcagactcagaggttccgacatggaaccagggtcacacagctaggatgacgtgatgaccaggcctcaggttctgacaccccccaggcaggggagggacccagctcctctacgccctactgtctcaagagcagcccctcagcctcaacctgcacccctgggaggcccctgctcactgtgctcccccgaggaacgggtccctgtcctgggtgtcaccacaggaactggtatgcctggtaaagcaatttattcaaagcccacggccaaaaatcaccctagccctgcctctgcctcagttatttccacacctacccccctgctttgtagctaccccaaggtggcggtagctcaaagtcccctgagggctggggaggaagctacccggcctggctcgcattccaggccccactgtaggccaaaggcatattttaagaggacaatggatttgtttttattaatttttttgctaagaaagtttctaggtggcaggtgctgtccggggagggggcgtgcgcagcagacacagcagccaaactgtcctttctgcttccgtctgtctgtgccagccctgccgcctgccagctcttgctccctcagagccagaaggttcttggctccaggcttcct

SEQ ID NO: 19022 - DNA, 2300 bp, Homo sapien
ctggagcacgtcaggacctgtgacagggacactgaggtagccaagccggcttgccaccacccacgtcacgtgccctgctgtgaacttgaagggacaggagggtgggaaatggccaaaggccgtgaccaggcccacacgcccgcaagtcccccagcccagcactgggcacagggtgggcaggccacagagctctaggaaagccccatgctgaggcgcattttcctgtcccccgggagccaagtctgtcctcaggagagatcgggcagcagcccctctgcctcctcctcctggccagcctggcccagagctctctgggacttggctaagcccccttcaagggtgtctgaagggagcactgtcctgactgccaaggtgggggcaggggcacagggctgtccctgcccagcacagcttggccccgtcatctccaaggaatgtcacctgtggggccaggcaggctgagcaactggctgtcctccagggagacgcctcttgggagcccccaccctgggcgccaccacaccccaccccaccccgccccgccccacgtctggacgcactcgaggaagtggggtgagaacccccccgggcccaggtcagcttctctcagggttcagcccagcctgggcacagcacatggatggggcaggatgctgcccgcctgttctgggcccccccgccccctgctgagagcgttgtccccttcccagggcctctgtaggagggtggggcggggccaggcctgcccacggggtccaccttctgctccagccagaggagggtcctgtagggatcccagctggggaaggtgcagggggcctgggagactgcctctccgaagcggtgaaaccctcacccttccgtccctcccagccaccctccctaaaacttcccctgacagagggtggcagccccaggctctttgcataatcctgtggcttcgctgtcttcacccagcaccagcggacagggaagggcagagaaggccaccatggcgacactcctctcccatccgcagcagcgccctcccttcttgcgccaggccatcaagataaggcgccgcagagtcagagatctacaggatcccccgccccaaatggccccggaggtaggagtgacctcactggggagagagctggccttggggagcactgtggtctcgggtacgggtgccctgctgtctggccccacctctcgaaggctgggactggggaccagcgaccctcccctgcctactccaccctggggagagccccctgggccagcagagcaggggctgccagatggactctgggccactgtgggcctcaggccctgtggtctgaggctctcagaacccctccctcccggttggcctgaccccatcccctactcctccagcttcagaagagccgactccattaggtgggggtgtccctgctgtggggtgagctgttcggggagcagcagacccccaggccgacgtggcacccccctcacctccgctgccgagcctcacttccgctgctgggtgaggagcagccgccactgataagcagagctgtttcctctggggaagggagggaggtggggtgcgggtgcggagggctcgcgctgctgggcacccatggacctcagccacggcgggcccagggacggacctccaggaggcctgctgggggaacaggtgcggggcatcactggggctggaggccggggtgctggggcccccatacccttggcctggatcaggcctcagaggagccattcctgtccatctgagcctgctctgggcctcccgggacactgcctttccaccttgctctgcagatccagcctccatcccaccacttctcccccgagcaggtaagagtcagagtgctggggtgcagagaggtggggagggcggctgtgtgtcctcctgccggccgacgctgatggcagcaagcaacttgcggtggggaggggactcctgggtctcaactccctccgctgcacaagccgcccttgtcctgcccatggcgagaggtgttggtgccaggggtggctggtggggtccccaaggtgaccccgtgtgtcttagcgggccctgctctacgaggacgcactctacactgtcttgcaccgcctgggtcatcctgagcccaaccatgtgacggaggcctctgagctgctgcgatacctgcaggaggtgagcccggctcccaccccaccccccttcctgcagctgccctgtctggtgcccccagccacccacccgcctgcctccccaccaggccttccacgtggagcccgaggagcaccagcagacactgcagcgg

SEQ ID NO: 19023 - DNA, 2300 bp, Homo sapien
atgcaagtctctcctttctcccttctttagagccagccgccgccacctccctactacccaccggaagataagaagacccagtaggccctcctgcctccctgcctcccaccctcatctctctaccctacccctcccatcggggctgtgctggggcttggggaggggagggggcgccttgttctccctccaggtctgatcataaacaattaccaggaactagcattgtgggacattagggcccccggcctcgggagaggtgccgcccagcttcccatgccagcccggagcccacagtgctgcccagcgtacctccctcaccgtctggggctcttctgggagcacggagcatcccctgttcctgtttcactctcagcttctcccctcgaagggactctctggccacctcctccaccgcagtccagctccctcagtctggcacccactgctacactcagcctcatgagccacttcagaccagccaggtgtcttcccgggccctgccagaccctgctcacattccctctgctggtctgtgctggtctcagaaggccaccgcgcccgcattccactcagccagggtccagctgcagcccccgccacccttccttcccttccctgtcctgggtcatgttgttgccaccctgtgtgacttttgaagctgtaaaatgagcttccagggcttgggtggcgtcggggcagggccgccgaggctgggaggaagcccttctgccttttgctggtgtttctggaatttgctttccctcacctctcacttccttctagaaggagcttcctgactggaaccagagaatgcatgtctgtccacttggtggctgctgggtggggccgggaacaagggcccctgaccctgtgtgctggccgggacctgccaccagccccccagcctgcttcttccccttaagctttgtgcccctggatgcgctaacattcactcttgtttgtccctggactggccatgaagtgaggagatggttatttaaagagaattccctatttatttgacaaaaaatccagttaatatattaatgtgaaataaaccctgtttgcacctcgatttgtttgctgaaaatgtgaaatagtaaaaatgaaataactggaccctttctggctctgcgtgtggtgacccgggggtctcttccggaaggagagccgtctggccgctgagggccctggagacttctgggacggttccctcccatgggaggatccccattctcacggcccagccagcctgtctggtccccaagacagctctggcctctggagctggttcttaacggttgtcgctcagcagctgtgtccctcccccactgagtccccagggcctggctgggacagaggtggatgtggcccagagttggccttgaagggaggagttggggctgccaccttgtcccctgctggctcctcgaggaatggcagccctggcctaagtcctggttgctggagggaggaggccgagtcagccctggagcacgtcaggacctgtgacagggacactgaggtagccaagccggcttgccaccacccacgtcacgtgccctgctgtgaacttgaagggacaggagggtgggaaatggccaaaggccgtgaccaggcccacacgcccgcaagtcccccagcccagcactgggcacagggtgggcaggccacagagctctaggaaagccccatgctgaggcgcattttcctgtcccccgggagccaagtctgtcctcaggagagatcgggcagcagcccctctgcctcctcctcctggccagcctggcccagagctctctgggacttggctaagcccccttcaagggtgtctgaagggagcactgtcctgactgccaaggtgggggcaggggcacagggctgtccctgcccagcacagcttggccccgtcatctccaaggaatgtcacctgtggggccaggcaggctgagcaactggctgtcctccagggagacgcctcttgggagcccccaccctgggcgccaccacaccccaccccaccccgccccgccccacgtctggacgcactcgaggaagtggggtgagaacccccccgggcccaggtcagcttctctcagggttcagcccagcctgggcacagcacatggatggggcaggatgctgcccgcctgttctgggcccccccgccccctgctgagagcgttgtccccttcccagggcctctgtaggagggtggggcggggccaggcctgcccacggggtccaccttctgctccagccagaggagggtcctgtagggatcccagctggggaaggtg

SEQ ID NO: 19024 - DNA, 2300 bp, Homo sapien
gccctgctcatagatactatctgtgaccagcacgtttttctcccgtgtgcgtgagcttggcctctccaggctgcggtgagccctttccctttccaaagctctctccaggagtgtctggcacagagagagccatggggctgctggaccctggcactgggagaggattcgtcactcccaggaagcaggcgggaagcatggcagcgtgggctgtgcttctagtactgatggcctcaccctctctccctgcaggtcatctttctgtccaagggcaaggatgccatgcagtccttcatgatgccattttatctcatgaaagactgtgagatcaagcagcccgtatttggtgcaaactacatcaagggaacagtgaaggcggaagcgggaggtaggtgatgggaactcagggacacgcatggggcctgcagggaggtgtcctgggaacctctgactgccgccgtgggggcgtccccttcagacccttatcgccctagccatgacctcttcccagctctgggctgccagctggtggggtttgattgccaagaggtggggaaaatgctggcatgaaagacagcagctcagatcagcttttcagagcgtgaagtctgcagaagcctgcggactgagtcaagatgcttagtgcaacttggcgagcgcatacaaattttagactcaggaaggagctgcatcaggttcttgagaggggccttttcatgagagccaggaagaggcagctgcctctgggaagccagagtcaccctgctttggggctggctttttggcaggccccagagacctctgcattgaacttgccttccccttgacacccagccaggcccgcccttgctattgagacactcttggtccccctttgggcagaagccaggctagaggggccggagtctgtccttgggcccccttaggacgagaggtctgctctgaattttaaggtcggctgttgctgagtgggcttgttcctgtgaagctgccgagtgcttgactgggggcggagagaaaccttgatgtggccttggcacccgtgtacatattgggccaagggtgggaggacaggcttgttccaggaaggagaggccattgttccaaagggggaagcgagtacagcagggccaggccaggctgcagtgctggctcctatgcaggcagcaggctggaaaccatggcaccaggaagtccccatcacagtgcaggcccagcccccgcaggcctcccgggcgttggatgaagtcctggagaggaaaacagccatctctttgggcataagttttcttttcctgtgctgtttattcactgtccttcccctttcaggtggctgggaaggctctgcttcctacaagttgactttcacggcagggggcgccattgagttcggacagcggatgctccaggtggcatctcaaggtatccaggctccgaagattaggggctaaagacacactaaacatgtaggggtttggtatgagtttgcttccttttcgttttgctttttcaagaactcaagaggtaagtgtttgggcaccaggctgaccaggcctaggagttgggaaggaaagctgtcattggcatcagctctgtcctgtacctcagagactgcgtttccctgcctggggcaggtggatgacgttttgacaaagctgtttggactcaaggacactttactatggcctcataaaacaaacactaaaccaaccattcgactgcggttccgcagccattgaaaatgaccgagggatgggccagcagacatcctccgccagctcactcctaccccagccctgagcctccctcccggcctctgtccaccctccagccttgcccttgacctcccttgccttcccctggctctgacctctcccgtcctctctcatccctgaccaaggtggccccccgagtatgggtggagggtggagtgggatggacagaggatgtctgcggggcacattcctgagacccagtagctcccatctgcaggcagcggggctgccctctccccgccccaaggcaggccacgctcatttctctttccccttgtactcgtagcctccagaggtgaagtccccagtggagcctatggctactcttacatgcccagcggggcctatgtctatcccccgccagtcgccaatggaatgtacccctgccctcctggctacccctatccaccgcccccacctggtgagtgtgtcctttgctgcccccactcccctcatgagcccacctacccaggctccccccaggccagggagactttattccttgagctgcttcaggaccaacgaagg

SEQ ID NO: 19025 - DNA, 2300 bp, Homo sapien
tcattgcatcctgtctctcctccagtctctgccaagagaagccttaaatggcctctgtctccttttgttccttgggtattgaaaatcagaccagccagccctgggttgaactatgccgaccctgaattgcctcttgaaggcagaaggagcttaggaggcacctgagtccccaaaggagacatcgtggagtcagagccctgtacccagctaaggccagcatccagctgccctgtgacttgggaatgtttgatgagtcagaggaaaatgcctagagtgacccagcatgctcactttccctctatcttacccgctcagagtttcatgggcccagcctgttgctggtaattccttcttttctctgagcagtacttctcttctcttttttttttttttttttttttttttttagatggaggcttgctctgtcgcccaggctggagtgcagtggcacgatctcagctcactgcaacctccgcctcctgggttcaagcgattatcctgcctcagcctccccagtagttggcattacaggcacccgccactacacccagctaattttttgtatttttagtagacatagggtttcaccatgttgggcaggctggtctcgaactcctgacctcgtgatccaccctcctcggcctcccaaagtattgggattacaggagtgagccaccgcgcccagccattttcctttgcttataccagttgtttcccacttacccttccccagtcagagaaagttgtgatatatggggggaggcagaagacaaacagaaccgtgtgaacctttttatcatgtaatcagagacacctcacactgttttgttgcatctctgtgtgtgagtcagttcccaggcctggccagcttttcgtgccatttggcaacatctctggggactgtttttctttctgtctctgtggaactttctgagacaagaatgtatctatcctgctcggccttctacctggcttagggctcagtcctgctaagtaaggtgtgccttcagcctgctgttttagaaagtgcttcagcctgctgtctgaaaaagttgtatctataacaattgaagtgttaagtccagtgtccaaaatttgataattaggctgggcatggtggctcacgcctgtaatcccagcactttgggaggctgaggtgggtggatcacttgaggtcaggagtttgaaacccgcctgaccaacatggtaaaacctcgtctctactaaacacaaaaaattagccaggcgtggtggcgcatgcctgtaatcccagctacttggaaggctgagacaggagaatcgcttgaacgcaggaggtggaggttgcagtgagctgagatcacgctatgttgcactgcagcctgggcaacaagagtgaaactccgtctcaaaaaaataaaaaattataattaaaatagtgaacgttactcttcaagtcgtgaactcctttgacaatgatgaaagctgtggactctcctcccagaaaaatgcacatatgacatacgtgatcatctcaagggcttcatggactttcctgcaaaccccgcttaagaacccaggtttaaaagaaccccgaaggacgtcctattgtgatctgtacagtcatctcttagacatgtttatattttaggcttgaaaaacaaaccagcaaaaacagaacatctatcacaaggacttaaaagaaaatagaagagttggccgggcgcagtggctcacgcctgtaatccctgcactttgggaggccgaggcaggtggatcacgaagtcaggagatcgagaccatcctggctaacacggtgaaaccccgtctctactaaaaatacaaaaaattagccagtcgtggtggcgggcgcctgtagtcccagctacttgggagactgaggcaggagaatggcatgaacccaggaggcggagcttgcagtgagccgagatcacgccactgcacgccagcctgggtgacagagtgagactccgtctcaaaaaaaaaaaaaaaaaataaagaaaatagaagagttaagccagattatctaacttgcttgagggatgatggcctcttcagagccctgtagctctgctaccatgttgatcatttgggggctttataagcggggtttgggaaattttacagaacccccaacctgctcatttcttccatggctatattaatgggtttttttgttggtttttagtttttttgtagagatgaggtctcaccatgttgcccaggctggtctcaaactcctaggctcaagcgattcacccgcctcagcctcccaaagtgctgggattacaggtgtgggc

SEQ ID NO: 19026 - DNA, 2300 bp, Homo sapien
gtaacatctgcctcccaggttcaagcgattctcctgcctcagcctcccgagtagctgggattacaggtgcccgccaccatgcccggctaatttttgtatttttagtagagatggagtttcaccatgttggccaggctggtcttgaactcctgacctcaggtgatccacctgccttggcctcccaaagtgctggaatttggctcacgcctttggcgtgagccacaaaccccggcctgcttttcttttttaaatttacatattatttatttatttttattttattttattttgagatggagtctcactctgtcacccaggctggagtgcagtggcgcaatctcagatcactgcaagctctgcctcccgggttcacgccattctcctgcctcagcctcccaagtagctgggactacagccgcccgccaccacgtccggctaattttttttttttttttgtatttttaataaggggtttcactctgttagccaggatggtctcgatctcctgacctcgtgatccgcccgcctcggcctcccagagtgctgggattacaggcgtgagccacgcgcccggcctaaatttatattttaaacgcacataggaaaaaaaaattaaacagtaccaaagagtacaatgcatactgacataccgagtcaccaatccaccccaaattcctagacccatgtctcaaaaatgccacagacattttctgatggatctttgcaaaaattttctatctagatcctattttttatacaaatacaactatatgtatacagcattctgtgcttaataacccttgatgatcttcccatatcagcacatagtctgacttaattctttttaaagactgcagagattgcaggcgccaaaatacatctaaccattggggcagatttcattatgactatccttaacccactgtacttgtcccgcaaggtccaacctggtattgcacaggacctcacagaacgctgctgtttcctgatcttttctagtgaggcagctttgtttcttcacataggagacctccctggaaagcgaagtcaagcaggtggatctagaggttggccaccacagtcaggaaagcagctgtctactgaaaagcaaactctaattccttaacattaacgagtaccggaactaccacgtgggaagtgcagccccctctctccgcctcacggattcagctcggaggtgcaggggtttggtggggggcggttagggaatgacagctgccccgtggaggacgcccagggctgggtcacgagctgacaggagtcagccttattctgtaaatcctagttatcaggatgccggtttcgcgccgtgcccagtcccactcagccttcagtcttccggccgggaccccgctgggcgctaaggggggagcggcgccaccgcgaggccggagagggggctgcgaggggcgcccggccggcctgcgaacgtggtgggagccaggcggggcacacggcctccccttcccatgagggactctccccgccccccgggctcagcgctgggagtggtgagatggatggcggggtgatccgacgccgccagcccaccgcgtccccaagagccggggcctccggctcagctaaacgccccagagtcacgcatgcgccccataaacgtctgctgagtgaacgaaagctccccatccacaaggggacagctcggcgctcccacgccatgtccaggtcgcattcgaccagcaggacttcccttaacgcgctgccggagtccccaagatcgcgcccctgccaggagcggaactgtttatttccgtccggctgaagaggcggggtggggatggcacaagccgattggttacgcaaaatgtggaaccaattcaggcctatgatccaggagactacaagttccagaatgcatccttcctccagcatagggacaggccgaggctgcgggggcgttgcctgctgggaattgtagtcttcatcttgtttgttgcgcaggaggaactggaaggagggagtaaactattaccacgtgacgttcgggtcaggtgtttgggccagcctccgcactcgagctttgattggctgactctaataagaagacgccactaggggcggggcgaagaggggcgcaagctcattgcgttttgagtctcgggacccctgttggagagactatggcgctcaacaagaatcactcggagggcggcggagtgatcgtcaataacaccgagaggtgaaaacactgcggaaggatcctggaggaccaaagttcgggtgtcgaggaagtgggcggtgggtggtgggtggtgggg

SEQ ID NO: 19027 - DNA, 2300 bp, Homo sapien
gcacctgggcccgcacgagcgcagccccgccctccgcggacaccgcctggtgccgccgctgcgccggctagaggagagcctgtgcccgcgccacctacggccgctcgagcgctactgccgcgcggagcgcgtgtgtctgtgcgaggcctgcgccgcacaggagcaccgcggccacgagctggtgccgctggagcaggagcgcgcgcttcaggaggtgggctccgggggcacactcgggtgagccggggctggtgaccgaccgcgcgcgagcgggccgaggaccttggaccccccagtcttcccgggttgggtcttaatctcctcctctaacctgaggatctttgcggtcccttccagccttgacaaggtcatctgctggcggtgatggagatgggaagggaggaaggagggacgtgagaacaggacaaggacgcgaagagcgggcaggggacctgaagccgggccggggtctatgggggtgtaggcgggagggagccgggttaggcccgcggggttccggtagcgtggctgctgctcccgcccggagggtcacgccggtctcagctcagatttgccctgggctgaggcagcagctttcgatgggtgtggcaggcggcaggagggcggcagagggcgaccgggcacacagattctctgtccagctgttccgggggccagtggtgggagcatgtgagccgcggcctctacctcccgcccccagtttcctttggcctccagcccggtcttggcgcctctggccaagggattttccgtttctcctgcctggagcagtgactcataagacctaggggatttgcccggaatccccttttttccaggcctggactgtggatgcaggctctttgggaacagtgatcctcaggacagcttaatgcctccttgtgcagtcacccctccgccgcccacctcccaacctaactggcttactctctgcctcttccccgccggaggaagttctcaaattcatctgagcaacactgagaccagcggacggccctgtactaggcctcctgtcagagacccgaggcagacacccagtcagcctgcacgccccccaggcgttcaggaaaggcaccagcctgggctgcaggcacctctggcatattatgggacatcgtggccactccagtcccacctgatgcacagataccactccccagtcacccccttctctcccctggcaaggcctgggacccgagtgtagggctgtggcctctgccagacctcacactcatggagggtgttgtccacaggctgagcagtccaaagtcctgagcgccgtggaggaccgcatggacgagctgggtgctggcattgcacagtccaggcgcacagtggccctcatcaaggtcaaacacccctccctcagcatggaacaatccactccaaacaaaccatgcccatacctactgagcacaagtgtcccctgacctggcccagatccaggacaggctcagtctggcccctctgtcccctcaagagggccggtgggaagccggggtcagggaaggaggggggtacagtccgggacggttctttgccctcattgccccctctactgtcgtcctgtgcagagtgcagccgtagcagagcgggagagggtgagccggctgtttgcagatgctgcggccgccctgcagggcttccagacccaggtgctgggcttcatcgaggagggggaagctgccatgctaggccgctcccagggtgacctgcggcgacaggaggaacagcgcagccgcctgagccgagcccgccagaatctcagccaggtccctgaagctgactcagtcagcttcctgcaggtgaaggccgctctgggggccacggaaggaacagaagctgggacaggtggggtggagggaggaggaggcagtgggtgcatgacttcctggcagagctgcctccacccccagcaaggaggagccatggccagcagcactttaatgggcatttgtctggcacaggagctgctggcactaaggctggccctggaggatgggtgtggccctgggcctggacccccgagggagctcagcttcaccaaatcatcccaagctgtccgtgcagtgagagacatgctggccgtggcctgcgtcaaccagtgggagcagctgagggggccgggtggcaacgaggatgggccacagaagctggactcggaaggtgggcaccgccccacgcccccccgatgactcaccctctgccagcctctcgcacaggcccccaggcctggcgcccatccagaagtggaggaggaaaattgtgcctggcacagg

SEQ ID NO: 19028 - DNA, 2300 bp, Homo sapien
ggatggaggctgagtccttcccattccttccactgtacctctcgcgttctccgcccgcgctcactcagtttcacaccctttcagcagcgcccttccttaggaccacgcggactcccctgggggtcgcgcgggctcggaggcctccctgcgttgtctgggcggggactgggagtccgcgggcccgcaggcgggcggtgctgcggggcgggccgagctgggggcgggcgggggccggagccctggcctaggtcccagggggaggtgccgcggcgcgaacggcccgggtccctcccaggccggagcacaatcggcggcgccctgggcggccgcggagtcatggacggcagtggacccttcagctgccccatctgcctagagccactccgggagccggtgacgctgccctgcggccacaacttctgtctcgcctgcctgggcgcgctctggccgcatcgtggcgcgagtggagccggcggacccggaggcgcggcccgctgcccgctgtgccaggagcccttccccgacggccttcagctccgcaagaaccacacgctgtccgagctgctgcagctccgccagggctcgggccccgggtccggccccggcccggcccctgccctggccccggagccctcggcacccagcgcgctgcccagtgtcccggagccgtcggccccctgcgctcccgagccgtggcccgcgggcgaagagccagtgcgctgcgacgcgtgccccgagggcgcggccctgcccgccgcgctgtcctgcctctcctgcctcgcctccttttgccccgcgcacctgggcccgcacgagcgcagccccgccctccgcggacaccgcctggtgccgccgctgcgccggctagaggagagcctgtgcccgcgccacctacggccgctcgagcgctactgccgcgcggagcgcgtgtgtctgtgcgaggcctgcgccgcacaggagcaccgcggccacgagctggtgccgctggagcaggagcgcgcgcttcaggaggtgggctccgggggcacactcgggtgagccggggctggtgaccgaccgcgcgcgagcgggccgaggaccttggaccccccagtcttcccgggttgggtcttaatctcctcctctaacctgaggatctttgcggtcccttccagccttgacaaggtcatctgctggcggtgatggagatgggaagggaggaaggagggacgtgagaacaggacaaggacgcgaagagcgggcaggggacctgaagccgggccggggtctatgggggtgtaggcgggagggagccgggttaggcccgcggggttccggtagcgtggctgctgctcccgcccggagggtcacgccggtctcagctcagatttgccctgggctgaggcagcagctttcgatgggtgtggcaggcggcaggagggcggcagagggcgaccgggcacacagattctctgtccagctgttccgggggccagtggtgggagcatgtgagccgcggcctctacctcccgcccccagtttcctttggcctccagcccggtcttggcgcctctggccaagggattttccgtttctcctgcctggagcagtgactcataagacctaggggatttgcccggaatccccttttttccaggcctggactgtggatgcaggctctttgggaacagtgatcctcaggacagcttaatgcctccttgtgcagtcacccctccgccgcccacctcccaacctaactggcttactctctgcctcttccccgccggaggaagttctcaaattcatctgagcaacactgagaccagcggacggccctgtactaggcctcctgtcagagacccgaggcagacacccagtcagcctgcacgccccccaggcgttcaggaaaggcaccagcctgggctgcaggcacctctggcatattatgggacatcgtggccactccagtcccacctgatgcacagataccactccccagtcacccccttctctcccctggcaaggcctgggacccgagtgtagggctgtggcctctgccagacctcacactcatggagggtgttgtccacaggctgagcagtccaaagtcctgagcgccgtggaggaccgcatggacgagctgggtgctggcattgcacagtccaggcgcacagtggccctcatcaaggtcaaacacccctccctcagcatggaacaatccactccaaacaaaccatgcccatacctactgagcacaagtgtcccctgacctggcccagatccaggacaggctcagtctggcccctctgtcccctcaagag

SEQ ID NO: 19029 - DNA, 2300 bp, Homo sapien
tgactttgtcactaaccaaaattacagatatctctgggtgcggtggctcatgtctgtaatcccagcactttgggaggccgaggcgggtggatcacctgaagtcagcagttcgagaccagcttggccaacatggtgaaaccccgtctctactaaaaatacaaaaattagccaaatgtggtggcgggcgcctgtaatcccagctactcaagagtccgaggagggagaatcgcttgaacccaggagacagaggttgcagtgagctgagattgcgccactgcactccagcctgggcgacaagagcgaaactccatctaaaaaaataaaaataaaaaaacattatttggaattttcaatgcgaaatatgtctgttctccccagcttgttaatttattatttatttatatcggcatggactcatagatgtttattttacactttgggttataatcagtgctactttacttattttgttgtcattctggtgtagtgttttaacttaacattattgagatataactcatacaataaaacgcaccactttaagtgcataattagatgagctttaaatacttccagttggggaacccccaaccccaccacaggtgtccccagtgtccaggggccagaactacattcctcagacaagggacttagggaatgacgtcaacttcccatttcaggtctagaaaagtccaagttccctacttggggtaaagagtcgctaaaggagctgggcgctgtggctcacgcctgtaatcccagcactttgggaggccgaggcaggtggatcacctgaggtcacgagttcaagaccagcctggacaaggtgaaactccgtctctacaaaaaaatacaaaaatttgcctggtgtggtggcaagcgcctataattccagctacttgggaggctaaggcaggagaatcacttgaatccgggaggcggaggttgcagtgagccgagatagcgcccctgcactccagcctgggcgacaagagaggaactctgtctcaaaaaaaaaaaaaaaaagagtcgctaaggggcaaaaacatatgtacatcagcagttatttttctctgcagtcagcagctcaggaactttgctaagggtgccagggaggggtcgagcgcaaaggtgcaggcatgacacagctagacgcgcccagcccctgcggagcgctggcctggcccagaaggaccagagggatggaggctgagtccttcccattccttccactgtacctctcgcgttctccgcccgcgctcactcagtttcacaccctttcagcagcgcccttccttaggaccacgcggactcccctgggggtcgcgcgggctcggaggcctccctgcgttgtctgggcggggactgggagtccgcgggcccgcaggcgggcggtgctgcggggcgggccgagctgggggcgggcgggggccggagccctggcctaggtcccagggggaggtgccgcggcgcgaacggcccgggtccctcccaggccggagcacaatcggcggcgccctgggcggccgcggagtcatggacggcagtggacccttcagctgccccatctgcctagagccactccgggagccggtgacgctgccctgcggccacaacttctgtctcgcctgcctgggcgcgctctggccgcatcgtggcgcgagtggagccggcggacccggaggcgcggcccgctgcccgctgtgccaggagcccttccccgacggccttcagctccgcaagaaccacacgctgtccgagctgctgcagctccgccagggctcgggccccgggtccggccccggcccggcccctgccctggccccggagccctcggcacccagcgcgctgcccagtgtcccggagccgtcggccccctgcgctcccgagccgtggcccgcgggcgaagagccagtgcgctgcgacgcgtgccccgagggcgcggccctgcccgccgcgctgtcctgcctctcctgcctcgcctccttttgccccgcgcacctgggcccgcacgagcgcagccccgccctccgcggacaccgcctggtgccgccgctgcgccggctagaggagagcctgtgcccgcgccacctacggccgctcgagcgctactgccgcgcggagcgcgtgtgtctgtgcgaggcctgcgccgcacaggagcaccgcggccacgagctggtgccgctggagcaggagcgcgcgcttcaggaggtgggctccgggggcacactcgggtgagccggggctggtgaccgaccgcgcgcgagcgggccgaggaccttggaccccccagtcttccc

SEQ ID NO: 19030 - DNA, 2300 bp, Homo sapien
ggcctgggcctctctccaacatttccttacttatgcactgttataggttgaatcctgttccctgaaaaagacgtattcggatcctaacccccaggacctgtggctgtgaccttatttggaaatagagtattttcagatgtgactgagttaagatgagggcatactggagtagagcgtgccctaatccaacaactggtgtcctgataagaggaaatgggcaccgggcacagtggctcacgcctgtaatcctagcactttgggaggctgaggcaggcagattactcgagcccagcagtttgagtgggcaacagagcaagactccctaaaaaaaaaaaaaaaaaggacatttgaacacagacacagagaaaaggcaaatgacaacagagactgatattagagcgcatcttacagctacaagccaaggaacgccaagaattgccagccagtaccagaagctgggacagacgcccaggacagagtctccctcagatcctgcagaaggaagccacgctgcagcaccttactgaaacacagcatttctttctattccaaatggagagaatacaccagagtggtatgagcagttacctgtgactttgtcactaaccaaaattacagatatctctgggtgcggtggctcatgtctgtaatcccagcactttgggaggccgaggcgggtggatcacctgaagtcagcagttcgagaccagcttggccaacatggtgaaaccccgtctctactaaaaatacaaaaattagccaaatgtggtggcgggcgcctgtaatcccagctactcaagagtccgaggagggagaatcgcttgaacccaggagacagaggttgcagtgagctgagattgcgccactgcactccagcctgggcgacaagagcgaaactccatctaaaaaaataaaaataaaaaaacattatttggaattttcaatgcgaaatatgtctgttctccccagcttgttaatttattatttatttatatcggcatggactcatagatgtttattttacactttgggttataatcagtgctactttacttattttgttgtcattctggtgtagtgttttaacttaacattattgagatataactcatacaataaaacgcaccactttaagtgcataattagatgagctttaaatacttccagttggggaacccccaaccccaccacaggtgtccccagtgtccaggggccagaactacattcctcagacaagggacttagggaatgacgtcaacttcccatttcaggtctagaaaagtccaagttccctacttggggtaaagagtcgctaaaggagctgggcgctgtggctcacgcctgtaatcccagcactttgggaggccgaggcaggtggatcacctgaggtcacgagttcaagaccagcctggacaaggtgaaactccgtctctacaaaaaaatacaaaaatttgcctggtgtggtggcaagcgcctataattccagctacttgggaggctaaggcaggagaatcacttgaatccgggaggcggaggttgcagtgagccgagatagcgcccctgcactccagcctgggcgacaagagaggaactctgtctcaaaaaaaaaaaaaaaaagagtcgctaaggggcaaaaacatatgtacatcagcagttatttttctctgcagtcagcagctcaggaactttgctaagggtgccagggaggggtcgagcgcaaaggtgcaggcatgacacagctagacgcgcccagcccctgcggagcgctggcctggcccagaaggaccagagggatggaggctgagtccttcccattccttccactgtacctctcgcgttctccgcccgcgctcactcagtttcacaccctttcagcagcgcccttccttaggaccacgcggactcccctgggggtcgcgcgggctcggaggcctccctgcgttgtctgggcggggactgggagtccgcgggcccgcaggcgggcggtgctgcggggcgggccgagctgggggcgggcgggggccggagccctggcctaggtcccagggggaggtgccgcggcgcgaacggcccgggtccctcccaggccggagcacaatcggcggcgccctgggcggccgcggagtcatggacggcagtggacccttcagctgccccatctgcctagagccactccgggagccggtgacgctgccctgcggccacaacttctgtctcgcctgcctgggcgcgctctggccgcatcgtggcgcgagtggagccggcggacccggaggcgcggcccgctgcccgctgtgcca

SEQ ID NO: 19031 - DNA, 2300 bp, Homo sapien
gtggatggaggatggcgcagggacgctggatgggacaggaagggaaggggtggccaggaggcctgatgggcagggagggatgggagagtgcacggctgggggtcggtgaggtgggaggactgagacagaggtggctggaacaggagagggcacgaaggcagtggtcagagaaggaagaatcgatgcctagaatggagattttagagctggtgacagggccagggtgagttcacaggagcggctgagatgaggtgaaggaaaagggctccagagtgttgcgggacattccttgtagctgctgaagccgccgaggaggatgagacgagatgtactgctcatgggcgggtgcagaagactgagctaggcacggaagtttgagttggaggccggtagatgagggccatgtggaggaagggagcgacaggggcagccagtagcaccaggggagccaggattttgcaagagagagggaaagggacatgggggtgcctgtccctgggggagggttgggtgccctgggagagcctgccctccggcctcctgtgttcctgtgtgaaatgctggaggctgggggcccggaggagctctgggcttaggaagatctgaggactttgaccaaattatcaacttctctgagcccgtttcctcctctgtgatgtggggatagtaatggtccccatctcagtgcattgcgggaggagcagaaacaaggtggtgaagcttttgaccaggtgctgggaatggagcccctgggacctgcgtggtttgtcctgctctcatgagagcacggtgttttgattcccaagggactcagggagcgcaaccgaataggggtcccttcctcccctctcagtctcaaaactagggccagggactggccggatccccagaagaatctagtttatccagcaagtaactgcccacttgtcagacagctttggtgctttgggaggtccctgcagtcagcttctcaagccccagggcctcctgggccactgacccctctgcagtgagacagggaccaacggctttagtgtttggggtcctccctgcgaggcctcctgagccagcattatcgctttcctgtattgatgggtggggggttaggcccagagaggacaggtgcttggcctcagcttgctcagcatgcaagaggtagaaatgggaatggaagttgggtcctgagcccaaggcttccgctctgctcaggcaccaccctgctgcagattaggaaggactttgtctggacccccccggggcacggccccaactctccctgggttagaccgaggccggtgctctggaggctggcctggggtggcgtggggaggggctgcctggtgtctgcaggcatggttggttgtctgagaaaggacatcacagccaatcctggccttctcttgttgcttgtcccgtgggcccgcaccacaggcccagctgagagccagcctggaggttacccagcagcaggccacccaggccgaaggccagctactagagctgcgcaagcaaagcagccagatccaggtacgaggcctgtgcctgcccgcccaccatggcctcacactgcatcctggggcggccaccagctggtccctggaacaccaggcagcagggagcggggctgagcagggagctgggcacaggggtcctggggaggttcccgggaccctgcctccccacatccctgaccctcagcccagcaggcagccctggccctagcctcccttggtatggcacagggccctggccaccctgaagcccctcctgttcccgcccagaactcggcctgcatcttggcctcctgggtctccggcaagttcagcagcctgctacaggccctggaaatacagcacacgacagcactgaggagcatcgaggtggccaagacgcaggcgctggcacaggctcgagacgaggagcagcggctgcgggtccatttggaggctgtggctcgccatggctgcaggatccgggagctcctggagcaggtggatgagcagaccttcctgcaggtgcgagggctcagggcataggtggcggacttgcttccctgcccctcaggcccaggcttacttgttctccctggggctcaggaatcgcagctcctccagcccccagggcctcttgggccactgacccctctgcagtgggatgaagaccaacagctgggtgacctgaagcagttgctaagccggctgtgtggcctcctcttggaagaggggagccaccctggggcaccagccaagcctgtggacttagcccccgtgggtaagactgaccccaggcctccccctgct

SEQ ID NO: 19032 - DNA, 2300 bp, Homo sapien
ctgcccggggcggggtcagcgcgcggcagggctggggccagggtcccaggtgccacaggcccgtcccctggtttgtcccactggccactgtgacctctatatgtccaaggccaaactctgccctccacctacgcctctcaggacatagcaccccagccacctgcgtgctcaagacagaaacccaggtgtctcccttgccgccctctctgctgtcccccgtgtcccctctggcctgctttcgcctccacaaggtaccacttcccctcagcgtttctcatctcctcctccatcttggtctcccttccctgatccccagctggttctttgcctccctgcactcctacccgattcgggtcttacatcctgcccccttcagcccccagccaggtgatcagtctccatgaagcccaaatctgatcatgtgccaacctgcttccaagcctataatggcccccatgaccctacagtaagagccagactcccccaggaccctgcccgatcctgcccctgctgacccccagggcctggcccacagatctcagtggcacaaatctgccactagggaccccgcgtgcccagttctttcccatcccagagacgggaccaggctgattcctctgcctagaatgctcttccccaggtctttctcctggcttgcgcttcctcaatcctcacatgccagcctgaaggcggcctccccttcctcctcctggcccgtttagcagggtcaccccaacccctctatcacatgccatgtgctttcctcactgcattttgtaataatacattcacgccttactggaacactgacttcttaagtggattctaagtctcttaagggcagggagctcgtctgatccatttaccaacagcccccatagccccctcgccctccacaaccccgcacagcgaatgaaaggaggctctcggagcgcaggagacacacgacggttctctagcgcttgggcacggagcagggagctgctgcctcacgcccaggctttgttcatccagagggcaccgagcagcttctgagacccaccctgtgtcactggccgggctgcatatcccagtctgatgcacagacccacgattttttgtttgtttattttctgagacggagtctcgctctgtcgcccagactggagtgcagtggcacgatctcggcttactgcaagctccacttcccgggttcacgccattctcctgcctcagcctcccgagtagatgggactacaggcgcccgccaccacgcccggctaactttttgtatttttagtagagaccgggtttcaccgtgttagccaggatggtctcgatctcctgacctcgtgatccgcccgcctcggcctcccaaagtgctgggattacagtcgtgagccactgcgcctggcagacccacgacttttataatcagctcccaggttgggagaagccccttacagatgaggctccccgcccccgccgggtgcccgagagagcagggcgcggcccgcaggagtcacccggcggtggccaggctgcggcgggtccggacccctcccgctcccggcggatgcgtcacctcgcgcttgaggcgctcggcatccagcagcgcccgctcgtggaggcgacactcgcgcacggtgcacacgctgcacacacagcggccctcggtccggcagaagagctccagcggccgcccgtggcgggggcagcgcgcggcagggtcggggccggggccgggatcggggccgggatcccgggcgggcccggcgcgcaccacctccagcacgccgctgagggccacgttgcggcgcagctcggcgccgtcgggaaagggctcccggcactcggggcacgcctttccgcagcggtcccaccagtcccggatgcaggccccgcagaagttgtggccgcagggcagcgtcactgggtcctggtagagccccaggcagatggcgcaggtcagcttctcctccagcagctgcgcggccatggcccggcggcggcgagagccaggcgggccccgggcgtcttaaagggaccgcgggcctcgcgcgctgagggcgcctgggcgtggctaacgcggggcggggcgagatccgggcggggcggggcgagatccgcgcccgggaaggcggaggggggcggcaggcccttctctgacaccctcgacgagcgaccgccgcaggggcctaggccacccctgcccacctcggcctggcccgctcgaaggttccgcgttcccgccttgcgcccctccctccgttagggtccacgccaccccggctgagagctgagttcggctctctagggtc

SEQ ID NO: 19033 - DNA, 2300 bp, Homo sapien
aggctgcggcaggtccctggtgggcaggcctcagcctgagggggcgcaggccagcagaccaccccgtacccctcactcttcttgcagacatgcgggagccggtgtttgagttcgtgcggccgcccccttaccaccccaagcagaagcgcttcccccaccggcagcccctgcgctacctggaccggtacagggacagtcatgagcccacctatggcatctactaaggagccagagtgtgcgcatttcagagcatgggattgatcggcagcaagagtaaagacacagctccagaggcccacactgtggggtctgggccctgccttaggcagcccccctctttggccccctcccgtcaggcccagggcttggagtgaaagtgactctcaggtggtggggtggggaatgtgaataaacatgatttcttgccgggcttggtggctcacacctgtaattccaacactgggaggctgagaagggagggtcgcttgagcccaggagttcaagaccagctggcaatataatgagaccctgcctgtattttttaaaaaaagggatttctgccatagctggcctgggtcggtgctccagggccagaggaccccgatggagcttcatgggtgggaaacgggctgcctcccaccccactaagtgcgtcctcacctccgtcttctgagggtgtcaggggccctgggatccgaagcaaaagcaggcagtgggccaaaaacaggtgtggcccagggaagggagacatcccaatccagcaggttcctgaaacccagctccccgaaaaagtggagcagagcagctgggctcaggaaggagcatttattgagcactggctctgtgcctcaggggggtcccaccggcccctggagagagagtgcctgcccgagcactgaccctctgcacaggctccagcccccaccccatgcttgggaggagaagccacattaggtaggcaacagcgtgtctcaagagacctgctcagggtcagaaaacccatggagtcttgcggctggatggttaggtgttttgtttctcccttaccaaaagcagaagtctggctaactagtaggtggagggtagatccgtgcactttgtccagaaagaaacttcgtctatggccgcacagaggacgcagtgcttgctgcagcagtgagagctcgtgccgcctcaacatcagcccagcttggttagaaaggccgtactctcctggggttccccctggcctgatacacactgtcaggtaggtgggcgctaggccccagacccgccttgcctgctcagcttcaggggaaatgctggagtgcctgtaaatactgaggctgcagatcagcttggaccccaggcaaggaactctccccagcggagggcagcaggaagaggggatgctgattgcagatgaaagctggtttgtgtattcattcagggccatttgaaaaataccagttaactggtccctgtctcttggtgaccagacatttccatctcgctgtttactttaaaagaaccaaaattacgtgtagcccagagaagggagacaccccagtctggcaagtgtccgaaacccagctccaggaaaaagtgcagcagtgctcgggtctgcagggagcccgccagcccgtttcatcgccaagccccgggggattgttgggggtgggggtctatgctgttaggcgactggcagatgagtccagaagaggttccgcgcggcccgtggtcagaagcccggagtcctggcggggttttcgagcctctggtctccaggacctgggctgaaggcccaggggggtgggatggacccgccaggctgggaccctagagagccgaactcagctctcagccggggtggcgtggaccctaacggagggaggggcgcaaggcgggaacgcggaaccttcgagcgggccaggccgaggtgggcaggggtggcctaggcccctgcggcggtcgctcgtcgagggtgtcagagaagggcctgccgcccccctccgccttcccgggcgcggatctcgccccgccccgcccggatctcgccccgccccgcgttagccacgcccaggcgccctcagcgcgcgaggcccgcggtccctttaagacgcccggggcccgcctggctctcgccgccgccgggccatggccgcgcagctgctggaggagaagctgacctgcgccatctgcctggggctctaccaggacccagtgacgctgccctgcggccacaacttctgcggggcctgcatccgggactggtgggaccgctgcggaaaggcgtgccccgagtgccgggagccctttcc

SEQ ID NO: 19034 - DNA, 2300 bp, Homo sapien
aaattagccaggcgtggtggtgcatgcctgtaatcccagctactcgggaggctgaggcaggagaatcacttgaacctgggaggcggaagttgcagtgagtcgaggtcgtgcccctacactccagcctgggcgacagaaactccatctcaaaaaaaaaaaaaaaaaggacaaggtaaaacagccacgatgtaaacacacaatccagttatgctcctgtactgcataactgcagtatggaatgtcacaataagcaactccttacgagcaggactgggtgtgactgccccacgtattcccctccacacttagcatgtagcaggtgcacactgctgggtggattagaaatgactgtgaaaggtttagctgtttggctgctgtttatgaaaaccagtggaaggtgtggccacttcctgctggatggagagaccctcattccattctcattccatctcaaagtgattgtgagggtcaagcttctgctggtgccagagccactggcctggtcaccaccagccctggcctgggatgtcagagcaggcttcctggagagacccctctcctggggctgggtggtggccaggccaaggtggggcagtgaggaggtgagaggcagaagacacagcgtatacaaaggccccgtggcctggaggcaaagtgcgatggaaaagtcttgccttttagggcaggagggccagggctggggcaaaggagggtcccagattccccaggctaccaagttttgccatggtagaactggatcacaagggcaagcctgagtcctgccagaaacattcacatctgcacttaaccaggtcacttctgcctttgtgtggataatgagaagttggagatagttgagctaacacacaaaccactgcgagcgctttccagagggtaatcttttcatcctgacagctgtcaggtaagcactagtgttaacctgctttttcccaaatgaggaaaccacaaggaagacagtaaggtcacgatctggtttttttttggggggggggaggggcattttgagacggtgtctcactctggcaccgaggtggtggcgcaatctcgtctcactgcagcttctgcctcccgggttcaagttaattcttgtgccatagcctcctgagtagctgggattacaggcgcctgccaccacgcccggctaatttttgtatcattagtagagatacaaaaatttttgtatctttagggttttgccatgttcgtagggctggtctcaaactaattacctcagatgatccgcccacctcggcctcccaaagtgctgggattacaggtatgagccaccgcgcccagccacaatctgggtttttattactattattttattattattattattattgaaatagagttttcacttttgtcgcccatgctggagtgcagtggcgcgatctcggctcactgcagcctccgcctctgcctcccaggttcaagcgagtctcctccctcagcctcccgagtagctgggattacaggcgtatgccacgcccggctaatttttgtattttgagtagagacgggttttcaccgtgttggccaggatggtctcgatctcctgacttcgtgatccacccgccttggcctcccaaagtgctgggattcccggcgtgagccaccgcgcccagccctcaatctgggttttaaacccaagcagagtccggaatcggagctcgcaccccttctcccaaccaggcctgcgtccctggggaaatcaggacgcagcgtccaggggttggaggagggccccggcggccgaccccggtctgtgccgccccctggtggccagccatgggcgagcatatgactgctctcggctccgccccgccgtccaacgggcacttccggagccgggcgtctacagaccgcggccaccttccacctgcgcccgaggcagacggtgcaggggcctccgggacaggcgtctgaggcctgctccgcagcgcgggcccgggggcgggcctaggggcggggcctgctgtggtgcgctcaggcaccgcgctggccacctgtgcccgggtcctagtggcggccgcagtgtcgcaggccggagggaagatggcggcgccctggtggcgagccgcgctgtgcgagtgtcggagatggcggggcttcagcacctcgggtgaggggtgggcagctctgcgggggggggggggggggctgtcgcccgagctgtggggcgccggccttacgtcttctctctgcccgcagccgtcctgggccgccggacacccccgctggggccgatgcccaacagtgacatcgacttgagcaac

SEQ ID NO: 19035 - DNA, 2300 bp, Homo sapien
acacacctgtagctgctatcaggaggccaaggtgggaggatggcttgagcccaggagttcaagaccagcctgggcaacatagtgagacccccatatatttttttaaaatggtagagccactgcttctagtttcaagatattcatcgttatttgcttcaagttggtacacgtgggaatccacgtgaagcctctctcaaactgttaatatccaagcaagcgccaatcagggttctaggacagcaagaggacaagaatggaggaatgcaccgccacctgggtggccagcagcttccacgccaactgccaaggccccatacatcttcatctggagagggctgggagggtcgtggggtagagcgggtgggtttagaggctgaagaaaatgattcagaaacaaaaggacaaggtggccgggtgcagtggctcacacctgtaatcccagcactttgggaggccgaggtgggtgggtcacctgaggtcagtagtttgagaccagcttggccaatatggtgaaaccaagtctctactaaaaatacaaaaaattagccaggcgtggtggtgcatgcctgtaatcccagctactcgggaggctgaggcaggagaatcacttgaacctgggaggcggaagttgcagtgagtcgaggtcgtgcccctacactccagcctgggcgacagaaactccatctcaaaaaaaaaaaaaaaaaggacaaggtaaaacagccacgatgtaaacacacaatccagttatgctcctgtactgcataactgcagtatggaatgtcacaataagcaactccttacgagcaggactgggtgtgactgccccacgtattcccctccacacttagcatgtagcaggtgcacactgctgggtggattagaaatgactgtgaaaggtttagctgtttggctgctgtttatgaaaaccagtggaaggtgtggccacttcctgctggatggagagaccctcattccattctcattccatctcaaagtgattgtgagggtcaagcttctgctggtgccagagccactggcctggtcaccaccagccctggcctgggatgtcagagcaggcttcctggagagacccctctcctggggctgggtggtggccaggccaaggtggggcagtgaggaggtgagaggcagaagacacagcgtatacaaaggccccgtggcctggaggcaaagtgcgatggaaaagtcttgccttttagggcaggagggccagggctggggcaaaggagggtcccagattccccaggctaccaagttttgccatggtagaactggatcacaagggcaagcctgagtcctgccagaaacattcacatctgcacttaaccaggtcacttctgcctttgtgtggataatgagaagttggagatagttgagctaacacacaaaccactgcgagcgctttccagagggtaatcttttcatcctgacagctgtcaggtaagcactagtgttaacctgctttttcccaaatgaggaaaccacaaggaagacagtaaggtcacgatctggtttttttttggggggggggaggggcattttgagacggtgtctcactctggcaccgaggtggtggcgcaatctcgtctcactgcagcttctgcctcccgggttcaagttaattcttgtgccatagcctcctgagtagctgggattacaggcgcctgccaccacgcccggctaatttttgtatcattagtagagatacaaaaatttttgtatctttagggttttgccatgttcgtagggctggtctcaaactaattacctcagatgatccgcccacctcggcctcccaaagtgctgggattacaggtatgagccaccgcgcccagccacaatctgggtttttattactattattttattattattattattattgaaatagagttttcacttttgtcgcccatgctggagtgcagtggcgcgatctcggctcactgcagcctccgcctctgcctcccaggttcaagcgagtctcctccctcagcctcccgagtagctgggattacaggcgtatgccacgcccggctaatttttgtattttgagtagagacgggttttcaccgtgttggccaggatggtctcgatctcctgacttcgtgatccacccgccttggcctcccaaagtgctgggattcccggcgtgagccaccgcgcccagccctcaatctgggttttaaacccaagcagagtccggaatcggagctcgcaccccttctcccaaccaggcctgcgtccctggggaaatcaggacgcagcgtccaggggttgga

SEQ ID NO: 19036 - DNA, 2300 bp, Homo sapien
acactttgggaggttgaagcaggaggatcacttgagcccaggagtttgagaccagcctgggcaatatgttgagacaccgtctctacaaaatgaaaaactaaaaaaagaggaccaggtgcgtggctcacacctgtaatcccagcactttgggaggctatggtgggaggattacttgagcccaggagttcgtggccagcttgggcaacatagtgagacctcgtctccacaaaaaaatagctgagcgtggtggcatacacctgtactcccagctactccggaggctgaggtaagaggatcacttaagcccgggaggtcgaggctgcagtgagccacaacggtgccactgcactccaggcaacagagcgagactctgtctcaaaaaaataaatattaaaaatttaaaaattagctgggcatggtggggcatatctatagtcccagctacttgggaggctgaggtgggaggattgcttgagcccagctggtcgaggctacaggtgtgttcacaccactgcacttcagcttgggtgacagagcaaggcacttgtctcaaactaaacaaaacaaaactataatgataacagttgtcattatggagcatttcctgtgtgccaacctcaatgccgaaggctttgtttatattttacttatttatttatatttagaaatggggtctcacgatgttgcctcggctggtctcaaagtcctgggctcaagtgatcctacccccttggcctgcggattagctaggattacaggcatgagccactgtgcctggcctgctttgtgtattttttaagcttttaccctcacacagccctgcaaggaagggctacaaggaatgtttacagacaaggaaactgaggcttagagacatgaagtcatgtgctcgtaagttccacagcaaacaagtaaccttgccaggattgagactgtggtctgtctcactccatacctgggctctttcatggcccctgctgactcccagagccaggcagagtcagggacgatgtggggaggggcctcagtgacggctggctcagctagcatccagggctccacctccctctcagctcagggaaggtgaccgcccatccaaacctgccttgcaggaccgtgacttcttggagaatgaacagttcttcctggagaccctgaagaaagggtcctacaatttgacatctcattcagcctgagtgggaccccagccgattccccaacagagggttcggaccccagaactgtcctgttcctccggctgcctccatggaggcagtgcctggggaggattctgagatgcttgaggcctgatgacagctcttccgtggacagggtgcaagtgcatcctttccaaatgtgccagcccggggcagcccctgcctctggggctctgtggtgtaggctatcttaccatggctttggctgccctgccccaaagccattggcttggatctgagggtctgagttggcagcaaggacccccagctctcactgggctctgtgggctccccctgggctctgtgggctccccctgctccacaggtagactgttgtgggctctttttgcctgggcctcttctgaggcaggagctttcttgagggatgccacaaacagccttccctactccctgccagagcagttccctccctgatgagctggagaagggccctctggcctcctgacagtacagggagggcaccagctagatcctcccttgtggtgtgagatgttcctggaactcagccaggccctcctcctcctgggcttgcccagagcccccaccctattcccagcattgcccgaaggaccaaccagtttgggtgaacagtggcctcctcagcttcctccccatctgggtgccccaccggcggcggagggagctgtggcgatggtggggtgtggggagggacgaggagggaagcctctgtgctgctcacctgcccaaagcccagctcagcgggtacgcagtggaggcgacaaggaaccaatcacaactacagaggtttctctgatcctcctccactcccgctgcttcaacttgactaagcttaaaaaaactgcttttgccatggctcatcggagtttatacttatttcttagaaaatgtttcctgttatttgctggacaagtcccaaagaacaggcagatgttcttattaaaagatcagcctataagattggtcaggaccaggcgcctctggccacgtgcctctcccctccagcacctgcggtctgcggtggcacctggcagctggaccacagccaggagaagggtactattagccctgcttcaaacatgc

SEQ ID NO: 19037 - DNA, 2300 bp, Homo sapien
tctgtcctgagagagggacacagaggctgttcaccctgcccctgccccgtccccgtgtcccacacagaggctgcccaccctgctccgtccctgtgccctacacagaggctgcccaccctgccccatccccgtgtcccacctagaggctgcccaccctgccccgtccccgtgtcccagcagaggctgcccaccctgccccatccccgtgtcccacgtagaggctgcccaccctgccccgtccccatgtcccacctagaggctgcccaccctgccccgtccccgtgtcccacacagaggctgctcaccatgccccatccctgtgtcctcaggtcccctgtgactcagaaccatgccgcctcagcactccctacaggttccccaaagaggggaacagcccctggagacctctcagccactggtttgttttttgtttgctgcttcatttgggagtttaaccctgggtgaggaagaggtgctttgagcttcctttggggtccctgggacatgagttacaccagcccctcctggacactcgcaggcccagtgccctgggcctcctgttcatttctctgttgttgatgtttcagagcctgccacgtgtttcccgagcacccagaaacccacagagccttccgtgcccgtccaggtaggggtgtgggcagacaggtctagctcagggcctagggagcaattctccatgcccaggggcaatacccacagtttgacctgacgacctgccaggaaaaatgtgtcaaacataccaaatgtgacgtcagccagctccccgggcaccccccactagaacttgcctgaatttctagcctcgctgctcctgggcagagctgggtgttaatttgcctacatcagtggggagtttaaggaggcagccaggccggggagctgggatgctgcagtcagaaagcagggccgcagggtcctgttctgtcaagaaagcctcctccacccttgccatcctcccaccacacctctgcctctgtttcccatgtgtggcagtcacctgtgacacctgggcctgggaggtgtgccccccccccccccaggagtgtgtccctgggagatggtgggtaggggacagctcgtgggaaccagattagtgtcaacatgtgggcttcaggcctgacaggaaaagccagcatcagcttttgtcatagcgaagactctgctggggttcagccatttgtctgggaagccggagaccatgctggggaggaagctgttccggagggtggagggagacatgctcctgaccagatctgcaaggggaggtacactggggactgcttagccgcagtgactgttactttccaaggccttggccccatctgcagccacagatcagatgcagggaggtccagtgagcagtgggccaggaggtagctgatctcagctgggcccctgtcccctccctaactagaaacacctctcttcctctcctccagcccctgctcccagagtccctggcccggagcctgctgccgagcacagaataccagaagcagctcctggcagcacaggtgcaacttcagtgcagccccgctgagctccaggccgagctgctgcatagccaggcccggctggcagagctggaggcccaggtgaggggcagcggggccgttggtgctggtggcagggttgcgacaggaggggacactgagagtggctggaagcttccccaggagggaggaagggctgttggcacagggcagcgtggagtacagccacctcccctccctggttgctggccctcctgctgtctcccaggtgcggaagctggagctagaacgggcccagcatgagctgctgctggggagtctgcagcagcagcaccaggcagacctggagctcatcgagagtgcacacaggtaccctggcgctggccccagctctgccttggatctcacactgaccccaaaggccacccagtgtgcctggagaggcctttaggcggcagccctctgccttccttgcgccatggctgggtgttctgttggcagaagccgcatcaaggtgctagaaacatcgtaccagcaacgggaggagcggctccggagagagaacgaagagctgtcagctcggtatctgtcgcagtgccaggaggccgaacaggcccgtgctgagcttacggcccagcaccagcggcgcttggcggccatagcgcaggagaaggaccaggaaatggagcggctccgggagctgcagcggtgaggcccagggacaggcagctggggagcaggcttgcaaggagtagccggaagagagccatccccacgagacccttc

SEQ ID NO: 19038 - DNA, 2300 bp, Homo sapien
acacctgactaatttttttgtgtttttagtagagatggggtttcacatgttggccaggctggtcttgaactcctggccttaagcgatctgcccaccctggcctcccaaagatctgggattacagacatgagccaccgtgctcggcctgatttttctttagacctgtgtgcccatggctgtcatttgatcctgttcctgttctctgtgggtagaactgtccctggttcatgtgatggaagtcaaggtctctgtacttcgtggtgttctacagacagcacgtggcctgccacctgagccggtccaggagccactgctcactgggcctcagctgactgtgcagggtccctgggcatcgtgacgcccagctgcaggctgctagggggccactgggactggctgtttcccctgcctgacaccctcctttctgtcttgaagtaggttcttcgcagacagtggcgcagaccccaagggagaaccaggctccaaacagagccctccaatggcttccagccccatccagcccaggaagggaggagctgactggttgggcctcaaggacgaggacttggacctgttccctgcctcacccaccagagaggcccatcgggaaagttcagtgcctgtcacgccctcagtgcctcctcctgcgagccagcactccacgccagctgggctgcccccctccagggcaaagccaccaactgaaggtgcagggtcccctgccaaagccagccaggcttccaagctgcgagcctccaaggaggagaaagaggactggctgagccatgccctgtctcggaagaagtcccaaggcctggccagagagcagcatgctgggacctctgagggcctgcatttggcggggacagcgggccatcccccttctggcaggtactgacttaggctgctgtggctagtagggggaggactggctggggacttgaggagcccctttgccccttcacctgttgcagcctcagtcagcagttggggaacaaggcagggcgccgtggccacagaggccgcttcttggctttgctactctgccttttaggcactgcagagagagcctctggctcccaggcttgccccagggacatacccaagaaggagggctgttgacattcatgccctgaccgccatggggacaggtgctaacttgatcgaggagaagacagagggtccctgaggtggcagacacaccgctgccctgtcacagcgccctcaggctggaagccccggcatccaaacagccggtgcttctgccgactccactgaagcgagtatggcgtgtgtgagctgagatgtccctgtgctctttgagagtgttagaggagacatagtggccgagaggcgcctcttggagaagcccttatccgtggggcaggatagcgagtgacctctgaaggcaggaaggcacaaggggccagcaggctgggggagtccagaggaagtggtgagatgtgctgtggccagagcccaggggagtgaactgggcaatttgtgacagcccagggacatcaccctgtcctggggttgatgacaggagggcagttttgactttgacctgaggccgaggggaaagctcaggccaaaacagaaaagagcctgtctcttcactgacccgtgagccgagaaagaggtggaaataatgggaaagggagccagccagatttggtagactgagcagaatcctaatctagagctgagccaagttaagtggactggaacagggctctgaacttgaacttgactccagtgtctataacatttccgttgtcactgcttggacagtgtccattcactgcaccactgtggacattgaggcaggaagggggtactggaagggaagagatgcccagaaatcccaggagctcagacgtgggaggagaatgccccaagacgggatggtggaagcaggaggaaggggggccacgagcttcacgtgtgaagcccgtcctgggccctgtcttcatccagcctgacctgggccttctgtcaccttcaccttgaacgctgcctttcctcagccaacctctcaccagcacacaagggcttgagcacgcagctgctggagggagttctggaacaactgcacgagaaagaccgtgtgtcaggcctggtgtctcggggtaggcctgggctgcgggctgagtgggaatgagagcatggtgggcagcacaggcctctgtcctgagagagggacacagaggctgttcaccctgcccctgccccgtccccgtgtcccacacagaggctgcccaccctgctccgtccctgtgccctacacagaggctgcc

SEQ ID NO: 19039 - DNA, 2300 bp, Homo sapien
ggacatgtttctcaaagcatcagcccacaagctgtctgctgagaatcattcttgtgacacatgccgctcgctggacctgacctcgagggatcctggggcagggtctggctactgcaaggccactgcatcttcctggccagtgcctgaggtgctcccttcacagcagcttccctctgcttgtcttacacaacaagctaccaaattcagcttttgttagaattttgcagccgcaaatgagcttggttcccctactccagatcacggtcacaggctccttaattcacagacagtgaagatatgtggggtgacgaggacttcacctttggagcctatcagcccactgtggtctcctctgagggccggcagtcccgccggcagtctgtcaggtaagtggggcctgcaggaggcttggcctcttgagacaggtcggccactgggaagacaggcccctgcagctgtcccctgtcccacccgagagtctcatgtgggaggccacagggtacaaggccctcagctctgcaggtgctgaaggaagcgggagatggcctggtcccgccagcccagacagagtggaggagatggccccagtgggaacccccatcccagacgctgctcaggttcgccagtgccccacccagcctcagaaggaaaggggcaggtgggcctgcctccacctaaagcccctgaaatcataaaaggctgtgatgtcgctcggtctccccaaggaacatacttcctgatgggtagcaagaccactggcatctgcggtggcttcttagaccccgcttcccaggaactctgctgtcgaacctgccgtgacaattctgacagcgtgatcctctcagtttacaaaaaaaaaaattaaatcagtgataggattttctgagtttggagttcttttgccagtatatattttaaactttgtattttgaagtaatttcaaacttcaaaagtcggctgggtatggtggctcatgcctgtaatctcagcagtttgggagaccaaggcaggtggatcacctgaggtcaggagttcaagaccagcctggccaacatggtgaaaccccgtctctgctgaaaatacaaaaattagctgggcgtggtggtgggcgcctgtgattccagctactcgggaggctgaggcaggagaatagcttgaatcctagaggcggaagttgtggtgagctgagattgcaccactcactgcactccagcctgggcaatagagcgagactccgtctcaaaaaaaaacttcagaagttgtaagaacagcaccaggagcccctctcatcctttcccaggttcagcagttgttcccatttgccaggttggcttcttcatcctctttctatctgaatagctctaagcacatcggcattacttcccatacccagtacgttcttaaccctgggaacctgctgccactggtcagtgacagatgaaggccacggccgaacaaatgaagtaactgttgttggaaaacctggaaaccacttgatccaacttattattattttttttagacagagtctcactctgtcgcccaggctggagtgcagtggcatgatctcggcttaccacaacctctgcctcccgggttcaagcaattctcatgcctcagcctcccaagtagctgggattacaggcgcccaccaccacacctgactaatttttttgtgtttttagtagagatggggtttcacatgttggccaggctggtcttgaactcctggccttaagcgatctgcccaccctggcctcccaaagatctgggattacagacatgagccaccgtgctcggcctgatttttctttagacctgtgtgcccatggctgtcatttgatcctgttcctgttctctgtgggtagaactgtccctggttcatgtgatggaagtcaaggtctctgtacttcgtggtgttctacagacagcacgtggcctgccacctgagccggtccaggagccactgctcactgggcctcagctgactgtgcagggtccctgggcatcgtgacgcccagctgcaggctgctagggggccactgggactggctgtttcccctgcctgacaccctcctttctgtcttgaagtaggttcttcgcagacagtggcgcagaccccaagggagaaccaggctccaaacagagccctccaatggcttccagccccatccagcccaggaagggaggagctgactggttgggcctcaaggacgaggacttggacctgttccctgcctcacccaccagagaggcccatcgggaaagttcagtgcctgtcacgccctcagtgcctcctc

SEQ ID NO: 19040 - DNA, 2300 bp, Homo sapien
gcctcctgagtagctgggattacaggcacctgccatcacgctcggctaatttttgtattttgagcagagatggagtttcaccatgttggccaggtgatctgcactcccactccccccacacttcccaaagtgctgggattacaggcataagccacaagccacctcacccagccaacatgttacatcttaattcttggattttcttcactgcagggctttgggtggagaaataaaactcttcaaatgcatgatcttggagatccctgtgaatcaataattctttagacaactgcggctcaaaatccctcctttcccttttccgagttattccatccatcttattagaaaggaagtgaattaggtgtaggtggtctgtaacacctgcacatctttttatacgtgtagagggtatgcctgggatatataggttgtcttcaagcagtagctgctactacagctagagagaggaggagtgccaggaaactgatgacctgagaccaagagtcttgttgatgttctgacttagataaaggttttgatcattttcatgaaataatgcagggaagtcatttctgctgtttctttactactccattcttggaggattagaacaagtcacactgtaattgactaaaacgactttttattttaaaatattgatggtggggttttgcttttttttttttttttttttttgagacgttgtcttgctctttcacccagggtagagtgcagtggcgaaatcttggctcactgcaacctctgcctcccgggttcaagcaattctctgcctcagcctcctgagaagctgggattacagcgcctgccaccatgcctgtctagtttttttgtatttttagtagagacaggggtttcaccaagttggccaggctggtcttgaactcctgacctcgtgatccacccacctcggcctcccaaagtgctgggattacaggcgtgagccaccgtgccgggccagtgtttttaactgtccacacttactaaattttccagtacttcttcctatggttcatgatagtaaacacagaaacatataaggaacattattagagttaccagatgttagctgttgcatatgtgcacattcctagattcaagggtgtttttgccttaaatttaagtgggtcattggttgtcttgggaagatcatggaaaattcgggattttttagaattctgaaccaaaatatgttttgagtgtttcttagtaaatgtgtgatcttccaccttccacattcagactgcggactacacttcataaatgcctttttatttccagttatggattcaactaaatgactgccttgggagcacataattactttgctacctttttccccctttgctgttgtggctcgagtttggttctcacctgagaagatgcattgagcatatgttgttacccagccctggcttaatggtgtcctgtggggtaggggtgggaggacgaggggcacggggccagagcatgtgaatggatcatggttggacagctgtgacctgccagcactgcgggtaagcaaaactacaaaccgttctttcctctgtgacattgaataaaccttaataaaattcataattagcacatactagaaaaaatgtgacttaatctttttgtggggcgacagtattgggtttcattctggctatacagctttgattggatcattaaacaggtcagtcacttccctcaagctttggggtgtggaataaacaccggtgaatttgtggattcacccgtcaacctcccaatatcaacacatttctcacgcctccgcgtcggccacgtgtcagccctcagaagtgggcaggaggaacttttaagcttcccggcagttcccaagagggcctttgagcctggcgccctcttcccggagaggcgttggggcagctcctagcaacgtgcccgccgccggcagaagcccggccccgccaactgccgcgcgcggctccctgggagctgtagttcttcatggcgtccccacctcctctgtgagggcgggtgagtcgaccgccgactgcgactcccaggatgcctcgcgcccgcctttccgcgggaggccagacggctgagggtgccggcagcggctggaagcgggaggccagtcctggccgggctgggcgacccgaatggagccagggccggcgctggtcccagcggccgcacctccgggggcacggcgcgtaacaggaggcttccggggctgagagcgttacaggctgcgctccggggccagataggccgggcgctcagaagggtgacgcattgaggggcgcgga

SEQ ID NO: 19041 - DNA, 2300 bp, Homo sapien
gttaatttttttttttttttttttgagatggagtctcccaggcgggaatgcaatggtgcgatctcgacttcactgcaatcttcacctcccgggttcgagcgattctcccacctcagcctcctgagtagctgggattacaggcacctgccatcacgctcggctaatttttgtattttgagcagagatggagtttcaccatgttggccaggtgatctgcactcccactccccccacacttcccaaagtgctgggattacaggcataagccacaagccacctcacccagccaacatgttacatcttaattcttggattttcttcactgcagggctttgggtggagaaataaaactcttcaaatgcatgatcttggagatccctgtgaatcaataattctttagacaactgcggctcaaaatccctcctttcccttttccgagttattccatccatcttattagaaaggaagtgaattaggtgtaggtggtctgtaacacctgcacatctttttatacgtgtagagggtatgcctgggatatataggttgtcttcaagcagtagctgctactacagctagagagaggaggagtgccaggaaactgatgacctgagaccaagagtcttgttgatgttctgacttagataaaggttttgatcattttcatgaaataatgcagggaagtcatttctgctgtttctttactactccattcttggaggattagaacaagtcacactgtaattgactaaaacgactttttattttaaaatattgatggtggggttttgcttttttttttttttttttttttgagacgttgtcttgctctttcacccagggtagagtgcagtggcgaaatcttggctcactgcaacctctgcctcccgggttcaagcaattctctgcctcagcctcctgagaagctgggattacagcgcctgccaccatgcctgtctagtttttttgtatttttagtagagacaggggtttcaccaagttggccaggctggtcttgaactcctgacctcgtgatccacccacctcggcctcccaaagtgctgggattacaggcgtgagccaccgtgccgggccagtgtttttaactgtccacacttactaaattttccagtacttcttcctatggttcatgatagtaaacacagaaacatataaggaacattattagagttaccagatgttagctgttgcatatgtgcacattcctagattcaagggtgtttttgccttaaatttaagtgggtcattggttgtcttgggaagatcatggaaaattcgggattttttagaattctgaaccaaaatatgttttgagtgtttcttagtaaatgtgtgatcttccaccttccacattcagactgcggactacacttcataaatgcctttttatttccagttatggattcaactaaatgactgccttgggagcacataattactttgctacctttttccccctttgctgttgtggctcgagtttggttctcacctgagaagatgcattgagcatatgttgttacccagccctggcttaatggtgtcctgtggggtaggggtgggaggacgaggggcacggggccagagcatgtgaatggatcatggttggacagctgtgacctgccagcactgcgggtaagcaaaactacaaaccgttctttcctctgtgacattgaataaaccttaataaaattcataattagcacatactagaaaaaatgtgacttaatctttttgtggggcgacagtattgggtttcattctggctatacagctttgattggatcattaaacaggtcagtcacttccctcaagctttggggtgtggaataaacaccggtgaatttgtggattcacccgtcaacctcccaatatcaacacatttctcacgcctccgcgtcggccacgtgtcagccctcagaagtgggcaggaggaacttttaagcttcccggcagttcccaagagggcctttgagcctggcgccctcttcccggagaggcgttggggcagctcctagcaacgtgcccgccgccggcagaagcccggccccgccaactgccgcgcgcggctccctgggagctgtagttcttcatggcgtccccacctcctctgtgagggcgggtgagtcgaccgccgactgcgactcccaggatgcctcgcgcccgcctttccgcgggaggccagacggctgagggtgccggcagcggctggaagcgggaggccagtcctggccgggctgggcgacccgaatggagccagggccggcgctggtcccagcggccgc

SEQ ID NO: 19042 - DNA, 2300 bp, Homo sapien
gacctgacataatatctatctatcctggggaactggtaatatgagacttataggttacagcagaaatgctacatgttgacaaaagccttaatcgttccactgggagaactaattgataattgtgttaagattgaagattaaccctgtgttaatctcacttgagtctatcctgacagtagttcagattctggaaaatgataaactgacctgctagatgtagaattgtttcaaaattagtgttgaaataccttgttcacagatgaatatctgggcaggatctgagggtgtttggaatgacaccccccaatccagttgcatagatgggatgtctttgcaggtttgaggagatcatcgacctgcagagccccctttgacccagtacctcacgttttatttaaaatctaaatctggggccaggcgtggtggctcacgcctgtaatccaagcactttgggaggccgaagcgggtggatcacctgaggtcaggagtttgagaccatcctggccaacatggtgaaaccccgtctctactgaaaaaaatacaaaaattagctgggcatggtggtagcacgcgcctgtagtcccagctactcgggaggctgaggcaggataatcgcttgaacttggcgggtagaggttgcagtgagccaagatggtgccactacactgcagcctgggtggctgagcgagactccgtctcaaaaaaaaaatctaaatctgacatttgatgctatttttattaatattggaatgttctgtcttgaactttattcaatataatcaagaataaagatagagtaaacgtcactgatttgtactattaagagagaaaaaatatgccacacaactaaacataggtttaaattatgaagaaatttagaatagaggtttattagatttagggaacactaagaacaaaaaaggaaggagtgatacctgcctgagtggacagctgtaaatcagctgtaattactgcagttgtaccaatagttgtgagtggctccagtcactttaggagtccttggaagtacttggtacacatttgttggctgtaccttaaaggaagtggcaagtccagtttgttctctctaccacactagactgccactgacaagtttgggtctgttggattcaaaattttgtaagccattttcacaagtacaaagatacattttaaccttgtcttctccaaaattactgagtaggaattttatttttatctttttgagacagggtatcactgtcacccagactggagtgcagtggtgggatcttggcttactgtgacctctgcctcccgggttcaaatggtcctccctcctcagtctcctgagtagctgggacgacaggcacgtgccaccatgcccagctaatttgttctattttttctgtagagacggggttttgccatgttgcccaggctggtctcagactcctgggctcaagcgatcatttcgcctcagcctcccaaagtgctgagattataggtgtgagccacagcatctggcccagagtgaggagaattaatgagattttttgtgtgtgttagataatattgatttaagcctttttttaaaaagtactctcaaccaaatacaaaattgaaaatgtgaggtttaatagaaatgtgttggctatttgcaatggattttcttcttgcccaagtgtttggagttctactttatgctctgtatttaaaaattagtgacctcaaagcagagttgatgacacaggctttggggccctcatgttcttgtctttagaacatatcactactaagtatcagcttatcttcagaacattacaacattcaccgtgttcatatgctttctgagaagtcaccacttgtaatttcagatcacatacacctgaaggcattttatagttcctaaagttaacatgttagatcttttttttccaccccatgagggtctcactctcacccaggctggaatgcagtggtgtgattgtagcacactttggccaccaactcctgggctcaagtgatcctcctgctttggcctcctctgagaagctgggattactggtgcacaccaccacacctggctaattttttatttttttttatttttggaaatagggtatggctatgttgccttgggcccgtcatgaactcctagcctcaggtgaccctcccacctcaggcctcccaaagggttgggattacaggagtgagctactgcactgggccaacatgttaatttttttttttttttttttgagatggagtctcccaggcgggaatgcaatggtgcgatctcgacttcactgcaatcttca

SEQ ID NO: 19043 - DNA, 2300 bp, Homo sapien
tgcggtctatggtggcctttcatcaccgtgcttggtgtttgaagatgcaaactggcatattttcatgcaactttataaagttatatgtgtggccgggcgcggtggctcacgcctgtaatcccagcactttgggaggccgaggcgggcggatcaccaagtcaggagatcgagaccattctggctaacacggtgaaaccccatctctactgaaaatacaaaaattagccgggcgtggtggcgggcgcctgtagttccagctactcgggaggctgaggcaggagaatagcgtgaactagggaggcggagcttgcagtgagccgagatcgcgccactgcactccagcctgggcaagagtgcgagactccatctcaaaaaataaataaataaataaataaataaagttatatgtgtgaaaaataatgtgatcacttttgtatccaagccttttcgtgggatgacgtgtttgtagaatgctgataataaatggaaatgcaggagtttttgttctcaagagtacagtttcaaggatgttgtaaaagcattgttctgcccaagcaactcaaatttgactgatttaaatgcagaatcattttgctctttgtaaggaggactgctaaaattctgaatctgggagcatttttttttttagttgcacgaccatttaaatattttggagcaatagcagattatattatatggtagtgtggacctggatgaagaatgatctgtgacgcctctgaatgaatagaaagtctaagaacccagtagttctgaatccatgacagtgcttgaatggttgtcttgtgcatatgagagagacgtcataaaaacctgccttggttctagtgtggaagagagtatatccttttttcagaccatgtgttttgttgtgttttttgtttttgtttttgttttttgagacggagtctcgctctgtcgcccaggctgcagtgcagtggcacgatctcggctcactccagcctccacctcccggattcaagcgattctcctgcttcagcctcctgagtagctgggattacaggcgcccgccaccacacccggctaatttttgtatttttagtagagatggggtttcgccatgttgccaggctggtctcaaactcctcacctcgtgatccaccctgctccacaaggaacggtaaaaataaataaaaataaggacttcgggccgggcacagtggctcatgcctgtaatctcagcactttgggaagccaaggcaggtggatcacttgaggccaggagctcgagaccagcctggccaaaatggtgaaactctctctactaaaaatacaaaaattagccgggcctggtggtgcgcttctggggtcccagctattcaggaggctgaggcaggagaatcccttgaacctgggaggcaaaggctgcactgagccgagatcacgccactgcactccagactgggcaacaaagagagactctgtctcaaaaaaaaaaaaaaaaaaaaaaaagacttttttgccttaacctaaacaaacactattacatgatcctagtacaagattattttggcctatagcatttttttctcatttattcctgggcattttctcttttaggtttctccattttaaaggaactccagtattttcatcggtaaagactaaatcgtatgagtggtgtatagactagaaccaagctaaatagaacatgttgcacgttctgcctttatggtaataatggtcactgcctctagtgcctttggtatcgattttcagcttgacttgggttatttttgtgaagatgaaatggtttactctggcactttggactttcctcagagctccactcagttttaaacgaaaaaattttgtttatttatttttggtagttcaaatcagcatacttccaaatggtctgttttgtttttgaagtttgtaactcatggctgtggggatattgagatagagtaactcctcctagaagattatgttactgatacctgtgttgtgtttgtaaatttgaaaaaattagtaagattttattccttcttgaaacgtcaggaaaaaagtgggttgagtgtgtgtgtgtgtgtttgaatgggtggtgcagtgcatttcaaagctgatagagatgatttcataacctgtgacctgttgataatgtgaaccagactcgagtgaggtcacaatgaaatagaacaaagtcttttatgcgggttaaagattcatggacaccgggaagttgttttgtgtatcatttttcatgtgaagtattaaagtacaaactttaacacaccctttgacacacttccaatgtc

SEQ ID NO: 19044 - DNA, 2300 bp, Homo sapien
cctgaatagctgggaccccagaagcgcaccaccaggcccggctaatttttgtatttttagtagagagagtttcaccattttggccaggctggtctcgagctcctggcctcaagtgatccacctgccttggcttcccaaagtgctgagattacaggcatgagccactgtgcccggcccgaagtccttatttttatttatttttaccgttccttgtggagcagggtggatcacgaggtgaggagtttgagaccagcctggcaacatggcgaaaccccatctctactaaaaatacaaaaattagccgggtgtggtggcgggcgcctgtaatcccagctactcaggaggctgaagcaggagaatcgcttgaatccgggaggtggaggctggagtgagccgagatcgtgccactgcactgcagcctgggcgacagagcgagactccgtctcaaaaaacaaaaacaaaaacaaaaaacacaacaaaacacatggtctgaaaaaaggatatactctcttccacactagaaccaaggcaggtttttatgacgtctctctcatatgcacaagacaaccattcaagcactgtcatggattcagaactactgggttcttagactttctattcattcagaggcgtcacagatcattcttcatccaggtccacactaccatataatataatctgctattgctccaaaatatttaaatggtcgtgcaactaaaaaaaaaaatgctcccagattcagaattttagcagtcctccttacaaagagcaaaatgattctgcatttaaatcagtcaaatttgagttgcttgggcagaacaatgcttttacaacatccttgaaactgtactcttgagaacaaaaactcctgcatttccatttattatcagcattctacaaacacgtcatcccacgaaaaggcttggatacaaaagtgatcacattatttttcacacatataactttatttatttatttatttatttattttttgagatggagtctcgcactcttgcccaggctggagtgcagtggcgcgatctcggctcactgcaagctccgcctccctagttcacgctattctcctgcctcagcctcccgagtagctggaactacaggcgcccgccaccacgcccggctaatttttgtattttcagtagagatggggtttcaccgtgttagccagaatggtctcgatctcctgacttggtgatccgcccgcctcggcctcccaaagtgctgggattacaggcgtgagccaccgcgcccggccacacatataactttataaagttgcatgaaaatatgccagtttgcatcttcaaacaccaagcacggtgatgaaaggccaccatagaccgcagctgtaaagtttaggcttaacaacacttgctctgttctaaggcatacctactttttaaaccacataatttcatcagggtcagcgatgccaaactccctcatcttcttcaccatgatggcacttttcctgacagccacctcataacgctggctgcgagtgaggaagttcaagtcctcatgctggaagtctgggtcgttcaggatcatgttctctgaaagggggttaaagggcattaaaaggcagacagacactcgggcctccgttccaccctccctgaatcacaataggcttcagagtcgcggacacacctggggaatggcgatatccccccaccagggacacaggctgttcctcgaagtgggggtcccggctcccctaacgctgggccagagggcctaggccccacagcgcccctgactccgcatcgagggagtctccagcttttctcgggaaaggagggaggtctcgcccgccgccctcaccgatctctcggcggcgccgggttttctcggggctgccgtccaggatgtgtgtaagcagctccgggttgaagctggcggaatcccgctccctgcgcaggtccgggttcatggcgacgaccagctggcagcgaagtaagcaccgaccgaggtggcagtgacaatctaaatccgcagctccagcgccggccggaccctaggaggcagcctcaggacggcgcaagtccccgcctccgctcgcccggcccgccccggcccgccccttctttctccgtggccctttggcgcgtgagtgacagcggcccagacagagggggcgatgtccgcgtcgtggctggggccggtcgcggggcagactaatcccctgctcctggccaggggaggctcccgagcggatcctcgggaaaggggctccgaaggtcaagaaactgccctgctgggcgtccggggagtgggaa

SEQ ID NO: 19045 - DNA, 2300 bp, Homo sapien
tgtaatctcagcactttggaaggctgaggcgagcggatcacatgaggccaggagttggagaccagcctggtcaacatagtgaaaccctgcctctaataaagacacaaaaattagccaagtgtggtagtacattcctgtagtcccagctactctggaggctgaggcatgagaatcatttgaacccaggaggcggaggttgcagtgagctgaaatcatgcaactgcactccagcctgggtgacagaggaagacatcatctcaaaagaaaaaaaaaaagcgttaaagtcacagaagaaaagttctttgttctattcttgtaattctcgtgtaaatttgaaattatttcaaaataaaaactcagcaaatttagctcttcatctaagtcttttctattcaatgctaagtacaccccttatcattgttacattaagagcaattggtttcctagaatattagaactagaaggtcagctgtcaagcagccatttgttcactccacaaagatttcctgagcacctttagcggggcaggcactgtgccaggtacagagaataaactagacaccctctctgctgttgaaggggcctgagatcagcagcttaataagacaaatgaggatcctgaggtcctaggggttaagagtgtgtattatagttctattattcaaattatgaatgttatgcatctctcgtagttttacttctgagaaaaccaaagtcatagtattacacagactacagacaggctaggcgcagcggctcacgcctgtaatcccggcgctttgggaggccgaggcaggtggatcaacaggtcaggaattcgagaccagcctggccaacatggcaaaatcctgtctctactaaaaatacaattagctgggtgtggtggcgagcccctataatcccagctactcgggaggctgagataggagaatcgcttgaacccagggggtggaggttgcaatgagctgagatcataccaccacactgcagcctgggcgacagagcgagactccgtctcaagaaaaaaaaaaaaaatgactagagatgattcaacaaatccctgaatctcccttgtctacaatcccactgggcagaactgtttttgttttttgttttttttctgtagagacagggtctcactatgttgcccaggatggagtgcaatgtcacaatcttggctcaccgcaacctccacctccggggctcaagccaccatcccatctcagccttcagagtagctgggactacaggcgcatgccactacacccagctaattttttggtattttttgtagggatggggttttgccatgttgcccaggctggtcttgaactcctgggctcaagtgatacgcccgcctcgtcctcccaaagtgctgggattccaggcgtgagccaccgcgcccggccctacactaggttttaacagtaagtgtgcatttcccactttgatgacggtgatggcgaaagcaaagaagtctggattccaagacctctagtaactgccaggttgcgggggaaaatgtctggtttcccagacagaaggcttagagcagcaccgcccgcttggtctcattctaagtccccgtccaccccttgaacagcgctcacaatcccacacccagggccccggaacccacgcctctgccagtaaagacgccattatcttaacaaaaggtaactggagcctctccccaaagagactggttcccgtcccattcttctccaatccgggtggatttggcaaaagcccaagtgaccctccctagcaattccgcaaagccccatctcccgccccagactccagagtctcccgaccactctcatttcggagaggcctaggggcacggacccggaagcgtgacagaggccgcggggtaagaggggggcaagtgcaggcgcaatccctcctcagcctcgttgtcccgcccccttcccaaggccccagccaacctgttctaggcgtcgccggtcctcggatttcttctttccgcctcgcgtggtcacgtgacgggggaggggcgggatacaaaaagtgctttattttcccactccccggacgcccagcagggcagtttcttgaccttcggagcccctttcccgaggatccgctcgggagcctcccctggccaggagcaggggattagtctgccccgcgaccggccccagccacgacgcggacatcgccccctctgtctgggccgctgtcactcacgcgccaaagggccacggagaaagaaggggcgggccggggcgggccgggcgagcggaggcggggacttgcgccgtcctgaggctgcc

SEQ ID NO: 19046 - DNA, 2300 bp, Homo sapien
caggaagctgagatgatcacctgagcctgggaggtggaggctacattgagccatgattgagccactgcattccagcccaagtgacagagcaacaccctgtctcaaaaaaaaaatttttttttttaggtggagtcttgctctgttgcccaggctggagtgcagtggcgtgatcttggctcactgcaacctccacctcctgggttcaagcaattctcctgcctcagccttccaagtagctgggattacaggcatgcaccactacacgcggctaatttttgtatttttagtagagatggggtttcatcatgttggccaggctggtcttgaactcctgacctcaagtgttccacatgccttggcctcccaaagtgctgagattacaggtgtgagccagttcacctgtcaaaagaaagaaaatttttaaaaagtctctcggagatgtctttcctgtttggtgccacctgaatagtggcaaacctttccattatgtatcaggtcaccaccgcatctgctagaagcccccctcgtccagggtgggatgacctgctcctataaagccaaacttaccgggagctcagtctcttggatttttaaaatatgggtgtctcttttccccggttcctgatgacattgtgtcccaaggtgccaagggggcctttccctcagtccagaggggttttctgaccacctgctaagttccagacacgggccgactgtgcatgacaggcccacggttctaggcccaaatactcagttgcctttgccccatatgctgttattgtccacatcacttgctgccaaaacccaggactgagctgtggagggaacagctggaatgcaccttggaggacgttgttgacacgccgctcagtcgccgttcgtgccctggtgtttgtcttgcagacagaggctccgtggtgaaggcgcgcgtgctgacctgtgtggaggggatgaacctgcccttgttggaacaagccatccgggagcagagactgtacaagcaggagcggggcggcagccagtaggaaacagcagcctagcaacaccctcacctgcttcagagcccgaaccctctggagctgcaggagcccgggagagcacagacgcctccccagcgacggccttgtctggagctcgaaagccgaggggcgggtgatgaatccagccccttcccctactttgggattggctcagcaatgagaacccagaaagcatgccataaatccgacagccccaccccaggagactgcaggtggccgagcttgggcgccggggccgtgcttggtgtggggccatggagggttccagaaggtcctggtgaataaaggcccagggggcgtgctcttgaagtgtgctcgtggtgcagcgccggcgggggccaggagggggagctgcaacccaggctgtgggctgcagcctctcagggcttctggtgaattctgggcctggggcctcagggtagggcaccaggggcccaggggctggggtggggggcccaggatgcaggggtctgcccctggccaggctctgccttcagaggaggctgagcgtcgtcacacgggccgggctgaggccctgggccctgaccgtgcagcctaagacaggactgtggctttaagaccctcctgacccctgacctctgcccccagtggccctggcccctgggcagcccttcctggccgccatgtgtacccagagcctgggactggctgggctgggcagtgacccaggtgggaaagggtggtcttgccctctaaggcccggcacaagtgagaggcctgggggtccatgttgggctgggctgggcgaggggtggtctctgacttcctgggggttctggctgggatgggcagggggctgggtgggagagtgtgggccctgccctccgaggccgggcatgggcgagaagcctgggggtcctggctgaactgggctgggtgaagggggccccctgacccccttggggtccgggctgggctgggtgaggggcggtttccgacccccagccaggttcccaggcaggatgagctggggttggggtggctaggccgtgggccttgggagctgggcagtctgggctgggctgggctgggcagggcgccacatggaagctggaggagcaacgggagcgctgggcgtggggtgcaaattgcccggtgccttctgtttcccaggcagctctgtggccatggatatgttccagaaggtagagaagatcggagagggcacctatggggtggtgtacaaggccaagaacagggagacagggcagctggtggccctgaagaagatcagactgg

SEQ ID NO: 19047 - DNA, 2300 bp, Homo sapien
tgaagcaggcgggctcagtggctgatgcctgtaatcccagcactttgggaggctgaggtgggcgaatcacctgaggtcaggagttcgagaccagcctggccaacgtggtgaaaccctgtctctactaaaaatacaaaaaattagtcgcgcgtggtggcgggcgcctgtaatcccagctactcgggaggctgagacaggagaatcacttgaacctgggaggcaggggttgcagtgagccgagatggcgccactgcactccagcctgggagacagagcgagactcagtctcaaaaaaaaaagaaagaaaagaaaaaggcgagtcagggaggccaggggtgaggctggcgttggcccccgtagtcattcacacaaacggctcctttctgaagacagctgattgcaggtgtgcaatgagtggctagaagacaagtgtcaccaggaataaagtgggagcaggctggggcagaggctgagtggccagtcatccctggtgccatctcactcaagacacgggctgggagccaaggacactggagacctctttgtttcctcattgctgtcaggggctgccactgccctccccacccctactgcccctgtcagctcctccacctctaggaatgggggtgtcctgcatcccctctccacggccgagttcagggacttcccatgaaattcagccaaaaagggcgcaggacttttctatcccatgggggcctgaggccagtatcaggcgtcggtccctggtctcccccgtctgctgggatctttctctcctgccaggctgtgctttgtcctcagcgaggcctgccaggatgtccaggtgatgtcacccagtcagtctgttccatcccctggctccccctcaagccctccttccactaaaaccacgggggtttcaggaatgacctggaaagcgacgccaccccgcagaaggggcctgttacgctgggccagtgaaatgagcgcctggaaaggggggtgccatcgcctctttcttgaagacgctcagggccaccacagaaggaaaaggcagcagccctggtacccagtgtgaggaaaagaccaataagctggcatcactgtctgccactcaatctgacttcataaaagccaccaggggccatttctgggtgggggaagaggcaggtaggaaaagccaagtgcatcaggctcccgggcctcagccagagcccaggcttactggcgcctgaagccagccctggtgctgctgcactgtgcacactttataaaatggggccaggcgtggtggctcatgcctgtgatcccagcattttgggaggccgaggcgggtggatcacttgaggtcaggagttcgagaccagcctggccaacatggtgaagccccttctctgctaaaaatacaaaaattttctgggcgtggtgacgggcacctgtaatcccagctactcaggaggctgaggcaggagaatcgcttgaacccgggaggtagaggttgcagtgagccgagatcatgccattgcactccagcctgggtgacagagcgagactttgtctcttaaaaaaaaaaaaaatggaccttgtgccagttgtctggagtgaacgtcccctgactgccccatcatgtcagtggagaacagagagtcaggccctgggctggcaggacaccccctcctctcctgggggattgagagctgtgggtgggggcctgcctggcagcaggtcctctgagctggctggaggtgtttattaatcctgagctccggggctggggcctctccgctgagcctgcacctgcatgtgcacgtctgtctccagccctgtctgtcctggcccaactccttccctatctgggtgtgatcgccgctgcgctcccctaggcatgtgggtgtaacaagtccaaaccttctgtgggagtcgggcaggctcggccccgccctcagggctgtgccctttcctcccagactggttgtgcaggaggaggcatgagtgtggccgttgtgggtgcatgcgcgtcaggcctgggacccggccgcccgcccgctgcctcacctgcaaggaggggcctcccagaaactcccttccccagtgcccagccgccccacctcgccagacttagctgaccagccagtgaggacgcccgctgcctcccacctgccctcctgccgtctttcgccagccaagcccagcctgagccagcacttgcctttacgaccatgttcaaggggctgagcaaaggctcccaggggaaggggtcccccaagggctcccccgccaaggggtcccccaaaggctcccccagcaggcacagccggtaa

SEQ ID NO: 19048 - DNA, 2300 bp, Homo sapien
gtcctccctggctgcccgtgggacctggtgtagccctgactgcccaggagctgcaggctgtgtcactcatggctgtgctccaggcctgaggaggatttaggtatgaagaagggaaggcatttttctgatttaaaagaaacaaaaaccaccacaggaaaacctgaagtactgctctcagacttgactgcacgttgaaatctcttaggaagatttttttcaaggtagatgtctgggtcgcacccccagagattgtggttctaatcagtgtgagggatctgaagtgggcattgggacttagaaaggccccttagtgattctgacatgcaaccaagtgagaagcactggtgaagctgtcctgcagggcatgcgcaagaccagcagcagcggcggggcctcactaggaatgcagcctctcagctcccacccggaaccttctgcttgttttctttctttctgtctttcttgagacagggtctcgctctgtcacccaggctggaatgcaagtagcaccatcatagttcactgcagcctcgaactcctgggctcaagtgaccctcccacctcagcctcctgagtagctgggactacaggcatgagccaccataccaggccaatttttatttttttgtagagatgggggtctcactatgttgcccaggctggccttgaactcatggcctcgaactcctggcctcaagcagtcctcctgcctctgcctcccaaaaccttgagattggaggcatgagccaccatgctggccaatatctgcattttaacaagatccccaggccatttgggggtctgttaaagctaaggaaatgcttgatctaaagtacagccacagggctggatgcagtggctcatgcctgtaatcccagcagtttgggaagctgaggtgggcagatcacttgaggtaaggagttcgagaccagcctgggcaacatggcgaaactctgtctctacaaaaatagaaaaaaatagccaggtgtggtggtgcacacctgtaatcccagctacttgagaagctgaggcaggagaatcacttgaatctgggaggcagaggttgcagtgagccaagatcaagccactgcactccagcctgagtgacagagcaagactccatctcaaaataaataaataaagtgcagccatggaaggctttctttgctttacttttttttttttttttttttaagatggagtctctgtctcctaggctagagtgcagtggcacgatctcggcttgtgccaccaagcccagctaatttttgtatttttagtagagggtttcaccatgttggccaggctggtttcaaactcctgacttcaagtgatcaagcctcttgatccgctgacctcagcctcccaaagtgctaggattacaggcgtgagccactactcccggtgctttactgattattgaacgataactagcttcttaagcttgtggcgtgctgtgatggtatagaacttgttgcaacatcagctggtctaaggaatccatgtatatttgacaagtagagaccatttagaaaagcaagcaggggccgggcaccgtggctcacgcctgtaatcccagcactgtgggaggccgaggcgggcagatcacgaggtcaggagatcgagaccatcctggccaacatagtgaaaccccacctctactaaaaatacaaaaaaattagccgggcatggtggcaggcgcctgtggtcccagctactcgggaggctgaggcaggagaatggcgtgaacgcgggaggcggagcttgcagtgagccaagatcacgcccctgggcggcaacagagtgagactccgtctcaaaaaaagaaaaaaaaaagcaagcaaaggttcctgtcgttgatggagtcacgccagccagtgtaggagctgctggatcccgtgcaagctcagaggggtagagaagaagctctctgccttcagagagcttgtagttttgttgtagccacagactggcatgcaggagcccacctatggatgcagaagaaataaaagagaccccaagcaaaggcagagctagaaaacagcacagggatgtgggcaggtgggagtgacaggcatggcagcgtcaccaccatggaatatcatcttgggacgcggggcaaaccagtgtggacctgatttcatgtgctgaattgttttgtgggggaagtgtcagaatggaggcatgaaggattctgtggcatccagaccttctcaggtcattcccaatatgccaagcaagagaccgaggccaggaaaattcatcaccctcgttgaagcagtgggatgtaacgactaagg

SEQ ID NO: 19049 - DNA, 2300 bp, Homo sapien
aatgagccccagttcgttcccaagttagtgaacaacaggaaagtcaagtaacttataagtggaaaagtatgtttgatttgtattgggtaagttacaaggaagattttttttttcacactggagactaagaaaagagaagaaatagattcttaagagaacttttaagaaaagctttcttaagagaagaaaaagggtttttctttaagcccctgttcccccaaccatctcttaaaggggtgggcagcactgggttttcgtttgagctttcttagaggtcagttgaatattaacacattttttcagattgagtgttaatttctatgggaagtcaaataccataatggaatgttgatgttttaatttcacagtgggtctgccagtcacacaggttcatcccctttctgccttttgtccatttctatctgctcggtcagattctttgggacgataatgtggcttggcaggtattcagttagtgaatcactttctcacttaccctagctgtgtagcagacaggtgacacccagtacttgtgcaaagactgtcgtctcatgcgtgtcaaccttgtatgtcctaaaaattgttctcagagtagtcatgtggaatatctgagtgcagcacgtctgtggcgaaaagaacttagtgtgatatttaggagaactgtctttttggtgggtattgattagtcttttttattatttccttgtacctaaaagaaacaatctttgagttgggtcacatttgtaaaaggtaattgtgttggcatacagtagagcttgacaagtttgttctggaaggaaaagataaggaaagttctggtgtgctgtgcttcagtgtagagtgtcccaagtccagtctgtaaggcccctcaaggggtgccaggtcctgagcagagggtgaagcgctgcagggaagtagcaggaagctgtgctgggaagagacgtaaagcctttgctaagtctcagatcagttatgcagacagctttttcagcatgtttgcttttaaaaatagaactcccctttccatatgaataatgaatgactaaggctatgagaaaccattatatggtagagaacagtaacaattaaaatgatatctggtgtggcgtgcgtgagtgagtgtgtggttgggggactccatgtgcgattttgctcctctcccattaggtgactatggtttgctcaaaggaaagtctcttactttgatctgcccttgtttaggctgaaagcgaagaaactaaggagcgcctgtttgaatcaatgctcagcgagtgtcgggacgccatccaggtggttcgggaggagctcaagccagatcaggtaggaccctcagccgagccctggttcttgctctgggcgggtccaggtcagcctgtgtccccttctcaggtggaccccagtgctctgagtgcactgctcgcttggccactgtttcgtttttgtttttttgaggtgaggtcgtaagggagcaaacaagggcctctgggctccatcacattgagaaattaatttctccctcccctgttcctcctaatggtttcctatatggcctgtgaagcctgtggcctccaattctgtctccaggtggacttctccagtgcctcccttttctgaaaacactatccctgtggttgattcaggcatctaggctgaaaacctcagatctatttgtctcttttgtccctgtcaccaaacccaccttcttctccctttgcagggcctcttgcctattgttgcttcacctgtttctattagccttttctcgtgtgcctaggcaaccgcaaaggtctcctaattgcttcttctggcttggtctcggttcccttctccaggcctttctttcgcaaagtacaaatggaatctttctaaatctagtttccctgtctaattttaaaaagcccagtgatttcctctagggattgagcaatggcctccaaacttttatgctgataaaccccataggcagcattgagcctgcaccactgatgcatttatttatgaattatatagcttattatttgactaatttgtcatatataaactgcattaaaataagggcttttttgaatgagataaatagaaatagaaattctaattttcgtttcatacccagactccctgggttttatgcgccctacttagagaccactggcctctcagttcagacttgagctggtgtacaagccttccttagtctgttcccagccttgtacttcactgcatccttctgagtcctctgcctcaagctgttccacttactggcatctcagtaatgcctttcccaccccgtgtgttacact

SEQ ID NO: 19050 - DNA, 2300 bp, Homo sapien
ttaaagacagagtctctctctgtcacccaggctggagtgcagcggtgcaatctctgctcactgcaagctccacctcccaggttcacgccattctcctgcctcagcctccagagtagctgggactacaggcacccaccatcacacccggctaatttttttatttttagtagagacggggtttcaccatgttagccaggatggtctcaaactcctgccctcgtgatccacccgcctcagcctcccaaagtgctggaattacaggcatcagccactgcaccgggcccacatgatgttttaagaagatcagcctggaaagggtgggagggagtgagagataaaagactacacattgggtaccgtgtacactgcttgggtgacaggtgcaccagagtctcagaaatcaccatagaagaacttatccatgtaaccagaaaccacctgttcccccaaaactattgaaatttaatttaatttttaaaagatcagcctaggccgggtgcggtggctcacgcctgtaattccagcactttgggaggccaaggctggcggattacctgagatcaggagttcgaaatgagaccagcctggccaacatggtgaaaccccatctctactaaaagtacaaaaaaaaaattagccgggtgtggtggtagacgtctgtaatcccagctactcgggaggctgaggcaggagaatcacttaaacccgggaggcggaggttgcagtgagccgagattgcgccattgcactccagcctgggggataagagcgagactttgtctcaaaaaaaaaaagatcagcctattgtctcacttcctatatgccttcattgatatgacatcatactgaaaggaaagcactgtttctttttaatgttttttatattcatgagagttcttatgtttttttttcccttgctggaattatactaagatacagttctgtatcctgtttttattaacgcgttgtgcaatggtgtgatctcagctcactgcaacctccgtgtcccgggttcaagtgattctcctgcctcagcctcccaagtagctgggattacaggcgcataccaccatgcccaactaattttttgtatttttagtaggtctcgaactcctgacttcaggcaatccacccgcctcggcctcccaaagtgctgggattacaggcgtgagccacagcgcccagctcaggcttggtgattcttatcctcaagttatggttaatattttaatatttgagtggaagagggaccatttatctttttcttaaaaaacaatgtatatttatatatattcatgtatattctcaagtgagatttgtttccttctttaccagatttccatgtatttttttcctaaacctcactgggctgggtaaggtttgattcttgtccccatagtaggggtgtggttgggaatgtggtcagacttgccttgtgtgtctcttagtcatactaccaccttccagcaatttccatagacaagtgaaaacaatctgagaatgtgctttttaaagcgggaggtctgtacctcaggacacactgcagctcgctttcctccgcaccagtcagttttgaaactgagcctgacgagagaacctgagactgcagaaaagcccatcctgaaggtttcaagttttgtaaaagctgacctaggattgattgattcatttggactaatcagtaacatattacttctgggcttaagatttctcactgtcataggcacacctgggaaaaggtctagtcagaccaccaatttttgtgcagggagttttgccacttatgtttaagagcacgttctggttggtccagtggctggcggagaaggtcggtgtacaggtggccaggaatcctgcctctgcgtgttgagaggagtttcttattccactgtcctttcaggaatcatcttagccttgaatatagatttatagaataaaagtgtaaatagcaaaatatattgaaggcttcctgtttggagacattttgccctgcccagggagaatcatgagagcttctccttcagagattagtggtctgagtcattgcagtgtgggcgtcgtaagaaaaacacaactgacttaagtcccgcccttcaaatcgactttttccttcattgctttttaggatgtttgtaaaattcccagtgggaacttagagctttgtgggagcagtggggaggttttttggtttcagcaccttgatgcagaggcttagttaaagggagcagaggtgatacgtggcagtcaagaggttttaaacttgaactgtaccctaccgacaggaaaagaggcaaatcctg

SEQ ID NO: 19051 - DNA, 2300 bp, Homo sapien
ggaaaaatataaaccacatggttgccatatttatttatttatttagagtcggagtcttgctctatcgccaggctggagtgcaatggtgcaatcttggctcactgcaacctccacctcccaggttcaagcgattcccctgcctcaacctcccaagtagctgggattacaggcgcccgccaccacgcccggctaatttttgtattttagtagagacggggtttcaccatgttggccaggatagtctcaatctcctaacctcgtgatccacctgcctctgcctcccagagtgctgggagtataggcgtgagccaccgcgcccggcttacttattattatttttttgaacagcgtctcttttgcccaggccagagtgcagtagcttgattttgactcactgctgccttgatttcctgctctcaagtgatcctcctgcctcagcctcctgagtagctggaactacaggtgaaggttaccactcctagctaacttttttttgttttttggtagagacagagtctcactgtgtttcccaggctggtctcattctcgaactcctgcgctcaagcaatctgttcgccttagcctcccaaagtgctgggatcacaggggatcacaggcatgatccaccttatccagccatacaccatcatcctttgatggctgcatggtactccgttgcatagaagtctgttttatttaaccattcattgttcattaagtggtaaacagtattaccatgaatgtccatgtcctcagattttgcacacattcttgattatttccttaggataaattcctaaaactggaattaaatggtttggaaacttgatacatactgacaaatgtctttaagtttctactgattagcattcctgcttgtagcgtatacagatatgcttttctccttacatccttaccaaaacttagtgttactctttttaaccttccgctatgtccttttaatatttgaatttctgtagctaaaatatatgataccagggagaaatttaaaacaaatagaaattggtggccagcagggtggttcacacctgtaatcctggcactgtgggaggctgaggtgaaaggataactcgagcccaggagttcaagaccagccggggcaacacagtgagaccccacctctacaaaaaaaatttttttcagaggctgggcacagtggcttatgtctgtaatcccagcactttgggaggccaaggtgaatggatcacctgaggtcaggagttcgagaccagtctgaccaacacggagaaaccccgtctgtactaaaaatacaaaattagctggatgtggtggtgcaggcctctaatcccagctacttgggaggtggaggttgcagtaagctgagctcataccattgcattccagcctgggcaacaagagcaaaactccgtctcaaaaaaaaaaaaaatttttttttttcttaaattagccaggcatggtgacacatacctgtagtcctagctgctcgagaggctgaggcaaaaggatcacttgagcccaggagttggaggttgcagtaagctgtcattaggccactgcactccagcctgggcaacagagcaagaccctgtctactaaaaaaattaaagaggcctggcacagtggctcatgcttgtaatcccagcactttgggaggctgaggcaagtggatcacttgaggccaggagtttgagaccagtctggccaacgtggtgaaacctcgtctctactaaaaatacaaaaattagtcgggcatggtggcatgtgcctgtagttctagcttctcaggaggctaaggcacaagaattccttgaacctgggaagcagaggttgcagtgagcctagatagcgccactgcactccagcctgggtgacagagcaagactgtctcaaaaaaaatgaaagaaattggtgtatactctactttctatggagtataatatgttggttatacaaagagacaaatgatagattccacttattttcacctccatcactcatatccccagttaaagctttaacttttttaaactatttttcaggctttgatcactcagactcgagccaaacaggcagctaccatgagtgaagtggagtggagagggagaacggttccagtgaagattgacaaagtgcgcattttcttattaggactggctgataacgaagcagctattgtccaggtgaggaggaagaacttactgtgctgtcttctgtatgtgtctgaaggttgtcctgtgtgtttaagatgtagtggctcgttggtattcagttctcataaaacaaacttttaatgctgt

SEQ ID NO: 19052 - DNA, 2300 bp, Homo sapien
gaaagagagtctcactgtgtcccaagctggagtgcacagtcatggctcgctgcagtcatgaactcctgggctcatgcagtcctcctgccatggcctcctgagtagttgggactagaggtgcacaccaccacacctggctaaatttttttttttttttttctgagacagagtctcactctgtcgcccagattggaatgcagtggtgcagtctcagcccattgcaacctctgcctcccagtttcaagcaattctcctgcctcagcctcccgagtagctgggattacaggcgcctgccgccatgtccagctaatttttttgtatttttagtagagacaggttttcaccatgttggccaggctggtccccaactcctgacctcaggtgatccgttcacctcggcctcccagtgttgggattacaggcatgagccactgcgcctggccacacccgggtaatttttttttaatttttggtagagatgagatcttgctgtgttgcccaggccgatcttgaactcttgagctcaagtaaccctcctgcctcggcctcccaaattgctaggattacaggtgtgagccccatgcccagcccatatccatgttcttttttttcttctttttttaaaatttattcttatttttaaatttttttgtagaggcagggtcttgctatattgccctggcttgtcttcaactgtgggttcaagtgatcctcccacctgggcctcccaaagtgctgggattacaggtgtgagccactgcacctggcccatatccatattcttgatatcaaagttagaagccaataaaggaagattgagtgggagcactggtttgctgttgaagcagttcctcctcttccatctcctcacaggcttacacagcttacctctcaggaatgctacgttttgaacatcaagaatggaaagctgccattgaggcttttaacaaatgcaagtaagtcctatagtccaaaggctgtggccagttttaattacagattgtcaaatttaagctgcagatcagatagtggattgtttctgtgaaagtgagggtgacttttctttcctatagaaatgttgatgattctctttcaaccttagaacatgccagttatggtagttggtaggagagcttcaaaaggccataatttgtttttagtcactgtgttccccatgagtttttcttatataaggctgatgtaaaacctggcttttcttttctcgcagaactatctatgagaagctagccagtgctttcacagaggagcaggctgtgctgtataaccaacgtgtggaagagatttcacccaacatccgctattgtgcatataatattggtgagagcagggatcaaggcattatactcaacttgaacattgatagatggcctattgggagctcacttcagagagcctagagagttgatgtaactttcttcttcgcttgcctccatcattgacctgagttttggttgatggcaaaagcagaactgttgaagccagccctgcccaaaattatagaagacggttctgcttctgtgtctgtcctgctgtgctgtgtacccccgaagagcagtcttgagtctccggctgagttcattttttactgttttagagcagttttaggttcacagcaaggctgagagaaagatacagagatccatgtaaccccacctccccacatccatagcctctctcattagcatcttcccccaccagaggggtgcatttgttacaattgatggccctttatagacacaccatcatctcccaaagtccatagtttacatcagggttcacgcttgatgttgtacattctatgggtttggacaaatgtttcatgatgtgtatttaccattatataccatatggagtattttcattgccccagtcaatttcattctttataaaagacttgtcttcagagaacagattgtgctgcagattcattgaagtagcatgtggagggggaagagctctttaagtctgagttgaatctagtgattctcaagaaaacagaccagacccttgaagattttcctgtctttctctcttaggggaccagtcagccatcaatgaactcatgcagatgagattgaggtctgggggcactgagggtctcttggctgaaaaattggaggtaatctagtatgtacatttttgtgaaaagtctttggacaaagtccagaaggagtaattcataatcccctagggatatttgatattaatatatggatatttatatctgtattagcaaatatctacatttgctaaaagtttgaacaaaaaactttttcttt

SEQ ID NO: 19053 - DNA, 2300 bp, Homo sapien
agttttttaaaaaagagatggtagatattgcaaggttttattcaacttctgatgcttatgttatagctcagaaaatggttaagtaaaatgcagaaaacaaatttccttcttttgaagttctttcctgggaagtgaataaatcataataaattgcctatgtatcacattttattggttaaatacgtatttctctttaaaaatcaacctgtgattaatatatctatattcttaggccgggcgtggtggctcacgcctgtaatcccagcactttgggaggccaaggtgggcagatcacaaagtcaggagatcgagaccatcctggctaacacggtgaaaccccatctctactaaaaatacaaaaaattagctgggcgtagtggcggacacctgtagtcccagctactcaggaggcagaggcaggagaatggtgtgaacccgggaggcggagcttgcagtgagctgagattgtgccactgcgctccagcctgggggacagagcaagactccatctcaaaaaaaatatatatatatattttatatatatatatatatatatatatatatatatataaaataaatataatatattgtataatatacaatatataatgtatattatatattatataatgtatattatataatatataatgtatattatataatatataatgtatattatatattatataatatataatgtatattatatattatataatgtatattatataatatataatgtatattatataatatataatgtatattatataatatataatgtatattatatatatattatatatatatatctccatattctttgtttgggttttttgtttgttttttagaaagagagtctcactgtgtcccaagctggagtgcacagtcatggctcgctgcagtcatgaactcctgggctcatgcagtcctcctgccatggcctcctgagtagttgggactagaggtgcacaccaccacacctggctaaatttttttttttttttttctgagacagagtctcactctgtcgcccagattggaatgcagtggtgcagtctcagcccattgcaacctctgcctcccagtttcaagcaattctcctgcctcagcctcccgagtagctgggattacaggcgcctgccgccatgtccagctaatttttttgtatttttagtagagacaggttttcaccatgttggccaggctggtccccaactcctgacctcaggtgatccgttcacctcggcctcccagtgttgggattacaggcatgagccactgcgcctggccacacccgggtaatttttttttaatttttggtagagatgagatcttgctgtgttgcccaggccgatcttgaactcttgagctcaagtaaccctcctgcctcggcctcccaaattgctaggattacaggtgtgagccccatgcccagcccatatccatgttcttttttttcttctttttttaaaatttattcttatttttaaatttttttgtagaggcagggtcttgctatattgccctggcttgtcttcaactgtgggttcaagtgatcctcccacctgggcctcccaaagtgctgggattacaggtgtgagccactgcacctggcccatatccatattcttgatatcaaagttagaagccaataaaggaagattgagtgggagcactggtttgctgttgaagcagttcctcctcttccatctcctcacaggcttacacagcttacctctcaggaatgctacgttttgaacatcaagaatggaaagctgccattgaggcttttaacaaatgcaagtaagtcctatagtccaaaggctgtggccagttttaattacagattgtcaaatttaagctgcagatcagatagtggattgtttctgtgaaagtgagggtgacttttctttcctatagaaatgttgatgattctctttcaaccttagaacatgccagttatggtagttggtaggagagcttcaaaaggccataatttgtttttagtcactgtgttccccatgagtttttcttatataaggctgatgtaaaacctggcttttcttttctcgcagaactatctatgagaagctagccagtgctttcacagaggagcaggctgtgctgtataaccaacgtgtggaagagatttcacccaacatccgctattgtgcatataatattggtgagagcagggatcaaggcattatactcaacttgaacattgatagatggcctattgggagctcacttcagagagcctagagagttgatgtaactttcttcttcgcttg

SEQ ID NO: 19054 - DNA, 2300 bp, Homo sapien
ttccacggcgcaggcggagagtggcgcttgtacctgcttccgagctccagcccccgcagtcgggggttctgggctgaccaggcggactgacttccccggcagacgccggagcggtggaggggtcgaccccggaccctgcgtgtgcgccgcgccgcagggagcacggacctcgcactccgcgcgcctcggcgcttccctgcagcctggcaggggtgcaggatatcccgggaccgtcgaggggctggggtgccctcaaaagaggacccctgggagatcggggggaggaaacgcggggcggaggcggatgaggggccccggagtctggctctttcgcccaggctagagtgcagtggcgcgatctcggctcactgcaacctccgtctcccgggttcaaacggttctcctgcctcggccttctgaggggctgggactacaggcgtccgccacaacgtctggctagttttttgtatttgtatttgttgagacagagtctcactctgtcgcccaggctggagtgtagtggcatgatatcggctcactgcaacctccgcctcccgggttcaagcgatcctcctgcctcagcctcccgagtagctgggatgacgggcgcctgccaccacgcctggcttattttcgtatttttagtagaaatggggtttcaccatgttggccaagctggtctcaaactcctgacctcaagtgatccgcccacctcggcctcccaaagtgctgggattacaggcgtaagccaccgagcccggccacctttttcccttctcttacccattgaacgttttccctccaattcaatccaatatactgagcatctattgtgtcaggctctgtctttggctccatgcctcagtttcctcagctgtaacaaggaaatggtaacacttccttctaagagggatctgctgagaaaggaatgagatgtatgggagagttagttaaatctgaatgcatcagatccttattctttttctcctgaccttattccgtataccttgaggaaattcaaaatagagttcagggccgggcgcggtggttcacgcctgtaatcccagcactttgggaggccgaggcgggcggatcacgaggtcaggagatcgagaccatcctgaccaacatggtgaaaccccgtctccactaaaaatacaaaaattagcgggacgtggtggcaggcgcctgtaatcccagctactcgggaggctgaggcaggagaatggcttgaacccaggaggcagaggttgcagtgagccgagatcacaccattgcactccagcctgggcaacaagagcgaaactctatctaaaaaaaaaaaaaaaatccgtcatttaatcttcctaacaaccacttaaattggttatccccatttcatagatgaaggaacagatttacagggagattaagttacgtgcccaacatgtccctgccgctaatgacggagcggggattggaatcccaggtctcagactctagaaggtgcaaagcaaaaattcatattttcccatgtctcaacacttctccctctttggactgacggccccaaagtgcagtggtccacggccccaagcggtctgagaaagtcaccccgttaggacaccgtctgctgactgcgcagcgcttcctccggcttggcgttcttacggccagcctcagaggaaagggcaggcagaggcgggtcccttacggacggggtgtcccgttccggtagggaggaccccatctcttgagtccctggggatgcagacaccccgaaatccagtatctttggtctcctgctttctgctgggcaggacgtgaaccagatccccagtccaggatgcaggacctggggtccacctccggttctccgcccttagtgggtgggaggtgggactgccccctgagatctcagcagccacggtctcactgcggcctcaagtccccacctagccagccacaattccggacccgggatgacaggatccctcgcgcaggcgcgctccagcacatggcgccctgctgcagcaagggccgacggcggcggagtccgccgctatcccatcagcccggccaggcaggtccagctctcacccgcccaggtcgtcccgcctcccctatcccgtcttgctctgcggcgcaggggcaagatggctgctgagaagcaggtcccaggcggcggcggcggcggcggcagtggcggcggcggtggcagtggcggcggcggtagcggcggtggacgtggtgccggaggggaagaaaataaagaaaacgaacgcccttcggccggatcgaaggcaaacaaagaatttggg

SEQ ID NO: 19055 - DNA, 2300 bp, Homo sapien
agtgagaccgtggctgctgagatctcagggggcagtcccacctcccacccactaagggcggagaaccggaggtggaccccaggtcctgcatcctggactggggatctggttcacgtcctgcccagcagaaagcaggagaccaaagatactggatttcggggtgtctgcatccccagggactcaagagatggggtcctccctaccggaacgggacaccccgtccgtaagggacccgcctctgcctgccctttcctctgaggctggccgtaagaacgccaagccggaggaagcgctgcgcagtcagcagacggtgtcctaacggggtgactttctcagaccgcttggggccgtggaccactgcactttggggccgtcagtccaaagagggagaagtgttgagacatgggaaaatatgaatttttgctttgcaccttctagagtctgagacctgggattccaatccccgctccgtcattagcggcagggacatgttgggcacgtaacttaatctccctgtaaatctgttccttcatctatgaaatggggataaccaatttaagtggttgttaggaagattaaatgacggattttttttttttttttagatagagtttcgctcttgttgcccaggctggagtgcaatggtgtgatctcggctcactgcaacctctgcctcctgggttcaagccattctcctgcctcagcctcccgagtagctgggattacaggcgcctgccaccacgtcccgctaatttttgtatttttagtggagacggggtttcaccatgttggtcaggatggtctcgatctcctgacctcgtgatccgcccgcctcggcctcccaaagtgctgggattacaggcgtgaaccaccgcgcccggccctgaactctattttgaatttcctcaaggtatacggaataaggtcaggagaaaaagaataaggatctgatgcattcagatttaactaactctcccatacatctcattcctttctcagcagatccctcttagaaggaagtgttaccatttccttgttacagctgaggaaactgaggcatggagccaaagacagagcctgacacaatagatgctcagtatattggattgaattggagggaaaacgttcaatgggtaagagaagggaaaaaggtggccgggctcggtggcttacgcctgtaatcccagcactttgggaggccgaggtgggcggatcacttgaggtcaggagtttgagaccagcttggccaacatggtgaaaccccatttctactaaaaatacgaaaataagccaggcgtggtggcaggcgcccgtcatcccagctactcgggaggctgaggcaggaggatcgcttgaacccgggaggcggaggttgcagtgagccgatatcatgccactacactccagcctgggcgacagagtgagactctgtctcaacaaatacaaatacaaaaaactagccagacgttgtggcggacgcctgtagtcccagcccctcagaaggccgaggcaggagaaccgtttgaacccgggagacggaggttgcagtgagccgagatcgcgccactgcactctagcctgggcgaaagagccagactccggggcccctcatccgcctccgccccgcgtttcctccccccgatctcccaggggtcctcttttgagggcaccccagcccctcgacggtcccgggatatcctgcacccctgccaggctgcagggaagcgccgaggcgcgcggagtgcgaggtccgtgctccctgcggcgcggcgcacacgcagggtccggggtcgacccctccaccgctccggcgtctgccggggaagtcagtccgcctggtcagcccagaacccccgactgcgggggctggagctcggaagcaggtacaagcgccactctccgcctgcgccgtggaatgcgcgccgggaccactccgcagcccttcccccagcgccgccggccgctgctggggacaacctcgccctcctgtctcttgctcctcctcctgaccccagcgcacccccatccccgccccagatgaggcaaggctccctccgccttcagcccggcagagtcgcactaggagttgcagcggccgcagccccgggagcttcccgctcgcggagacccagacggctgcaggagcccgggcagcctcggggtcagcggcaccatgaacgtctcgggctgcccaggggccgggaacgcgagccaggcgggcggcgggggaggctggcaccccgaggcggtcatcgtgcccctgctcttcgcgctcatcttcctcgtgggcaccgtgggca

SEQ ID NO: 19056 - DNA, 2300 bp, Homo sapien
cgcttcgcatcctctcgcacctggtctcctacgccaactcctgcgtcaaccccatcgtttacgcgctggtctccaagcacttccgcaaaggcttccgcacgatctgcgcgggcctgctgggccgtgccccaggccgagcctcgggccgtgtgtgcgctgccgcgcggggcacccacagtggcagcgtgttggagcgcgagtccagcgacctgttgcacatgagcgaggcggcgggggcccttcgtccctgccccggcgcttcccagccatgcatcctcgagccctgtcctggcccgtcctggcagggcccaaaggcaggcgacagcatcctgacggttgatgtggcctgaaagcacttagcgggcgcgctgggatgtcacagagttggagtcattgttgggggaccgtggggagagctttgcctgttaataaaacgcacaaaccatttcacacacagtgacagcgctgtttcgcgtttctcattgtcttgagattctgggaggaagcctctggggcttcacagaggggctccctaggggtaagtgcaggaccctttgcagagctaccaggaaagagggctgatcacacctcaggcagccgggttacaatccgcataaaaatctgagtctggggagcgtgcgacagaggcaggcagattgtttaaggcgttcgataaagtcggttgatgacagacacagatgtgtgttcccagccgcatttgtgctctggtgtgtgacaggtctgtccttgcctgctttcagctcccagggcccctttgagtctgggcagcccagtcagtccccgtccatttttggccttagcttttccttccctggctacatctgggccaggatcaagtctccagcagctgtttcactccccggcggggggggggggggcaggaaagtctttccctggcaggttgggctccaggtgcacagcactgctgggctggcgcaagctgagaatccacttcaggacaagaatgtcccagggctttgctcatgagttggcctttacctgttgtcaggtaaaactcccttcccagaggttttttttgcttctgttttttttttttttttttttttggttgttgttgtttgtttttcttttgagacggagttttgttcttgttgcccaggctggaatgcaatggcacaatcttggctcaccgcaacctctgcctcccaggttcaagtgattctcctgcctcagcctcctgagtagctgagcttacaggcgtcgaccaccatggacgctaatacggctaatttctgtatttttagtagatacggggtttcaccatattggccaggctggtctcaaactcctgacctcagcttcccaaagtgctgggattaccagagttcttttgttctttttgttgttgttgttggggggaagtggggtggaaggcagaatctcgctctgtcgctcagactggagtgcagtgttgcaatctcggctcactgcaacctccacttcctgggctcaagtgatccagcttcagcctcctgagtagctgggactacaggtgcatgccaccacgcccagctaactcttgtgtttttgatagagacagagtctccctatgttactctggtctcaaacccctgggctcaagcagtctgccctccttggtctcccaaagtgctgagattacaggcatgagccaccacatccagggttcttgagccaaggctctttacacaaaatcacttcagtgtttaaggagagcaaggagactctcaaggctgtccccatctcacatcgttaagcacagaacactctgcccaaaggtttgggtcttaggtaggctggtgtcagccaccgaaatgcaggggacactcgtgggccctgattggaagtacaaagtcagggagaggtagaggtcctacacctgccaggtccccctgggcaggcattgagcgtctcaacgggttccaggtggtggaaatggagcgggacagggacaccaaggcaggtgcagtgtgggcggggctgggtcctgggctttatctttgagcgtttgcggaactggggcaggggctgccaagtgcacggccccagagtccttgcccagagcagctgcctctggctaattgctcagctgccagagaagtgactggaatagaggttgtagcttaggcaccgctgctccctccagtccctccgtgcagccgatgatggccctatggtccctgctccatctcaccttcctggggttcagcattaccttgctgttggtccacgggcagggcttccaagggacagcagccagtaggtggagggcaaggtca

SEQ ID NO: 19057 - DNA, 2300 bp, Homo sapien
cctccaggctcggggaaatgagcagctaaggacggtcctgggtgctcactgaagtcaggcttgaaacggctgttcccaaggtggcttgaggtagaggaggggctcagggccctctccgatgcccccttccccatccccatctgacgtccccctcctggagatgaagggcttcttccctgtaccccaaggggcggcctgcctggcccctggataaacgctgcttgtgtttgtgcggccgacatctcgccaggtcacgagcatgatttccgagttaagcacctgtccgaggccttgaacgacaagcacgggccgctggccggtgagtaccgcagcccagcccgagggcagccgctgacactgccttcgcagcggtccccggatggcctgctcctgcctggcccagctgggcccactctgctctgaggatgggccaggcctatgcgcctctctctccactctctctcttttgggcctaggtctccttgcctctctccagatgggagtgcgtgcctgtctgtcaggcctgggccaaggggagaagccgctgctcctcggaaagcaggcagagagggaaggtggctcccttgagggcagggagccctgacgtccgcctcctgcaacaattcagagctctgatcccctcggagcccatcccttggcacataggaccaggcagttctgccgccggttttgcctgcaggcgcccccgccgtggcctccagtaatagggtctggcctcctcctggggcagctggcaacccctcctctctgggacttaccagcctcttagattttgaccccatgccagccagcctcagaagctgcagccaaccaccctcttagatgttccagaagccctgactgggctggtcacttccttcacaggccccgcatttgcccacatggatgaccccagtgccagcctccttgaggtggcacagccacctgcccaccctgggctgccctctttcaggtacaactcagaatgctcagtcctggggtcaaaccaccttatccaggacgctgattcaggaatcttccctccttatctttccatccgtcactctcctgcctctggtgtctgatcccactgtctgcgcagagccgagaatgaagccagaacaaaggctgggctcagctccttttattcccctcgaacctggcggggcctgctggctcccttgcagctttctgccagaacagtcagcctcttccccatcctctgccagtgtggggtacaggccaggagctgggggacccacgccgcccccagccaggagtgtggctggccccagaccagcagctcaagagttgtgccatcccccagggagagatgacatgctggacgtggagaccgatgcctacatccactgcgtcagtgccttcgtcaagctggcgcagagcgagtaccagctgctggccgacatcatccccgagcaccaccagaagaagaccttcgactccctgatacaggtcccgccccgccccgggggctctgcagccagccccagcaagagctgtcacaacagactcttgcagccctcaactccacccaccaccaccacctcgtgccctggggaccggtcctgggtggacgctcaccacctccccgtcacccctcttcctgcacactggcccccctacatactgcaaggatcccccactagcccagaactagctcccaccgccccacccttccctgaactgtctccctgccccctcaggatgccctggatgggctgatgcttgaaggggagaacatcgtgtctgctgcccggaaggccattgtgcgacacgacttctccacggtgctcaccgtcttccccatcctgcgacacctcaagcagaccaagcctgagtttgaccaggtgctccaggtatgtgggcgaggggccctcaaaaacacagccaggaggcatcgtgctgccgggtgtggccgccccatccctccctgggagaaccccattctctgtcccacacttctgctctgaaggtgcatggaagcagcttaggaagggccctgggtgagtgagatgctcacagagcgactggaggtgagctgggggctcccctgtgcttcctcagggcacggctgccagcacaaagaacaagctgcctggcctcatcacatccatggagaccatcggtgccaaagcgctggaggacttcgcagacaacatcaaggtccctgctgtcctcccctttctccctccctcccggcccagcaccacagtgacctggccctgggggactctcagagcaggcctccaagagggtgcgttgtcccggggcagccagct

SEQ ID NO: 19058 - DNA, 2300 bp, Homo sapien
accctccaggcgctctgtgtggtggcttctgttaaccccttcttgacttttggattttttcttgtcgctttggtggtttggggaactctggtgtggggctaggctgcctctgggtctctgagccgtccgccttgggcacagcgctcccccggaagttcagtcagggtggcttcctgctggctgctgtttggcgtacgtcccaacactgagcatgctcggagaactctgcctggagtttggggctgggctgggggcctgctggcttcagggtgccccccaggctctcccaccctggttgtgccctctgggtatgcgagctttgtcacgggctcctccgacctgagccctcgcctgttctgattatgatgccactccatatttttgacttctcctggtggatcttggtccatcttcattaccctctgtcctttcagaaatgagctgaaatccagaacaaggagggtcggtagtagaatcaaggctccatttggagaaggaaatgactcctttccttcatccttgtccccagcgtctctggtggtctcagggaaaggcctgctcactgttggggagctgggtgcggggcctggggggcaggtggagggccgctgctgttttctctcactcatttcctaggtcttcttatctcctctctgtgtggctctggtgacagggacgatccgtaaggctcagaaccttctgaaacagtattcccagcatggtctagatgggaaaaaggggggctctaacctcattcctctggaaggtaatcaccctgtgttcccctcctgtcccttcctcctccactgtgtgtccacgcacttggcagggcagagcctcccccaggagggcctcgggagaaaccctgaggggagcagggtgggaacggcaggtccccgatgccactcgggcttcagcgggcacagggacagtttcgcagccctcggcctggtcctctctggctgatggcagctctgccctccctgaggcttccctcctcccttccctgtctctgtccttgtctcctgtgtgaactcagaaaaagttatttgtcttggggcagccctttcacgctcagaccagcagtggcaggccccagctggccgaggcctcccggccttcccatctttagaaaggggagtgtgtgcagcagaggacaggcaaactggggctttccccaaatacagcgaggtggggaacccccctggggccaagcatcagctcttcagcccctccttggtccttctccgctttccctgggcctccaggctcggggaaatgagcagctaaggacggtcctgggtgctcactgaagtcaggcttgaaacggctgttcccaaggtggcttgaggtagaggaggggctcagggccctctccgatgcccccttccccatccccatctgacgtccccctcctggagatgaagggcttcttccctgtaccccaaggggcggcctgcctggcccctggataaacgctgcttgtgtttgtgcggccgacatctcgccaggtcacgagcatgatttccgagttaagcacctgtccgaggccttgaacgacaagcacgggccgctggccggtgagtaccgcagcccagcccgagggcagccgctgacactgccttcgcagcggtccccggatggcctgctcctgcctggcccagctgggcccactctgctctgaggatgggccaggcctatgcgcctctctctccactctctctcttttgggcctaggtctccttgcctctctccagatgggagtgcgtgcctgtctgtcaggcctgggccaaggggagaagccgctgctcctcggaaagcaggcagagagggaaggtggctcccttgagggcagggagccctgacgtccgcctcctgcaacaattcagagctctgatcccctcggagcccatcccttggcacataggaccaggcagttctgccgccggttttgcctgcaggcgcccccgccgtggcctccagtaatagggtctggcctcctcctggggcagctggcaacccctcctctctgggacttaccagcctcttagattttgaccccatgccagccagcctcagaagctgcagccaaccaccctcttagatgttccagaagccctgactgggctggtcacttccttcacaggccccgcatttgcccacatggatgaccccagtgccagcctccttgaggtggcacagccacctgcccaccctgggctgccctctttcaggtacaactcagaatgctcagtcctggggtcaaaccaccttatccaggacgctgattcaggaatctt

SEQ ID NO: 19059 - DNA, 2300 bp, Homo sapien
gttgcccaggctggagtgcaatggcaccatctcggctcaccgcaacctttgcctcctgggttcaagcaattctgcctcagcctcccgagtagctgggactacaggtgcacaccaccacacccagctaatttttgtatttttagtagagatggggtttcactatgttggccaggctggtctcgaactcctgacctcgtgatccacccgcctcggcctcccaaagtgctgggattacaggcatgagccaccacacctggccggagcaaaatatttattatcagtatttttattaagcatctactatgggccaggaactgtttagagactcaggccaagcacggtggctcacacctgtaatcccagcactttgggaggccgaggcgggcggatcaactgaggttgggagttcaagactagcctgaccaacatggagaaaccccatctctactaaaaatacaaaattagccagggtggtggcccatgcctgtaatcccagctactcgagaggctgaggcaggagaatcgcttgaacccgggaggcagaagttgcagtgaggcgagatcacgccattgcactcgagcctgggcaacacagcaagactccgtctcaagaaaaaaaaaagagagagagagagagactcaggttaaatgctggaccaggccctcaaaggtagtccacctgagcccaaaacaccctctctacagcggctaactagccccgctactctattctgtgacatctaacagtttaaactttctcctacttagccctttggactacacaaggaccatgtcagcgaaatcatcctgggtatttcctgacacaggaatcagccttttatctcccccacctacaacaggattgaaattgtcctcttgcctgagggaaggctgcccatccctctccaggctctgtgcacccacttcctcctcctcctcctcttcgggtgactatgggtggagtgagcgcttgggaaccctagagcttgggttcttccttctctccttctctccttaggccgggagcaggggctcacgcctgtaatctcaggactttggaaggccaaggcgggtggatcacttgaggtcaggagttcgagactagcctgggcaacatggcgaaaccctgtctctactaataatacaaaaaaattagccgggcgtgttggcagccgcctgtaatcccagctactcgggacgctgaggcacgagaatcacttgaacccgggaggcagagactgcaatgagccaagatcgtgccacttgcactccagcctgggcgacagagtgagactctctctcaaaagaaaagaaaggaaaaaaaaagcttggtgtcccccctgcccgccccaaaccttctcatctaccagcacatgcctccttgtctatcttccgggtgtctggacactgaggccacagaaggactgaaccaagctggtcggccttgtcctttctcaaggctgggggccagaggcagggtgggcagggacgggttagaggaaggagtaactcgaggttttgcaggagctgggtctgcaaccacaacatccagccccgcagggaagttgatccaggggcgccccccaccccgtcccctggagctgcagttggacgctgggtctgggcctggagctccggagcagccccgccagcccacaggatacgtttttgcgtaatgcagggtggaaggcggaaacaagtacacaagcccctggttcattacatggacacacgttaggcatctactgtgtcacctgctccgtgcggggctttgtgggaaacgcaattggccttggtgcctgcccatagaatgcgacctggggaaaggaattcgtcgccttccccagcagtctttatcaaaagggtcggtctttcaacgaaaacagcaagtgagctctaagtgtcctgccagccgcgggacataaggccgatcgaaaacctctgctgaggcaaggaacccgcgtcgaggtcccttgcagcatccgaatacacttctcttcccagccacgctcaaaatggccgtcggtccgttcttgggctccgcgcaggcgcacttcagcctgcgattcccaacatggctccgcccaggcgtcccggggcgggaccaagagcggaagtgggtgtgacggggacgggggcccggtgggcccgcggaggaaagatactggggagtgggagccgcggggttcagagcgatgattcccccacaggaggcatccgctcgacggcgggagattgaggacaagctgaagcaggtgggcgtgggcctggggaggctggggaggaggtgagggaaaggg

SEQ ID NO: 19060 - DNA, 2300 bp, Homo sapien
agccctcggctcccccagggcctggaccaccgtctccctttgcctgggcctggctggccctctctgtgagtgagtgggtccagggagggggctgggcagccgagagtggagaggaagggggagagagagagagagcgcgcagggatgagaggtgggggatctgatgactttccttgtttgttgagccggctgctggcctgggccttcaccccccacggccccctccccccactccaggctcagttgattattacccagccaagagctaagagcatagcactcattcctggggcccgtttctcgaagcgcagctgcacaggcttagggtagggtggggctgagggtctctgctttttcggtgcagctgcaaatgaccctgctctagggtcaggggcattggaaatggcttgggactgcggtcctgtggcctgcccgctttgggtgcttcagggaagagtctgggcgtccttggggggcccctgactccaactagcccttgatggtgatggctgaagactcttagggcactgcctacccagcctcaaatccaccatcctcctgccttgtccattcttaggtgcttaatcttgtccaaagcctgctgggggacaggggtcctgggctgggacggcagggcaggtgggtggataatgcccggcagcaaggctgggatgtttacatggtggcctgggccccttggctgctcagtgcctggttccagagacgtggaacacgaagtgagtgtggtaggcagagccccagtggaaggcacctggctcaggtaattgtccccccagggaggttggctgacagcgggggttggaggcaggaaactgagcagaggttgaggtggggggctgggacagcagctttaggaaggccccttaccccctccaccctccattgggacacacctggccctcacatgctaaggcaccccttccattccaccctccccaagccaactgcaaaagggcaggacgtagagcctggcagggaggccacgttccagtttccgtttctgactcccggccccgacaaaccatcccggggcagggcagtgtctaggaattctaggacttgggacaagaatgcgccttcagttcatcgctctccccaaggagattctgtccacgcagagtctagccctggtctttggcctgggcctgctggatgaatggcaggttatttccccttgaatctcagcctctgcacccctaaagccctccacctctggacattctcccttctctctctctctctctctggaagtcaaaggaggggcagttgcaagaactgggctcctttgcagggctcccttctggggcgctggccgcaccgcagagcctacttggcctgcagatttgggatatgaatccagtgcagcgtggggagcgaggagggaatggggagggagcggccgccgcccgtgcctcctctacctgccaggtgggatctgcgtggcggaagtagcagaagttgtccgtgatccacttgtagatggccgacagggtgatcttggtggccttgctggcctgcatggccatgcagatgagcgtggcatacgagtagggaggcttcacgtgcggattggtggcgtagtccacgtcgtcggggggtggggcctgcagccccgggggcgcgctccgcgacgtgcacgacgacgtgggcttgcccggcgtgtgtggctgccccaggcaggcggggtcggccgccaggggggacccgggcgccgctgaacctggcacctggtggtagccgtgggggtcggtgccccccgggggcagggcgggggccttggcgttgagaatggagaattcctgcagccactgcaggctggtcaggctgtcatccagggcgtcgggctcctccaggccgccctccggcccggcctcctccgccggcccggctcccgagaggcgcagccagctctccgccatgtctgcggggactctccgagggggcggtcagcatccacgggctgagccgggggtggcccgccgcgctctctggcccgctgagtcccgcagctcccgttacacggcctcccggacgcgcgcttccatctcgcgaccccgggggcgcctcctccgaataagtatgtggtgcctgcgaggaccacggtgggagctgagcactaccccacccccgaggggacagtgtgtgtacggggacgccctctctaacatcatccccgcagctggggaggatcttttagtgccgaggtatgggaaacagaagcaaggccctggggtcccacccccatcagatctgcctccctcttcctttcctcttcgagg

SEQ ID NO: 19061 - DNA, 2300 bp, Homo sapien
cccctctccctggagtacacttgtggtcacactacagtggggacatcaagaatgcaatatttatggattgctgcatgattcttaaaaatgaataaaactgtttacaagggaaggagagctaactgcaaagtgagcttatctgtgaaagtttctgtctgactttcgccagcactctttaatacttttactcaagaggatctggagttggaggagtgggagaggcaagggctagggaaaggcatgttggcgggggagtgatgcgccatagccgggccttcttcatggtctgggcaccagcctccccgaccccggctctccagctcctgggcagaggcggggtaatcaacccagcccccaccactgcctctgcagccgccttaaaccggagaacgtccaaccctgcagctcctcaataattaaagagcaggaaagctggtgacaggagggaggccaggggaagggaggaggaagggacacagtccccagagtccctctactcttaatccctgtgacttaaaggttggtgaaattaattgggcaaatgaccccgctaggagaatttgacaagtccatgacttcagagttttacccacgggctctgcttcatcagctgtctccagaggagtgagtgcgcttctgcagaagcctctggaatgtcagcttcctggaacctcgaggatacgggtggggaaggagctgcttactgggacacactggattaccctacccccttggtgtgtctgccgcctctgtggatgtaagcggcaggtggcatcggaaagtcagacctgcctgggacaccagagaaagaccctaagagtcgggggagagggaaaggctgcagaaacatgagaaagtgccactcgtagcggagaggaaagaaaacctcaaggatacggttcccgagcctgagcccgctcccagccttagccccccaaccccaggctccgtcccaggagcagtcgacgcctcaaagcgtacgggacaggaagggggtgggggcgagagtcttggttccccagaacgaacggatccatagcggttcccggtgccgcaggccgcgcgcttctccgaccccagcgcggggccctcgggcgggaatgagccgagccgggacttagcggcgggtagggggttgggtggcgcgggagagggcggcagaaggagggagttcgaagagagttgccgccagggagagtggcaagtgcccgcggtctccttggagacgtgctggccaatggcagaggcggaagctgtttatgggggcggagcgtcgccatggcagcaggagaagcctttggagcggctacttaatgccggtcccggggccgcggtagctcagagaagcgccgtcgggcgggggggcggcaagaggcgctggcagggcccccgagctgggggcagagagccgcagggggtgggagcaacttcttccagaaccttcctctggcccgggctgcgctctgagccaggtaagggatggggagggctgcaggccagggggaagggtgggcaacggtaccaacccgctctctcattcgtccttaacggaagtggtgggcccagggactgacatcggagaagtctgggggaaactcgcctcctgccccccgttactgttccgtccccttccttcccaatgatcccctatcataatattccttttcaaggatcagaggacctccaccgcccccgccccgtcgtaccgccctcccaaacttctcgccccacttccatttgttgcgaggaggaagggggtcctgatttcctgctcttcgggagaaaaggatagcctcggatgcccctaccctcttcatttggctaataaaacctcgaagaggaaaggaagagggaggcagatctgatgggggtgggaccccagggccttgcttctgtttcccatacctcggcactaaaagatcctccccagctgcggggatgatgttagagagggcgtccccgtacacacactgtcccctcgggggtggggtagtgctcagctcccaccgtggtcctcgcaggcaccacatacttattcggaggaggcgcccccggggtcgcgagatggaagcgcgcgtccgggaggccgtgtaacgggagctgcgggactcagcgggccagagagcgcggcgggccacccccggctcagcccgtggatgctgaccgccccctcggagagtccccgcagacatggcggagagctggctgcgcctctcgggagccgggccggcggaggaggccgggccggagggcggcctggaggagcccgacgccctggatgacagcctgaccagcctgca

SEQ ID NO: 19062 - DNA, 2300 bp, Homo sapien
ctgtcctgtcccctgcaggtagtattcacagtgtggtgttacctgggaggagggaggaaggagctgagatgaaggagattcaggtaaacagtagccacagtggccaggacccccttcctgaggatccctgtccttcctcgcagcaggtgcttagtcctctcctagggagaagcacggaaagattcctcaaggcctcagtcccatgtccaaggcatacctaggttagaaatgtcctttacttgtttctcagttactatttctcctcttcctccctccccctgccttctcttggctgtcatttagctctctggcccacagaaatactccatccaaggagctggtcctcagtcagcctgatgaggacaggtcagtggccaacccttttgccccagtccttcatctggagacagtcacatagtcacgtcaacagttcacccaaagagaagaggtggggcctggcttctcccacagggcacagcctaactatggagacccagggctccttcctgctgcactaggcctgtgctctccctattgccttcaggtggtgtgatcccggcttcctcacagagcccttttttccttctgcccagctccatcccaccagagtttctacccccgctgaggcatctcctgggcacagaccaccacactctaagccggctggcctgggagttagggtcctgcccacctcacctgggagttggggtcctgcccacctggagtttagcacgctggtcgctcactttgctttggtctgcacacctggtgtgtgcatgtgtatactgcttgtgccatctgtgtacccctctccctggagtacacttgtggtcacactacagtggggacatcaagaatgcaatatttatggattgctgcatgattcttaaaaatgaataaaactgtttacaagggaaggagagctaactgcaaagtgagcttatctgtgaaagtttctgtctgactttcgccagcactctttaatacttttactcaagaggatctggagttggaggagtgggagaggcaagggctagggaaaggcatgttggcgggggagtgatgcgccatagccgggccttcttcatggtctgggcaccagcctccccgaccccggctctccagctcctgggcagaggcggggtaatcaacccagcccccaccactgcctctgcagccgccttaaaccggagaacgtccaaccctgcagctcctcaataattaaagagcaggaaagctggtgacaggagggaggccaggggaagggaggaggaagggacacagtccccagagtccctctactcttaatccctgtgacttaaaggttggtgaaattaattgggcaaatgaccccgctaggagaatttgacaagtccatgacttcagagttttacccacgggctctgcttcatcagctgtctccagaggagtgagtgcgcttctgcagaagcctctggaatgtcagcttcctggaacctcgaggatacgggtggggaaggagctgcttactgggacacactggattaccctacccccttggtgtgtctgccgcctctgtggatgtaagcggcaggtggcatcggaaagtcagacctgcctgggacaccagagaaagaccctaagagtcgggggagagggaaaggctgcagaaacatgagaaagtgccactcgtagcggagaggaaagaaaacctcaaggatacggttcccgagcctgagcccgctcccagccttagccccccaaccccaggctccgtcccaggagcagtcgacgcctcaaagcgtacgggacaggaagggggtgggggcgagagtcttggttccccagaacgaacggatccatagcggttcccggtgccgcaggccgcgcgcttctccgaccccagcgcggggccctcgggcgggaatgagccgagccgggacttagcggcgggtagggggttgggtggcgcgggagagggcggcagaaggagggagttcgaagagagttgccgccagggagagtggcaagtgcccgcggtctccttggagacgtgctggccaatggcagaggcggaagctgtttatgggggcggagcgtcgccatggcagcaggagaagcctttggagcggctacttaatgccggtcccggggccgcggtagctcagagaagcgccgtcgggcgggggggcggcaagaggcgctggcagggcccccgagctgggggcagagagccgcagggggtgggagcaacttcttccagaaccttcctctggcccgggctgcgctctgagccaggtaagggatggggagggctgcag

SEQ ID NO: 19063 - DNA, 2300 bp, Homo sapien
gcaaagaaaagccttcctgtagatgggtgatagatacctgaaattctacactgttcgttcttttaggttaattactcgcctctcttttaatgaggtcaataataagaatatcttaggataaattagttttccaatataatcactgcatgaaaacaagttttaagagcagcagaggaggaaacagatcctgggctcaggcccagggcactacctgggcaggccaggccttggtgagttgcctcatgggggaaggcctggttctccaggaggcctggatgggatggaaaggctcgtgtagctagaggaagatggtttgtccattttcctcttgttagattggcattagcaacagactgttaaaacggagagtgggatataaaatcagcgacaggctatgtcttaggggaagggatggctaagaaacagaggtgaggcagaagagtgtgctcctaaaagtaaatggggcagggccaacttagacactgacatggcccaggttaatgggagtgggattgggccttggtagttggggttttaagaaacagggctggccgggcttgatggctcatctctgttatcctagcagttcgggagcctgaggcaggtggatcacttgaggtcaggagtttgagaccagcctggtcaacatggtgaaaccccgtctctaccacaaaatacaaaaattagccaggcatggtggtgcacaccctgtaatcgcagctactcaggaggctgagacaggagaatcgcttgaacccaggaggtggaggttgcagcgagccaagatggtgccactgcactccagcctggatgacagagcaagaccctatctcaaaaaaaaaaaaaaaaaaaaggaaacagggccaagaggtgtaattttgctgcatgttggggatggggtggcttcatggtgtggggtacacaccattagcctctccctcaaggtcttgctatcgccctttgcatccatattttcccttcccatctttttccttgccaacttcttcttctttttctttctcttttccattcctttatttgtataatgtctgaactcaaattggattatatagcaaatgcctagattttaatgcatgcccttccatcctttttctagtctgtgccttcttaattgtccataatagtatgctgcagtgcaagtattattattgtatttgtgaaattttatgttccctgttgtatataatgatgggtgaattaaatatttgattttctttcttctctcaaagagaaaacataagtaaataaaagcatcttttacttatccaggcctttgattttttttctcattatgaatcggtagtccttggttaccaaaagaggtaagattggagggagttcccactcttgtctctcagtagagacagcctgtccttgaacctttctgtttgctgttcaggtagacggggtcagctacctccttcaggagatctatggaattgaaaacaagtacaacacacaagattctaaggtaagttttacccaaaattctgaatgtactctttccaggaggccaagtgagaaatcgtaagccagcgtccagaaatttagcgtgccaaactctgaaatcagttaggtcttagaagggtattttcttgttcctcatttcagatcattacgcttttaccactttggaaatgagaaaagtaggctggtttggctttgttctgccacagagctctgtccaactcggtttccaccagggccctttctttgctccttttcctttatctgtgtgatcccctaagtcccttcagctgagatttgagaggcccagctctgggccttataggaggagctcgagtggttagtctcgtcctctcaattttagataaacacttcccagaagaagtgaagctaagtgtgtggacgcactgggaaaatgacaaagtccaatgtcaatgcagattttgttcgtaattattacttatcttagctcttcagccacgctgccttgtcagtaaagtatgggacaggaagggctttgtgccattggctacatttctttctccttggccaggtggctgaagacgaagtgagtgataacagtgccgagtgtgtggtgtgtctctcggatgtccgggacaccttgattctgccctgtcgccacctctgcctctgtaacacctgtgcagacacgctgcgctaccaggccaacaactgccccatctgccgactgcgtaagccccagagcggcagggggactggtgggtgggagaggggacaagaggacatttacaaaacactgaagcatgtgctgctgctggatctgacaaacg

SEQ ID NO: 19064 - DNA, 2300 bp, Homo sapien
gcaaaaatccagagagaaggaaaatagaagaagaaagacgcaagtaatagagcacccatttagaaggtctgacatccaactaacgggttctacagagaacagagaatgtaaaaggaaggaaatcatcagtgacatagaatttaagaaaacttctcagaaccagagggtacaagtttctaaatggaaaggaccaccaagtgcccacacagtggctgagaaagaggaccgtctgtaagctttcagaagaagaaggatcaacagttggaacgacttcagacttcttgggagcaacgctgggaggtgaaaaataaggcagtgaaaaggctttcagtgtcttttagaaattatttataatctagaatactttgctcagccaaactttcagtgaagtgtgaatgttgaataatagctctcaaaagtttatttcccaacacaccctttttcaggaagctggcaggacacgtgctccaccgatatgaaagaataacccaagacagaggaagacttgaggtgcaggaaacatgagcttctacaggaggacagaggcaaaagggacccaccaggatgttggagggggagagagattccagggtggcgactgggagccaggtgcagagggccaagtacagatgggagcaagtccaagggacctcctcaataagatgaaatgaatagaccgcttggtgcatctgaacgtcttgagagatttagacagccccagagagcttgggttggaatttgtgatgagtacataggaaactacgcaactggaagaaaaaaaaaaaaataggatgagcactaagaaaaagttatgcaggaaaagaaaaataatcatagattataagtttgtgtaatcacagtaatacagacacaaatgtactggactattataataaaatcatgatgcagctacactggggggatggcggagttcctacatggagcacagtgaggaaagagaaagaaatccttgtttccatagtaggaaacccatagatagcgcctgaaactgaaaaatcaagaagtagtaacccaagtatattttttagaaacgtgggtaaatgccaaaatgatcactaaaaggggtgtcctctgaagacgaggaaagggaagaagtaaggcctgctgttttttgccttgaggaaactatttaaactatgtgattaataacttttattaaaataaaaacaaaagtgccaaatgcacaatggtgtagtggtagcactatgagataccagaagtaacctgaatgcccagcaacatgggtcatgaagcactctgtgatcattcagaatgaagaggtagacctatgcttatgatcattcagagaagcccacaatatattgctaatttttttaaaggtaaattttaaaatattgatatgctactctgcaaatgctgagtctctggttttctagatgtgctgaggaagtgaagagccctggagaagaggccagtaaagctaaagtccactacaatgttgagttcacctttgacacagatgctcgggtagccatcaccatctattaccaggccacggaagagttccagaatggtattgccaggtaagatcaggagaccaggagagccacttccttcccagattattaccaggccacggaagagttccagaatggtattaccaggtaagatcaggagaccaggcgagccacttccttcccagatagggagagtccatgtcttatccactcagcaagggcggaaaacattctttttctgcagccagatgagatctggttcctgaatttagactttcttctacaaagccctaccctttaccttttcccttcaaattgtgccatcttggtatagtgacaaatggtggtatagtccttcaggtccttaacatgctgttaaaaatctagtaagctacctttctttggatgtgtgggttgaatagaaaagtttaacgttgccaagcaagagcaaaggaaatggattataaaggaccctttcttctcttcgctagaccctgttgataattgagaacaggcatgagcagaggaagttgtcagacccatctgtgccggatactgacttttgctttgcctcccacttgtatcaatagctacattcccaaagacaacagcctccagtcggagactgtgcagtacaagcgaggagtgtgtcagcagttctgcctgccctcccacaccgtggatccctccgagtgggccgaagaggaggtgagctgcctctggggagggtttcccacatccactcagaagggcctaggggctacttaggactcggtctgacagcaaaggggctgctcggat

SEQ ID NO: 19065 - DNA, 2300 bp, Homo sapien
tccctgcctggccctggctaagcagaagaaactctcagacatggataaacccacaaagggaagggatgtcccgtttacaaaatgccgagggcaggaagaaccaaggcttctgaacagagccgaggagcataaggcaacattttactctgtgatgtgtcgaaggccttgtgttttgaggtggttctagattcttatttgcattttacctttacccagcagttacaaggtagggcctgtgtgtgctgaaaggagtatggaggaggacaccagttccctcccacagggatgactgaaagccctggagtagttaggaccagggactctgccagagagctctggtgcttgggagaagctgccggggcagggacttgccctgtaacccaagccttcgttagcagcagccaatataaatgacagggatgtgttcccaccatcctgaggaccctggaggaaaccaaggcacttagcatcaggtctgttggctgctgctgaaaagacggcaatgaaaaatacgaaatgtgccgggcgcggtggctcacgcctgtaatcccagcgctttggggggcggaggtcaggaattggagaccagtctggccagcatggtgaaaccccatctctactaaaagtagaaaaattagccgggtgtggtggcacatgcccgtagtctcagctactcgggaggctgaggcaggagaatcccttgaacccaggaggcggaggttgcagtgagctgagatcacgccactgcactccagcctgggcgacagagggagactccgtctcaaaacacagaaaaacaaaaacaaaatataaccaggaaagacctagactccgtaaaatagctttacaaacctaatcaagggaaccagacaccccaaactgtacttcgaacactgttgaaaagttgtgaaagtcatgttctagcagttgaaatgtttgctgatcagtccactctctcaggaaaaaaaacaccagacccacaaagaaaatagaaggtttaaaacacaaatgtctgtaattaagcaatggaatgacgtcttccgccggcccaagcttcccactgttgtgtgtgtttttatcaacaggagctcccggttctgcctggcccggttcgctttcgcctgcgttgactctcttggcactcaggcctttccaaagtttccggggtcccgtttccacgatacagacagaggctggatgtcttgatcttatcctcagtcgatgttctcctaactttagggctacaaggagccttaaacagcatgtatagagttgggagcgctttgaatagacgcacgtgagagggaggcggcatcttcctagccggtcaccagcattaacacggggcaggagacatgcgaatgcaccgtgggacccctctccctacccccctgcatgagatttccgaagacctccgccggccgacgctgaggggcggggttgggaaggcttcctccaggcgcgggagcagcggagcggggaccgcccgctttgggacgcccaggacaatggcgagcgagctcccggccagtcctcgcggaccgcgggagggggcggctccctgcgcggtaatccgagccgggataaacaggcgcggaggggcgacgcgtcccggccgggtgcagcgctcgtctcctggggtcccagctccggccggtcccgccccgccccgccgcgggcacccggccgcgcccccgtccccgtcgcgagtccccgcccacgcccacgcccccgccgcgaggccctgggccgcgtccacgcgcgccgagtccagccgcggctccccgcgcgaggcacgcgccgccggctcctgctgcagtcccgcgctcattggctgctccggcgcgggcgctcccgccccgcctcgccattggctggggccgccgcggtccccgcgcggagcggccgctgacatcacgcggcctgaggcggcggcggcgcccccggcccagacccgcagcccccttggcagaggcgccgccgcggtgcccggcggaggatggtgcgcggcgcgccgggggctccccgccgccagagccgcagcgccgcagcggagccggccgcggcgggcagtcggcccccgcaccgggcgcggggcgggcggccgcggtgaagcgcggagggcggcgcgggcaccggggccgggccggggctgcagccgcagcggccatgggggccctgacgagccggcagcacgcgggcgtggaggaggtggacatcccgtctaattccgtgtaccgctacccgcccaagtccggtgagggcgggcgggcgccgcagccgcgaggagggagaggggc

SEQ ID NO: 19066 - DNA, 2300 bp, Homo sapien
tgacacccgcatgtacttatgaaaacctggagccccacagtgacagtacttccttcttctgggctgcttgcggcctgagctccctggcagtgtatgctgccagctgctcacttttgttttcaccttgcaattactggacgggaaggctgcaagctatactggagtctccagccacacgccaggtcccagcccacgtgtacttcagggccattcccaggaaaaagctgactcctactccttcaaaacaaacaaataaacaaaaaacgaaccaaatggaatgagctcatgatagtacctgaatttgtttttcatcagtacagaaacattaacattaattgtaatcttcttcttgtttgtaaactttaaaaatacatactgtcaagttttcttagatagggagttaaatccaatttaggcaaagtcaagatagaaccacgacgtgctttcttattataagcctccttctgttctgcagacctttagctggttaaaatacactctgtaattagtagttcagataaaaaactcacaaagttctcctgaaacagaaactcttaacagtgaatccctaacaatatttatcttcccaatctcttctgccccttccccaatctgcttaaactcctagttcttttcctacccccacaattctcaaacacagccctgaagatcaaactctaatccagaagatggaagctcagcacatacaaacaaatttggggccaggcatggtggctcacacctgtaatccctgtgctttgggaggctgaggcaggaggatcactttagtccaggagttcaagaccagcctgggcaacaatagtgagatctcatctctaccaaaaattcaaaaattagtcaggcatggtggtgtgtgcctgtagtcccagctactcgagaggctgaggcaagaggatcgctcgaagttacagtgagccatgatcatgtcactctagccctatctaacaaccaccaccaccaaattttggactttaaagggctaccactgagaaacagtatctctgtagaaacactcactgtttgttattgtttgtttttatttggtagagatggagtctgtgctatgttgcccaagctggtgttgaactcccggcctcaagttatcctcctgtctcggcctcccaaagtgctgggattataggtgtaagccatcccaaccccagactccacccctactgccacccgttgtttttttaaaagatggtagaaattaaagcttcatcttagctttcgtgacaagcaagagaaaaaaaaaaaaagaaaattaaagcttcagttaggtcaaccgatttaacaagaaaaaattcttgacttggcattttggccactgagaaagtctcacttttttccttgcatatttccttgcatatcgtatttattgtacataaatcttggcttccatcttcagagagcaaagtctttggtctaaaaactgagaaaatactgctcgatccttgcggtgggtagtgattagaagagggcaggacgcgggttcctagggtgcaagtaacgttctgttaattgatctgggtgttcacttggtgaaaagtctggaagctgtacctgcgacatcgcactttcctaatgtacgttatatttcaataaaagatttttttaaattggactgcttgaaagttatttttaaaaattacatgcttttgagacttgagcagctgcaaaggctctgttttctattttgatcattctgtttctcgagatgaccacatctttcagaggaaatgagtcaaagccactctgtcttgcttttccagctgagcatgttctgtttcaatgaagtaatgaatgaacttggccgcaccacccccaagcctacaacagcaaacagagggccctcggccaatcagcaggcactccgggttttcaagttgagttcaaacaggaccaccggaggccaatcagagtgcgcggccccgccccgaacgcccggccgtgaccaaccacgaggccggatgagccaaaacacagcggccggccaatgctggggagccccacggcgccgagctccgccaatgggcgcggccgggcgaaaagagaaacagtgagggccccacaggccgcaggattcgaatcgaacgtccttacgggagccgggcgctggcggagcggcgccccggccaatcagcggcagtccccgaacgttgggccggcccagccccgccccgcgctgttgtttgtggtgtcggccgggccgcgggagtcgaaccacaacattcgccgggcgggcggcggcggagcgggcggcggagcggcggcagcag

SEQ ID NO: 19067 - DNA, 2300 bp, Homo sapien
agcacagaccaacatggtctggtttcagtcagtgcatatcagcatggtatgacatttcctggcacagaccaacgcagtatggaaccacttggcatggatcagcgtggatgtgtaatatcaggcatgggtcagcaaggactagtaccccctggtatagaccagcaaggattgacattgcctgtcgtcgatcaacatggcctggttctaccttttacagaccagcatggtttggtatcacctggtttgatgccaattagtgcagatcagcaaggttttgtgcagcccagtttggaagcaactggcttcatacaacctggcacagagcagcatgatttgatccagtctggcagatttcagcgtgctttggtgcagcgtggtgcatatcagcctggcttggtccaacctggtgcagatcagcgtggtttggtccggcctggaatggatcagtctggtttggcccaacctggtgcagatcagcgtggtttggtctggcctggaatggatcagtctggtttggcccaacctggtagagatcagcatggtttgatccagcctggcacaggtcagcatgatttggtccaatctggcacaggtcagggtgtcttggtacagcctggtgtagatcagcctggcatggtccaacctggcagatttcagcgtgctttggtgcagcctggtgcatatcagcctggcttggtccaacctggtgcagatcagattgatgtggtgcaacctggtgcagatcagcatggtttggtacaatctggtgcagatcagagtgatttggctcaacctggtgcagttcagcatggtttggtccaacctggagtagatcagcgtggtttggcacaacctcgtgcagatcatcagcgtggtttggtcccacctggtgcagatcagcgtggtttggtccaacctggtgcagatcagcatggtttggtccaacctggagtggatcagcatggtttggcacaacctggtgaagttcagcgtagtttggtgcaacctggtatagttcagcgtggtttggtgcaacctggtgcagttcagcgtggtttggtgcaacctggtgcagttcagcgtggtttggtccaacctggagtggatcagcgtggtttggttcaacctggtgcagttcagcgtggtttggtccaacctggtgcagttcagcatggtttggtccaacctggtgcagatcagcgtggtttggtccaacctggagtggatcagcgtggtttggtgcaacctggagtggatcagcgtggtttggtccaacctggaatggaccagcgtggtttgatccaacctggtgcagatcagcctggtttggtccagcctggtgcaggtcagctgggtatggtgcagcctggaataggtcagcaaggtatggtgcaacctcaggcagatccacatggcctggtacaacctggtgcctatcctcttggtttggtacaacctggtgcatatttgcatgatttatctcaatctgggacatatccacgtggtctggtgcagccaggaatggatcagtatggtttgagacaacctggtgcatatcagccaggcttgatagcaccaggcacaaagcttcgtggctcttcaacattccaggcagattctacaggttttatatcagtacgtccatatcaacatggtatggtacctcctggcagagaacaatacggccaggtgtcaccactcctagccagtcaaggtttggcatcacctggtatagatcgaaggagtttggtaccaccagaaacttatcagcaaggtttgatgcatcctggcacagaccagcacagcccaataccactgagtacaggtttgggatctacacacccagatcaacagcatgtggcatcacctggcccaggtgagcatgaccaggtatacccagatgcagctcagcatggccatgctttctctctctttgacagtcatgattcaatgtatcctggttatcgtggcccagggtatctaagtgctgatcagcatggccaggaaggtttggatccaaatagaacacgagcctcggaccgacatggaattcctgcccagaaggccccaggccaagatgtcactcttttcaggagtccagactccgtcgaccgagtcttatcagaagggagcgaagtctcgagtgaagtcctgagtgagcgacgcaattcactgcgtagaatgagttctagtttccccacggcagtggagacatttcatctgatgggagagctcagtagcctctatgtggggctaaaggagagtatgaaggatctggatgaggagcaggccggccaaac

SEQ ID NO: 19068 - DNA, 2300 bp, Homo sapien
tggatgtgcaagtccctgatagaaaatggtgtagtatctgcatataagctatgcacatcctggatgacttgtaatacctactgcaatatcctgtgtagatggtggtcatgctgtattatttagagaatcatgacaggaatctgtacgtgttcagtcgtggttggttaaatctgcagatgcagagctcacggaggaggctggccatgcatggcacacattcataggttctctttaagtagccttgctgtgcttctgttaggaagttttatttatacgtttttgggaagaatcttgtatggggaagtcatgtctcaattgttaacaccagatttgtctcgtgctgtttaatcctgctttgtaatgagctcaagcacaggcgcttgaccaggtgagtggtttcttttcttttctttttttttttttttgagacagagtcttgcactgtcgcccaggctggggtgcagtggtgcgatcttggctcactgcaacctctgcctcccgggttgacgcgattctcctgcctcagcctcccgagtagctgggattacagatgcgcggtaccatgcccggctaattttttgtatttttagcagaggggtttcactatgttggctaggctggccttgaaccccttacctcaggtgatccacccgcctcggcctcccaaagtgctgggattacaggtgtgagccaccaagcctggccgtttttttgagatcaattaatttatggcaggctgggcgcggtggcttacacctgtaatcccagcactttgggaggccgaggtgggtcgatcacttgaggtcgggagttcaagaccagcctggccaacatagtgaaaccccgtctctgctaaaaatacaaaaaattagccgggcatggtaccacgcatctgtaatcccagctactcgggaggctgaggcaggagaatcatgtcaacccgggaggcagaggttgcagtgagccgagatcgtgccattgcactacagcctgggcgacagagcaagactccctctcaaaagtaaaaaaaaaattatggcagcacagaaaagggacaattagccaccagttagtcatctagtggctaattggaactgcctgaatagtgagtgggttgtcttttccaagttgcttcacctttgattgaacaaaatatgtggactgtctgaggggaccagggccccaggactgcatcccttagacatggggccatagacatggggccaccactctggaatggacgcagctgatgacacaaagcatggttgccaggaaaccctcaagtctttccttatgtggccccgccaagagtgagtgaatcctggcctttctaggttaaggggatggatggagtctagctggatcttaggaggcctcctcagcccgttgccaaggctccccttgtgatccttgtggtggcctttacttccccccgcccccgtggctcgcagggaggcgtgttgttacgtggaatcttcagggcacgcgggggcccccacgtttcaaacgtccgccggcgcggggactgggagtccagggctccagctcggggacccgaggccagcgacagacagcggaggggtggccatcgcggaccccgccggggagcggaggcgcagattccctggaggcaggagctctgtccagtgactcggccggacccggggcaggggcgccccgaggacctcgcagggcccccgaaaggccccaaggcgcggcgtgcagtgagcgggaagtggttggccggcgccccgcggcggcgcacagctcctgacagccacgatgccgcccgcgaccacggtctccctccgggagctggcggacctctccatcggcacgccagaggtgggcgccgtcaacttcacggccctgcacacgctcatcgtggccatgctcaagaacctcgacctccaaaatacccggatcgacttccagccctcgtcgcccgagcccagccgctcgctgcagtccgtccggagctcgttcagcatcccgcacctgcccgcgcccaaggaggtgcccaagggggcgccccgggagaagcgcaggggcgtgggccaggcgccttcgtcagcgctggagagccaagtgaaggacctgggcggccaggtggaggacctgagcaagcagctcaagcgtgtggacggccaggtgcagggcatcgccacgcacgtgcagcacttctcccaggccagcgggcttgacctggccgcgctagagtggccggaggagcaggaggtgggcgtgcgggcgttcgatagggtgcggactgggagtatcatgaaggacgccgccgagga

SEQ ID NO: 19069 - DNA, 2300 bp, Homo sapien
tgacctcgtgatccacccaccatagcctcccaaagtgctgggattacaggcatgagccaccgtgcccagcctaatttttgcatttttagtagagacagtgttttgccaccttggccaggcttgtctcaaactcctgacctcaggtgatccacccacctcagcctcccaaagtgctgggattaaaggagtgagccaccacgctcagccaacacctggctaatttttgtatttttagtacagattgggtttcgccatgttgcccaggctggtcttgaactcctgacctcaaactatcatccgcctcggcctcccaaagtgctgggattacaggcatgagctactgcacctatcccattcccccttttttttaagaaggtaacaaggtttttgtcagggtctgtgagctggacatgtgtgcagtggttaaataatttggcctaggctgtgcacccactgtcctttttttttttttttttttttctagagagctattggaataggggccaggctgctgcaggctcagggcagctcaacttccaaatcctgtagcttcagacttgtggtccttcacgacatgctgagtcacaatctactgctccctcaagcccaatgtcaccacaagcagagtctctaaaggacattctcagaagatggtactgtcaatgtgagaggcacctctcctcccctcgagttctggtgcagctgataactagagatctcaaatgcttccctgggctttactttctacttcaacaagtactgattgcgggcctctggagcccacacactgccctatacactgggtaacacggagcactcaggaatacacgatcttggcggggcgtgatggctgaggcctgtaatgtcggcattttgaatgactgaggtaggaggatggcttgagcccgggaggtagaggctgcagtgagccgtgatcgcgccactgcactccagcctgggcggcagagggagaccctatttcaaaaaataaataaataataataaaattaaaaaaaaaaaaaaggaactcacgatgtggccgtaaaatgggttacatcctagttaggaaaatagatgtttgcaaaggtacataaatatgcaagcatcaaaacaataacaacaacaacaaaaatttaaaaaatgcaagcatctacgtgtggcacagtcccgcgggccgggcggcttactgtggttgaggtcaccagaaagactgtggaacagacgcatcgcgagtgggtctcggaggggtggcgcatatggaaagaggagaaggagggcttttttgattgaaagcgaataccggcaagagggcctttggcacgttcagggaaccttgccttacacgcagacacagggttggggatctgttcggaaacgcctgaaagatcaggctcaggagaagaccactttttggccgcttcagtactgcggtcaaccagctggaaagaacccccgccctctacttttcaaattaatctccggccggcgcacgcgcctcgtggggcgggcgctgtgctaccatagacatgcagagctagatcgtatacctcctcggaggcggacatgttgggtcctggccaaaaagttggaaacacctggggccactaccgaggtaggctgctcctcccaagaaagtgagaccgaaagagctcccgtggaagcggtcaaagcaggggcggggcgaacctgtgacatgcccctcggaagaacaggcttttagagagtcgccaggctccctgccctcatccgagatggcggcctgagggcgctctagccgacgctcttcggatgcccggagggggcggtggccttgcctctggctctgaggcggcggcgccgggcgctgcgaaggctcggccgctgtagtcagtggtgtggggtgcgcaagggcacggacctcggagctctccccgcttgcgccgagtttctcagcgccttccccacccaaaccggggtctcgcagtcggaagcactcagagtgcagccccgcgcggggccggtcgtaaccgcgccgcgggccggacgatgcccaagaagctgctgctgttgcccccgccctccgcgtcctcggctttccgcgtcccgcgcgcccgccccgttcccccgccggccatgaacgccgctcgcaccggctaccgagtcttctcggccaactccacggccgcctgcacggagctggccaagcgcatcacagagtaagggggcggtgggagggccgggccgggggcggcggcgcctagctctccttcgcgcccggagggacccgctcccctccacccgccccacctcctgcacctggg

SEQ ID NO: 19070 - DNA, 2300 bp, Homo sapien
ctgtgttgcccaggatggagtgcagtggcctgatctcagctcactgcaacctccgcctcccgagctcaagcggttctcctgcctcagcctcttgagtaggtgggattacaggtgtgtgccaccgcgccaccacatctggctgattttttttttttttttttgagacagagtcgcgccctcgcccggtcgtccaggctggagttcagtggcacaatgtcagctcactgcaagctccgcctcccgggttcacgccattctcctgcctcagcctcccgagtagctgggactacaggcgcccgccactgcgcccggctaattttttgtatttttagtagagatggggtttcaccgtgttagccaggatggtctcgatctcctgaccttgtgatccgcccgcctcagcctctcaaagtgctgggattacaggcgtgagccaccgcgcccggccacatctggctaattttttgtattattagtagagacagggtttcaccatgttggccaggctggtatcgaattcctgacctcgtgatccacccaccatagcctcccaaagtgctgggattacaggcatgagccaccgtgcccagcctaatttttgcatttttagtagagacagtgttttgccaccttggccaggcttgtctcaaactcctgacctcaggtgatccacccacctcagcctcccaaagtgctgggattaaaggagtgagccaccacgctcagccaacacctggctaatttttgtatttttagtacagattgggtttcgccatgttgcccaggctggtcttgaactcctgacctcaaactatcatccgcctcggcctcccaaagtgctgggattacaggcatgagctactgcacctatcccattcccccttttttttaagaaggtaacaaggtttttgtcagggtctgtgagctggacatgtgtgcagtggttaaataatttggcctaggctgtgcacccactgtcctttttttttttttttttttttctagagagctattggaataggggccaggctgctgcaggctcagggcagctcaacttccaaatcctgtagcttcagacttgtggtccttcacgacatgctgagtcacaatctactgctccctcaagcccaatgtcaccacaagcagagtctctaaaggacattctcagaagatggtactgtcaatgtgagaggcacctctcctcccctcgagttctggtgcagctgataactagagatctcaaatgcttccctgggctttactttctacttcaacaagtactgattgcgggcctctggagcccacacactgccctatacactgggtaacacggagcactcaggaatacacgatcttggcggggcgtgatggctgaggcctgtaatgtcggcattttgaatgactgaggtaggaggatggcttgagcccgggaggtagaggctgcagtgagccgtgatcgcgccactgcactccagcctgggcggcagagggagaccctatttcaaaaaataaataaataataataaaattaaaaaaaaaaaaaaggaactcacgatgtggccgtaaaatgggttacatcctagttaggaaaatagatgtttgcaaaggtacataaatatgcaagcatcaaaacaataacaacaacaacaaaaatttaaaaaatgcaagcatctacgtgtggcacagtcccgcgggccgggcggcttactgtggttgaggtcaccagaaagactgtggaacagacgcatcgcgagtgggtctcggaggggtggcgcatatggaaagaggagaaggagggcttttttgattgaaagcgaataccggcaagagggcctttggcacgttcagggaaccttgccttacacgcagacacagggttggggatctgttcggaaacgcctgaaagatcaggctcaggagaagaccactttttggccgcttcagtactgcggtcaaccagctggaaagaacccccgccctctacttttcaaattaatctccggccggcgcacgcgcctcgtggggcgggcgctgtgctaccatagacatgcagagctagatcgtatacctcctcggaggcggacatgttgggtcctggccaaaaagttggaaacacctggggccactaccgaggtaggctgctcctcccaagaaagtgagaccgaaagagctcccgtggaagcggtcaaagcaggggcggggcgaacctgtgacatgcccctcggaagaacaggcttttagagagtcgccaggctccctgccctcatccgagatggcggcctgagggcgctctagccgac

SEQ ID NO: 19071 - DNA, 2300 bp, Homo sapien
gcatctgccagcgattccaatgggagaggtctgcctgcgggcatttcttgaggatttttgtgtgcagaaccttgctgattatagttctagggaagatgcgaaaagagaaaagaaaaggtatgtcctccagccacttgtatgctcctcactgatctgaaaggagcactctctgggccctctcaatttttttttttttttttttttttttttttttgagatggagttttgctcttgttgcccaggctggagtgcaatggcgccatctcggctcaccacaacttccgcctcccgggttcaagcacttttcctgcctcagcctccggagtagctgggattacaggcatgcgccaccacgcccggttaatttttttttatatttagtagagacggggtttctccatgttggtcagcctggtctcgaactcccaaactcaggtgatctgcccgccacggcctcccaaagtgttaggattacaggcgtgagccactgcgcccagcccctcaattttgttttttaaaataatttcagtattagcctgcatgcgttgaggtatcagagacattaaaatatcaaacttgcaggtcccctgaggtcaggagttcaagactagcctgaccaacatggagaaaccctgtatctactaaaaatacaaaaattagctgggagtggtggcagccgcctgtaatctcagctacttgggaggctgaggcaggagaatctcttgaatccaggaggtggaggttgcagtgagccaaaatcgcaccactgcactccagcctgggtgacagagtgaggctctgtctcaaaaaaatatgttaacaaaataaaattaaaaaatcaaactctccagcccttataaaggtaatcacttggttacccattcagtttcaaaatggtgagtttcaggcactgctaggatcatcaaatggtgccttgaaggaaaaatgacatcttaactcattctcaagatgccagtcacgttgccgtgatcaggactttagggcaatgagcaaagagaacaaggaactctgctgtctgaaacagctctcctgtcggatcagcctagcgtcactcctgtagctgcacaaaagctcatgggcaccagcctggaattaggcgtcccttgtcctaagcacccctccccagccccagctgtccagcccatcctgtctaatcattacttaaattaccagggttgtgtctggaaagaattgaagggtttgaccttcagaagacaagcctccaggggaggggaatttctattttttggcatgtggataatgaacacaggggagggcaatccctgctccgggctccatgtctttttccagcttgtcaaaataggacgtccacaccctcctttgcccccaagtccccccactaattggcatcaatcgaggaagtctgagcgactgcatgtttaggtaaaagaggaaaggggtggggtggggcgcagtggctcacgcctgtaatcccagcactttgggaggccgaggcgggcagatcacaaggtcaggagttcgagactggcctgaacaacatggagaaacaccgtctctactaaaaatataaaaattagccgggcatggtggtgcatgcctgtaatcccagctactcaggaggctgaggcaggagaatcgcttgaacccaggagacggaggttgcagtgagccaagattgcgccactgcactccagcctgggtgacagagcaagactccatctcaaaaaaaaaaaaaaaaaaaaaatagaggaaaggagtgaacccctgagtggccagctgggtgcctcaacggggtgtctccaaaggcagcttgtgcttgtttgtgaccagggtgacaaaggacttcactgtcctgtagcacagatgaggttccaccctcaggtgggtggaaacagcccaggccattagtgcaaatcccctgcctggcccagggccacgttcagcccactgtctgtttgctttgggacccacccaaggtcacattttagcttttgagaaatgtgaaagtggaaaacattgcaaaacaaaaagcccctggaaaactgtgcacacacccatcccctcagcctgatgctccagcttggctgctaggagatcaatgcagctctgccttcctgctccctgtgcagaggtgccggctcctgcttcctggttcccagctttccttttgggaactgcctgaggtggtttgacacacagctgttgggcttctcttcccttgaggtctctgaaccagggcacccatgcaggtaaacacaaaagcggagtggggtggaatgggggtgctggctgtagcc

SEQ ID NO: 19072 - DNA, 2300 bp, Homo sapien
aaatacaaaaattagctaggtgcagtggctcacacttgtaatcacagctattcgggaggctgaggcaagagtattgcttgaaaccgggaggcagaggttgcagtgagccaagatcgcgccactgcactccagcctcagcctgggcaacagagcgagactctgtctcaaaaaaaaaaaaagggaaagaagttgaggtcaaggaagaccttgaggctatgcaattagggagctgaaatctcctagggaaggtagcttcagggaagggtgagatggcaggaatcctctcctcataaaagcaagtaatttgccatctggcagccttgactccaagtttctggagagctgggaccaggccaggtgaatgcctgctttctttctcgggaaaagaaaaaagggggttctcaggtgtgtctccctggggaggctgcccacaaggaaggggaggctggggaagttagaaaaagtctcccacctgtgaagcagattacctgcaagccaagctctgggttggtgatcaaatcagacctctctgccggcccaggcctgttcccaggcccacggtgggccttgctgagcacagcggctgctcagctgtttccagactcaggatgaagcctggggagggcttggagctgcttcctctttctttttttttttgagatggagtttcgccctgtcacccaggctggagtgcaatgggacgatctcagctcaccacaacctctgcctcctgggtgcaagcaattctcctgcctcagcctcccaagtagctgggactacaggtatgcgccaccacacccggtgtagagacggggtttgagacgggtttctccacgttggtcaggctggtctccaacccccgatctcaggtgatccacccacgtcggcctcccaaagtgctaggattacaggagtgagccactgcgcccggcctgctgcttcctcctcctcagggagacgccacagctctgcggcaagcaatccaccaggcaccagatccccagatacctgcccttcagggagaaatagcctgggatacagagaggcccagaggggagctctggctggacttggcttctcagcgtggggtctgggttcacaggtttgcttctctgctttgtggggaactggttggaggcttgtgcaagcctcttcacctctcagggtttcaggcccccccaactccttcccgccttgtccttttttcttttttaaaaaaggaagtaaagtacagtgggaaacgggccaagctggcagcttgagagatccaagtgcccgccccccgacccgcaaccgtgggaaggggaaccatcttgctcttggccaatcctgcctctctgagcagggatgcagctgggggagtttctggagataggatcaaattctttagaaagggagaaggggaaaggggtctggagaaaggcagcctgggttgggggaagtgaatgacaagaatgaggggggcaaaggccttggaggtgaggggggcagggggttaggcgccagggaggacagaggacccattgtgcggcctggaaccggggccagagggctttgcccttcgcctccctcccgcggggccttccagagccaggaggggagctggggcccggaggcgttggataaagagcccgtgccccgcctccccttgccaactcagtttgcagtcaaccccgcccccgcccgctccgcggactcaaggctggtggtagtgggcctggaggcgcaggatccgacctttctggggccccaggaggaaaaaaaaaggggggaccctgaaccaggtgggctttatcaccacgaactcacagtgcttccctgtgcctcagtttcccctcttcagactctatggctaatgacagagcttttcagatttggtggaaatgctctccggggcggggagcagacggggaaggctgccccagctaatctccgcagccagtaccctcgaaggctgagatctcggggagcacagcctccgattcgcgttttctaggcaccaaagtccctcgctggaggaagaggaggggaagaaggcagaggagaggggaggggcggacggatctggtcctgggctcccgcgcggagccccctcctcccacagccgccgctcgcgtccccgcagcgcatgaccgcggcactgcggctgcagggctctctcccccgcccgcgccggattcctggagcaagggggtggggggctcggaggtgcaggacccatcattccgacacgcgccgcgacgccaggagtcggggatgacgcccctgctccctcccctcgttcctgtttctcggagttt

SEQ ID NO: 19073 - DNA, 2300 bp, Homo sapien
cgtgccccgcctccccttgccaactcagtttgcagtcaaccccgcccccgcccgctccgcggactcaaggctggtggtagtgggcctggaggcgcaggatccgacctttctggggccccaggaggaaaaaaaaaggggggaccctgaaccaggtgggctttatcaccacgaactcacagtgcttccctgtgcctcagtttcccctcttcagactctatggctaatgacagagcttttcagatttggtggaaatgctctccggggcggggagcagacggggaaggctgccccagctaatctccgcagccagtaccctcgaaggctgagatctcggggagcacagcctccgattcgcgttttctaggcaccaaagtccctcgctggaggaagaggaggggaagaaggcagaggagaggggaggggcggacggatctggtcctgggctcccgcgcggagccccctcctcccacagccgccgctcgcgtccccgcagcgcatgaccgcggcactgcggctgcagggctctctcccccgcccgcgccggattcctggagcaagggggtggggggctcggaggtgcaggacccatcattccgacacgcgccgcgacgccaggagtcggggatgacgcccctgctccctcccctcgttcctgtttctcggagtttttcgacccctgagcgcgtcgctgagtcaccttcccggaacgcgctcgggacgctctggacccagcggggactgcccgggggccgcgcaaggcgaaggcgcacccgccgatacgcgcgcggagctgcggccccagggaccccgcgtcccagccagtgccccccgacccgcccggggactctcgggtcccgcccgtctgaccccccaagtgttgggaaacggggccgagctgcctgggtcctccggaagagaagacaccgcggaggcgtgccggagttcagggcgccgcccggctaattggctgcgtgctcctcctggacctgcctcttctcgactttaagaagcgatgagagaggtgtgtgggggcgggtggggccggcgggggcgcgcgagccccgcagcctcccgcaggggcttggtttctcctaactctggccctacctgggcaggtcaccaatgggccttggcaacttcttcctccgtctccgccgtaaccccccagggatctaactcgaggtgctcgcggacacgttctgtggcttgccgcgataagtgtatcacaaacacactgacaaacgcgtccctactggcctccaaagaagtgacaacttctgagcgcgtttccggcgccccttcttcacgctgagccagagggggcggggggcacgtaccacatgcttggctttccaatcccgacgggggcccccaggcccatctacactgtcaagcctcctctccggctcggagcccccggcctgtcgcctgctctacccgggacagcgcgctaggcggcctcaggctcggtagcccagctgcagcgtcgggaagttaaaaataacctccgtgggagcgcgggggaggaagaaagagggaagctggtgggcggcgggcgagacgccccggcctggagaggcgccccgggtggcgtgcgggcctcgaatttcgggtgggctagggcagagcgcgcaaaaggggcgctgcatcccggcgccgacagcacccgcgggggcgaggtcgtggcgtcgaggtgaaaccaagggtcccccgggagagcggagccgcgcgcgcccggcgctcgctccgacacgagttcgcgcggagcccgcgcctccgtctgcgctgcgcggtcgctttcgcgcgccccagacactgcgctcgcggccgggcccgggactccgcgcctcgcggcctgccgcctcagctcacccggccaggtcgcggcgccgccttctagccagacgcctaggacgagcggcgggggcgcgcttgccgcttcctaggacccgggcgggaaccagctcgtggcccggccgtgggcgcgggccgtgccggaggcggcgcgctgaggccggaggcgggcagaggccgaggccgcgccgggctcaggttccacccccgggagcgcggggcggagccaggccggcgccgaggctcagtgccctccccgctccgcggcgccggctgcgaagttgagcgaaaagtttgaggccggagggagcgaggccggggagtccgctccagcggggcgctccagtccctcagacgtgggctgagcttgggacgagctgcgttccgccccaggccactgtagggaacggcggtggcgcctccccagcaaaccggaccgactgggt

SEQ ID NO: 19074 - DNA, 2300 bp, Homo sapien
gctgagtcaccttcccggaacgcgctcgggacgctctggacccagcggggactgcccgggggccgcgcaaggcgaaggcgcacccgccgatacgcgcgcggagctgcggccccagggaccccgcgtcccagccagtgccccccgacccgcccggggactctcgggtcccgcccgtctgaccccccaagtgttgggaaacggggccgagctgcctgggtcctccggaagagaagacaccgcggaggcgtgccggagttcagggcgccgcccggctaattggctgcgtgctcctcctggacctgcctcttctcgactttaagaagcgatgagagaggtgtgtgggggcgggtggggccggcgggggcgcgcgagccccgcagcctcccgcaggggcttggtttctcctaactctggccctacctgggcaggtcaccaatgggccttggcaacttcttcctccgtctccgccgtaaccccccagggatctaactcgaggtgctcgcggacacgttctgtggcttgccgcgataagtgtatcacaaacacactgacaaacgcgtccctactggcctccaaagaagtgacaacttctgagcgcgtttccggcgccccttcttcacgctgagccagagggggcggggggcacgtaccacatgcttggctttccaatcccgacgggggcccccaggcccatctacactgtcaagcctcctctccggctcggagcccccggcctgtcgcctgctctacccgggacagcgcgctaggcggcctcaggctcggtagcccagctgcagcgtcgggaagttaaaaataacctccgtgggagcgcgggggaggaagaaagagggaagctggtgggcggcgggcgagacgccccggcctggagaggcgccccgggtggcgtgcgggcctcgaatttcgggtgggctagggcagagcgcgcaaaaggggcgctgcatcccggcgccgacagcacccgcgggggcgaggtcgtggcgtcgaggtgaaaccaagggtcccccgggagagcggagccgcgcgcgcccggcgctcgctccgacacgagttcgcgcggagcccgcgcctccgtctgcgctgcgcggtcgctttcgcgcgccccagacactgcgctcgcggccgggcccgggactccgcgcctcgcggcctgccgcctcagctcacccggccaggtcgcggcgccgccttctagccagacgcctaggacgagcggcgggggcgcgcttgccgcttcctaggacccgggcgggaaccagctcgtggcccggccgtgggcgcgggccgtgccggaggcggcgcgctgaggccggaggcgggcagaggccgaggccgcgccgggctcaggttccacccccgggagcgcggggcggagccaggccggcgccgaggctcagtgccctccccgctccgcggcgccggctgcgaagttgagcgaaaagtttgaggccggagggagcgaggccggggagtccgctccagcggggcgctccagtccctcagacgtgggctgagcttgggacgagctgcgttccgccccaggccactgtagggaacggcggtggcgcctccccagcaaaccggaccgactgggtagggccgcccaccctgccttcgcgccgctcgtggctcctgtgcggcccgccctcgcggggccccgggaactgggccacttgtcgcttgggcgagagcaggcggcagctggtggcccggttcgggcttggctttggcgcgacccgggagcggctcccacgagcgccgcgcgcgtcgcaacggagcggggccctgagaagcgcgcgccgcggctcccaccgctctggagctccgggcaggggacacggcaacctggatggctggggcagggatcctctcccagaacttcgtgcccagcaatgtccgctcaagttctgggatttttacgcagctggactcccctccccctggcagccccgaggggtgaggagctagtccgtcggagggagccacggggctctgactcatccgtcgggccggaaccgaaccccaagccccagggagaaagccccggagcaggcgcccttctcagggattgtaggcttagtcacacggcgggggcgccctcggaggcaccggacctcagctctctggacttcccgggaacctggctccccgcgcgtggtcccgggatttagtcgggcgctccccacctctggcagctgcggccccggactccgccagcgctgtcttctctccctcaggtccagccgccgcagggaatgacgccggtgctcctgcagccacgg

SEQ ID NO: 19075 - DNA, 2300 bp, Homo sapien
gcgctcgcggccgggcccgggactccgcgcctcgcggcctgccgcctcagctcacccggccaggtcgcggcgccgccttctagccagacgcctaggacgagcggcgggggcgcgcttgccgcttcctaggacccgggcgggaaccagctcgtggcccggccgtgggcgcgggccgtgccggaggcggcgcgctgaggccggaggcgggcagaggccgaggccgcgccgggctcaggttccacccccgggagcgcggggcggagccaggccggcgccgaggctcagtgccctccccgctccgcggcgccggctgcgaagttgagcgaaaagtttgaggccggagggagcgaggccggggagtccgctccagcggggcgctccagtccctcagacgtgggctgagcttgggacgagctgcgttccgccccaggccactgtagggaacggcggtggcgcctccccagcaaaccggaccgactgggtagggccgcccaccctgccttcgcgccgctcgtggctcctgtgcggcccgccctcgcggggccccgggaactgggccacttgtcgcttgggcgagagcaggcggcagctggtggcccggttcgggcttggctttggcgcgacccgggagcggctcccacgagcgccgcgcgcgtcgcaacggagcggggccctgagaagcgcgcgccgcggctcccaccgctctggagctccgggcaggggacacggcaacctggatggctggggcagggatcctctcccagaacttcgtgcccagcaatgtccgctcaagttctgggatttttacgcagctggactcccctccccctggcagccccgaggggtgaggagctagtccgtcggagggagccacggggctctgactcatccgtcgggccggaaccgaaccccaagccccagggagaaagccccggagcaggcgcccttctcagggattgtaggcttagtcacacggcgggggcgccctcggaggcaccggacctcagctctctggacttcccgggaacctggctccccgcgcgtggtcccgggatttagtcgggcgctccccacctctggcagctgcggccccggactccgccagcgctgtcttctctccctcaggtccagccgccgcagggaatgacgccggtgctcctgcagccacggctccgggcggggaaggcgagccccacagccggccctgcgacgcccgcctgggcagcaccgataaggagctgaaggcaggagccgccgccacgggcagcgcccccacagcgccagggaccccctggcagcgggagccgcgggtcgaggttatggatccaggtttgtggggttcctgctgggaagggctgtagggggattcctgttcctcgccaggaatgatggaacgcccagctggacgaaaggggctgtggacgatcgggagaaacattatccctcacgaggccagaagccggccgaatctgagccaaggaagggggtggcaggggcgccgcgtccccaccccaggtctcccagcaaaggccgctcctctggccagggtcaattaccggggtgtttcgggcaccaagttcccacactagtgccccattgttacccgtggccccctagtggtcggttgcggacgtggcctctttggttttgttttctcagcgggcggcccccggggcgtgctcccgcggccctgccgcgtgctggtgctgctgaacccgcgcggcggcaagggcaaggccttgcagctcttccggagtcacgtgcagccccttttggctgaggctgaaatctccttcacgctgatgctcactggtgagtacctctcggagggggtttcgggagcatcccctggcaggggacccccccagtcctgatagctgccggtctccctgcagagcggcggaaccacgcgcgggagctggtgcggtcggaggagctgggccgctgggacgctctggtggtcatgtctggagacgggctgatgcacgaggtgaggaccgcactgcgcggctaggcctggggcttggcgcggtgcgtcccaggctgaggccacgtgtgcttcaacaggtggtgaacgggctcatggagcggcctgactgggagaccgccatccagaagcccctgtgtagcctcccagcaggctctggcaacgcgctggcagcttccttgaaccattatgctgggtgagagcccagggccagagtaggcctgtttcccgtcagtgctcctctaccgcgggggttttcttgtctaagctcccataggctgagatcatttccatttccccttctcccttagtc

SEQ ID NO: 19076 - DNA, 2300 bp, Homo sapien
agagcagggatcctgagagcagccaagcgatcctgagagcagccaagcgggatgctgttgagatgggcccggagtagccacaaccctggaacagggctaggcagagtcctaaggcccagtgctgcttgagattcttaataacgcttttggttttttcttgggttgtaggaaaattccttttgaaaattctagcctgtctcagctctgctgagggaagatggaaacagtattttttgttttgttctgttttccccacatctcactcaggagaagaaaagtagtgcattccctggaggctcccagggtggcaccgataagagcatgtgcagaggttccctcgccccagctagcgctctgccttccctgcttctcagctcatcactgacctcgcccattgccctgtcagttgagatcccacacacacgcgtgtgtgcacagatgcacgcaaatagatgcacagattccagatgtctgtggagcggtggtctcccaacctcccccatggagttcaaaccctcactgtcagcttctggttgtgagaccatccccccttccccaggcctcaccagcctggaactgcctttcagcttgaaactgcttgtactacttgccttgttggggataagggttggagcaggtgtttagaggaattgttttgttttgtttttaaaagacagggttggccgggcgtggtggctcacgcctgtaatcccagcactttgggaggccaaggtgggcggatcacaaggtcaggagttcgagaccagcctgaccaacatggtgaaaccccgtctctattaaaatacaaaaaattagccgggcgtgaggagactgaagcagagaatcgcttgaacctgggaggcagaggttgcagtgagccaagatcacaccactgcactccagcctggggacagagctatactccatctcaaaaaaacacataagccaaaaaataaaagacagggtctcactctgtcgcccaggctggagtgcagtggtgtgatcatagctcactgcagcctcagcctcctggagtcaagtgatcctcccatctaagctttttgagtagctgggactgtaggtatgcaccaccatgcccagctaattttttattttttgtagagatagggtcccactatgttgcccaggttggttttgacctcctggcctcaagcagtcctcccaccttggcctcccaaaagtgctgggattacaggtgtgagccatcacgtctggctgaggaatacaatctttttttttttttgagatagcgtcgcactgtcacccaggctagagttcaatggcacaatctcggctcactgcaacctccgcctccgggttgaagcaattctcccacctcagcctcccgagtagctgggactgcaggcatgcatcaccacgcctggctaatttttgtatttttagtagagacggggtttcaccacgttggccagactgctcttgaactcctgaccttaagtgatccacccgtctcggcctcccaaagtgctgggattacaggcacgaaccaccgcgcccagctggaatacagtcttaaagtaatgatttatgaggaaaaacacctgataagataaaaactcacttcgagtatttctcttagccagggttcaatgattccaggcaagggccaggcacagtgacggctcagggctgtaaacccagcactttgggaggccgaggcaggcggatcacttgagcccaggagttcgagaccaacctaggcaacatagtgaaaccctgtctgtacacaaaataaaaaaatcatctgggcacggtggcccacactgtagtcccggctacttgggaggctgcagtgagccattattgcactagtgtactccagcctgggggacacagcaagaccctgtctcaaaaaaaaaagattccaggctgttctgcagagagagatttgtccttagcttctccactgctggtggcatctggagtcccaggtgctgctcttcctgcgtgatctgcacagtgtcctgggaaagagcaggtgcagatgcagatgccacatgtaggacacccccttccacccctgccaaccttggcctccctccctccctccctacctaggacctcttctcagctctcatcaagggccccactcgaaccccctacgaggatggcctctacttgtttgacatccagctccccaacatctacccagccgtgcccccccacttctgctacctctcccaatgcagtggccgcctgaaccccaacctgtatgacaatgggaaggtgtgtgtcagcctcctgggcacctggattgg

SEQ ID NO: 19077 - DNA, 2300 bp, Homo sapien
cttagctagtcacttccctttctctggttccctagtccagagctgtccagaccctgctgtctacggtgtggtacagtctggggaccacatcggccgtacctgcatggtgaagtggttcaagctgaggccgagtggggacgacgtggaggtgtgtgcagcccctactgcttgcttcaggtgggctctggggttgggtgtaggacccctagctcatgacaacctgtcctgtgccacagctgattggagaagaggaagatgtgagtgtttacgacattgctgaccaccctgactttaggttccgtacaactgacatcgtcatccgcatcggcaatactgaggatggggctcctcacaaggaggatgaggtacgccttcaaattcaagttctggatggctgctcactgccctgtgcaccagctgcagtccctgatgctgccaccaggtggctctaggagacaagacctgaaagtcctctgggctcagtgtcctcagaagggcagctgccccagagtcaagctgccgctcagcactagcagctgcagaaggacttgtttccctgcctcccttctggggtcaggcttcttgagctgccgctggttacatttaccagaggagctaagttccttgtcacaagccaggtgggcatgatgtcagtcactgcagagcacaggaggggctggggagctggagcttgagctgggccccctgactttgtcccctttgcccagcagccatcggtgggccaggtggcccgtgtggacgtcagcagcaaggtggaggtggtgtgggctgacaactcaaagaccatcatcctgccccaggtgaggctctggcaagacccccctgctgagcttgtgactatggcaacttgggccgggggccacaggcgtgtagccagaagatgggctctcaggtcttcctggtgagatctcagcgaaagcgtgaggggaaaggcaggcattccacacagcccttggtgcaggcctgcagttggcccaccagcctcgcttctcccagcaatctcttcacgtccatctctgggtgcatgtagactttcacaaacctccaggattttcctggattgtcagctcactatgctacgaagaatgcaagttccctcctaaaaggagatggagactttcctaccaccctttttagaaagctctaacagagaaggagagaaaggagagagccgacccagttctagccccacctgctgggtcctgagcagaagggctacacgggctctccttccctcgcctcctggttggagccacacagcccagctctcctctcctggtccacacagggggcaggagtgggggcgggaatggcttgccccatcaccttaacggccattccagggaacgcagcaggatatgtcggcccttctacatgtcccctcttgtcatatgttcccagctccccacacaggcctccttggctgcatcattagctgaccctgcgcttttcaggtgtgggactgggcctgccaaggtcccctaacgccttggacagatgctgacgaagtgcacagagcaggaggagaggctggaacagaccactggctggggctttgggtccagctggagggtgggacaggtgaagggcctctcccagagacctagggactgcaaaagccagagcagaggtcagggaaagggtggaatgaggttgccaaggcctcatgagcccagtcgccatcagctgtgcggatcagggatccccagagctcctccttagtggtggggaggtgacttcctgtctgcttaccctggcacttcccttctgcccccagcacttgtacaacatagagtctgagattgaggagtcagactacgattcggtagaaggcagcaccagcggggcatcctcggatgaatgggaagatgatagtgacagctgggagacggacaatgggctggtggaggacgagcaccccaagatagaggagccccccatcccacccctggagcagccggtggcccctgaggacaagggagtggtgatcagtgaagaggcagccacagctgccgtccagggggctgtggccatggctgcccccatggccgggctgatggagaaggctggcaaggacgggccacccaagagcttccgggagttgaaagaggccatcaagatcctggagagcctcaagaacatgactgtggagcagctgctgacgggctcgcccacctctccgactgtggagcctgagaagccaactcgggagaagaagtttctggatgacatcaagaagctacaggaaaacctcaagaagaccctggacaatgtggcca

SEQ ID NO: 19078 - DNA, 2300 bp, Homo sapien
ttttagtggagatgaggtttcaccatgttggccaggctggtctcgaactcttgacctcgggtgatctgcccacagcctcccaaagtgctgggattacaggcgtgagccaccgcgcccggcagtattagaacttttatttgcatttttggtagcttttttttctcatcctttaaggttccactttgtctctctcagtacaggatgatgtgttagttacaatagtacatggacacacacagcaaacaagtagatatacagggggtgcgtgagcaaacaggtttcaggaccactgctctctggagtcttattcctcagagtatgagcccttgaccaaggagcatggaatgcatcacctatgtttgaacaagggcgccagatgacctctgcggacccagggtttgggaagtgctgatgtggagccacaggacttgttttagggcgtgtggggcgtgtgtgtgagtgggcttctgcaggtgggcagccagcgggcacaggcgtggagagcatggtcacccatggagacaccgctcacggggactttcctttggccccacatcccgcagggtctcttcttcgatgattcctatggcttctacccaggccaggtgctcattggccctgccaagatcttctccagcgtccagtggctgtcaggtgtcaagcccgtgctcagcaccaagagcaagttccgagtggtggtggaagaggtgggtccgggcccaagggtaggagatggagtccttgacctccacaccctggagctgagctgctgcccctttccttcctgctcttgagggttgagccccgctcctcagcatctggaccctgttgatctcaaagggctttggggataaagggaacccaggctctggtcatagtgaccaaaagacagatgtgccccagcccagcctgtacaggctgagcaaggtgggagggtggcaagtggcagttccagtggcccctggctggtatgagcagtgacactggtcctgggcattgggtgggggccgtggttacagttggggcctgctctgatgtgtctgtacttggtgctgcactaggaagatcagtttcctgctctggaggtcaagtgggctttgggcagctggctaaagagagtgctgtcagagcctgccctgactggcgtgtcccacctgccatccccaggtgcaggttgtagagttgaaagttacatggattaccaagagtttctgtccagggggcacggacagcgtcagccccccaccctctgtcatcacccaggaaaacctaggcaggtaagcatgcccttactgccagcaacccaggggcacgcgtgggacagggctctgggccctggtcacatgcctggggaggcttaagaacactgctggcctcccaggagtccagcccagctcacccccacttcttccccaaccagggtgaagcgtctcggatgctttgaccatgctcagcggcagcttggggagcgctgtctgtatgtcttcccagccaaggtagagccagccaagattgcctgggaatgtccagaaaaaaactgcgcccagggggagggctctatggccaagaaggtatgtccttggggttggggattggtgggcatttgaggaactggccttgagccatttccatggccaagaaggacagtctgtgctttaggccttggggggcagccctgatgacccttgccggctactcaggtgtatacagctgtcatccccccagcctgagatgcctagggccaggcctgcccaggtgcacctcacagccctgtcctctctgctccgcccttgcaggtgaagcgcctgttgaagaagcaggttgtgcggatcatgtcatgctccccagacacccagtgttcccgggaccattccatggaagacccagacaagaagggggaatccaaaaccaagagcgaagcggagtctgccagccctgaggagacgcccgatggctctgccagtccagtggagatgcaggacgagggtgcagaggagccccacgaggcaggagagcagctgcccccattcctgctaaaagaaggcagagatgacaggctgcactcggcagagcaggacgcagatgatgaggctgctgatgacacggacgacaccagttcggtgacctcctctgccagctccaccacttcctcccagagcggcagcggcacgagtcgcaaaaagagcatccccttgtccatcaagaacttaaagcgcaaacacaagaggaagaagaataaaatcactcgagacttcaagccaggggacaggtaaactcagagttgtgcccctccccaatgg

SEQ ID NO: 19079 - DNA, 2300 bp, Homo sapien
tccttcctgctccctttctgttagtaaacacctgggcaccttctccaacaatgagggacttggctctcgatatccttgatgtgttaacgtatttactcagagcactgtccatgtagccaccccccagtggtgtggctgcctcctctgcctgccacctccacagcctactttgccaggtgtcctgtgtccatggatgtcccatgtccatggatgccatcaggcctctctgcccctgcatcacccaccccgttccctccaggcagccccaccaccaccaccacttcctcctcactgggaagagcagctgggatgcagcctagaacttgtagggagggcctgctgcagcagctgtttagggctagtagccaaccggtccagtcagtgagctgtctagatcctcccccatcctgtcttcggtggggcatagaggaatctgtgccctggacatgaacgttgtctgctgtgtctcactgcccctgcctccttggtctgcagcccttcatgtatggggactacattgcctatgactgctggctggggaaggtctacgacttgaagaaccagatcatcctgaagctatccaacggcgccaggtagagtctcaccaccagagagccatcggcttgggaaggatagcctcttggaaagaggggaggaggagggtgtttcctcctggggacagtgatgacaggtttgatcaagggcagtgacagatgttgcaggcatccagggcctaaccctgtaccgttctccttatctgccgtggcctatttctgttgctcagtttctgatctgtcctggcatggggagaaacgttttcactgaggatatctgctagaggctgatgctttacttgaggcactgtgatggtgctgagcaagcactccagtggcacttggggtcttgttcgttgtgggagagtttcttgtactacctcgggctgagttgatggtagaagacgaattgtgctatttagggcatgtgggcgcattggcatctcagaatcgcaactttttggtactcactgtgtcccctggtggagaccaaacctctgttctctgttttaggtgctccatgaacacggaagatggcgccaagctctacgacgtctgcccgcacgtcagcgactcggtagtgtgctccatccaggccagcacccttctctgattgctcagtcctctggaaggaggacttcgtagcaaagacctggacccagctaaacagagcggtttcctagaaaaggggcgggtgcgcgccagagggtctaaaagtttgggtataggcagaaagtattagaacttttttttttttttttttttttgagacagagtctcactgtcgcccaggctggagtgcaacggtgcgatctcggctcactgcaacctccacctcccgggttcaagtgattctttggcctcagcctcccgagtagctgggattacaggcgtgtgccaccacacccgtctaatttttgtatttttagtggagatgaggtttcaccatgttggccaggctggtctcgaactcttgacctcgggtgatctgcccacagcctcccaaagtgctgggattacaggcgtgagccaccgcgcccggcagtattagaacttttatttgcatttttggtagcttttttttctcatcctttaaggttccactttgtctctctcagtacaggatgatgtgttagttacaatagtacatggacacacacagcaaacaagtagatatacagggggtgcgtgagcaaacaggtttcaggaccactgctctctggagtcttattcctcagagtatgagcccttgaccaaggagcatggaatgcatcacctatgtttgaacaagggcgccagatgacctctgcggacccagggtttgggaagtgctgatgtggagccacaggacttgttttagggcgtgtggggcgtgtgtgtgagtgggcttctgcaggtgggcagccagcgggcacaggcgtggagagcatggtcacccatggagacaccgctcacggggactttcctttggccccacatcccgcagggtctcttcttcgatgattcctatggcttctacccaggccaggtgctcattggccctgccaagatcttctccagcgtccagtggctgtcaggtgtcaagcccgtgctcagcaccaagagcaagttccgagtggtggtggaagaggtgggtccgggcccaagggtaggagatggagtccttgacctccacaccctggagctgagctgctgcccctttccttcctgctcttgagggttgagccccgctcctcagcatctgga

SEQ ID NO: 19080 - DNA, 2300 bp, Homo sapien
cagcaataaccctcttttactgacacaatactgggtaatttttaacaagcattctgttgcacaaaagtaatattttccaaatactcttgtaaatggactgataattttccttccaagtctcagagctgttgcctgattcacatttctctgaggggaagcagggtcctgtgtgtggatttgtgtctgtggatgtatgtgcatccccaacaaaaagaccccgctggtatcagcagtcacttctgcctctaggaaatggatcatgtgctcttctctggagtggggcctttttccttctcaagccgttgtcacagaccccgctttgtagtttgacatgaaaccccgttcctctgtagtctttgtctcccactgtgtgagaaacccagatcaacttccaaagtgccctcccctgaaatcagacctctcaacctcccaaggacctaaaacagcgtaggcctgattcctgcttagaaatgttttcttgaaggggaggggaagtaggagagaaagaaggggtgtgagatacaggggggtgtgtgtgtgtgtgtgtgtgtgtcaattactgataggaattcacattctggaaaacaagccaccaaaccaacccgggttcaaggtttcgggtttatgatgacaagcctctttgttttgtaaaactgctatactcactagcatcaccccaaaaaccatacgggagtcagatgtctgcttaacagcttcaggtcaagaaaaaaccttcgggtttccaaattggtgactcccctctacccagggttctggattatttttttcaaggagtccatatgcacttaggagtcatcaatcccggtcgcagctgtcagaatcctcccccccaagtactattcataccggggctctgattgctaatgattttactcacaaagttccctgcagcaattaaaaggaggcagcagggtaaaacaaaaagaggctgggtggcttcaccataatgcagcctgtaagctagtgaacttcttgggttcggctgggattttcacctctatctttgttttggaatgcccacaacccctccctgcacggacccggcacggccttcatttctggatgcacaatgcagtaccgagctccttgggggtcagcaaaacgccgcactggtgtaacgccgaacgcgccccagaacctgagtccccacgggagtcggtccacgtctctaaatctcgaggccgacaccacagcataacatgtcttagaagtcccctcaagtcgggaagcccagggcccgcccggtcccgggccagcagtgcctggctggcgtgtgcgcccagagctgctgcaatgactttgcatggagtgtaccctccactggggctgtcctcccgcgtcggccactgcagtggcaccgctccgggcagggccctgcacgccgtccttccctggcctcggcccggccgccgaccccctgccgcccgcgccgcccagcccccgcccgccgcaccttggtctccttcacatgctgcttgacgccctccgggtaccactggacgcgcacgtagccgcggcgcagggggctggcccggccctcctcgtggcccgcgcccccggcctcggagcaccccgagctcccgcggccctcctcctcgccctccgagtccgagtcctcgccgtggatgaggcgcaccagcccgaagtgcacggagccacggtaacggcccgacaccaggtcgtgagaaaacagcaggcgctgcgagccggcttctgggccggagtccgaggacggcccggaggccgagtccgaggcgggcgccggcgccgggacgggggctgcggctggggccgggactgcctccggggctggagccggggcctgggctggagcgggagctgcgggcgtgggggctgcgggatccgccataactgctctgcgcgagtctcgggcggcggcggcgacagcggcggcgaacgaggcgcggggaggcgggaccagcgggcgccgggggcggggccatagcgcgctgacgtgtccctgcgtggcgccgtcgtcagggagccgggatgcagttgctaggagccaccgcctcgtcgctaggggacgctgaagatgccgcggggggcgggggcaggatggaatccactaagaaggggcgagaccagtgaggattcaactaaagggagcgagaaggggcggggacccgggaggaggaagtggagtggccaccgaggaagaggggagtggtcggggtggggcacaggatggtggagagactgtcaacaacttttaatgagctcccttggcgtcctagcctagcccccaggcactggga

SEQ ID NO: 19081 - DNA, 2300 bp, Homo sapien
gctaattttggatttttagtagacatggggttttgccatgttggccaggctagttttgaactcctgacctcaactgatccacccaccttggcatcccaaagtgttgggatttcaggcgcagtcaaagtgttgggatttcaggcgtgagccactgtgcccggcctagagttacttttttttgagacggaatctcactctgtcgcccaggctggagtgcagcggcgcgatctaggctcactacaacctccactccccaggttcaagtgattctcctgcctcagccttccgagtagctgggattacaggcggctgccaccgcgcccggctaatttttgtatttttagtagagacagggtttcaccatcttggccaggctggtcttgaactcctgacctcgggtctcccacccgcctcggtctcccaaagtgctgggattacaggcaagagccaccacatccagccttttttttgttttttgttttttgagacagagtcctgctctgttgccaaggctggagtgtagtggcatgatctcggctcactgcaacttctgcctcccagattcaagcaattctcctgcctcagcctcccaagtagctgggactacaggtgcacaccaccacgcccagctaatttttgtacttttagtagagaagggatttcgccatgttggccagggcggtcttgaactcctgacctcaggtgatcaggtgatccatctgcttctgcctcccaaagtgctgggattacaggcatgagccaccacgcctggccctagagttactttttatattttatttatttttatttatttatttttttgagacagagtcttgctctgttgcccagggtggagtgcagtggcgcgatctgggctcactgcaacctcagcctcccaggttcaagcgatttgcctgcctcagcctcctgagtagctgggactacagccatgtgccaccacgcccagctattttttttttttttccgtatttttagtagagatggggtttcgccatgttggccaggatggtctcaatctcttgacctcgtgatccgcccacctcagcctcccaaagtactgggatgacaggtgtgagctgccgcgcccggcctactttttatattttaaaatgacaatatggagcagaccataacagttctgccagtctggaatttagtctaggcagggagtttggaaatagtacaacaatggttaagcttatcgaaggagctaaatgccaggcactgttctacttcacttaatcctccaattgcccaatgagatgagtattgctattatcatccctatttcacagatgagcaaattaagatgaaaataagttaatcagtgtgcctatttttatagattagtaagtggcagtgccaaaaattggaatccgtggtccccactcttagctaccttactatactacctcttgccattcattcttggcttcagggagctttgaatttatctgcatggatttgtagccaaaccactgggaccactgatccttttgttacctttctctgggcctccttcaccagcttctgggtcaacttctgaggggtcatgacgttcgaactgcttggaattcctgaatacagtgcattatacatatgctctacacgtatctattatagccttacaagttggagttgtttgttatctatttaatgtgtatttgttttgtctccccaactagactggaaacacctagaggacagggacagtatctttctctttctgcaatgctcccagtgcctgggggctaggctaggacgccaagggagctcattaaaagttgttgacagtctctccaccatcctgtgccccaccccgaccactcccctcttcctcggtggccactccacttcctcctcccgggtccccgccccttctcgctccctttagttgaatcctcactggtctcgccccttcttagtggattccatcctgcccccgccccccgcggcatcttcagcgtcccctagcgacgaggcggtggctcctagcaactgcatcccggctccctgacgacggcgccacgcagggacacgtcagcgcgctatggccccgcccccggcgcccgctggtcccgcctccccgcgcctcgttcgccgccgctgtcgccgccgccgcccgagactcgcgcagagcagttatggcggatcccgcagcccccacgcccgcagctcccgctccagcccaggccccggctccagccccggaggcagtcccggccccagccgcagcccccgtcccggcgccggcgcccgcctcggactcggcctccggg

SEQ ID NO: 19082 - DNA, 2300 bp, Homo sapien
ggggctacaggtgtgtgccaccatgcttggctgatttttaaattttttgtagagacaggggtcttgctatgttgcccaggctggtctcaaactcctgggctcaagtgatcctcctgccttggcctcccaaagtgctgggattacaggtgtgagccactatgcccagccccagggatctccttctctctgtacccatcaccctgttgggcccctcaccctccttattttccttctcattggtggtggtatgtggttttcttcctgttgaccaggacaaaggtcccagcgatcaccctgccctcccctgtctcctctcctgtcccacaagggtttgaacttcccagtttcaccatgtttaacataccgcctcatctttaaaaaaaatttatttttatttgtatttttttgagacagggtctcgctctgtcgcccaggctggagtgcagtggcgagtcactacagcctcgacctctccggctcaagccatcctcccgtctctgtctcccaaagtgctgggattacagcggtgagccactgtgcctggcttactgcctcatcttgttccctgaggttctagacctctagggtgttgtccggaaagaacagggccatgtggaagtcagcaaagagagaggccgattgaacagcaggctcttctcaggcatcgccaagtgactgattaggattggccaccagggggtgccatggagccacagtctatgaagggacagaagaggccttttgggggaccctggaggttgaaggtggggatgcccagctgaggtcttggacatgaccaccccaccaaccaagcccaaggaggtctctggtcggtcctgagaggtctgttgagggtcccttctagcaggcaggtgggcctcagagtgcagaggggccctgggagaaggggacccagagacaggaggaatgcatgtggtgggtgggcgggggcatcgggacggggtcactccacggtcaggggctgtgtcccaaaccgtatgggtaggaacaggagcttcctctgcgggggggtcgaaagagtgcacctgtgaggacactgaaaaccagcaggagaatcatgaagacaggaaacaggagtctcattgtgagatgagtgggtcccaccagtgcagccgtggcagtgcatgtcaggaggctgacccggctttgcccctcccccttcacttgttggatggctctgagcaggttactgaacctgtctgtgcctcggtttccttctctataacgtggttaatactcatttggccgggcttccgtgtggattaaaggagacgcgtatccagggcccggcacatagcaagtgctgtaagcagtggcactcacaggctgccaggacaggaaggaccctcagaggtccgtcccaagctgtgtgggtaggagcagaagcttcctctgcagggggtcaaaagagtgcacctgtgaaatccaacctccaggacccccaggagcccgagatggacacaggatctgcactgctgggtggggcggagaggcaggtgctggcgagagaagagctaaggggtgcaggatggggtgtgagctggagggcagggggtagtcagagccaacagggagaggggcctgcatcccgagggaatgccagcaccaagtgccaaggcctgggcagccctgggaatgggtggagccaaggtcaatagcagagagctttgtagttgagatgtttggtagggcaacctcctgaatatttaaatatttaattaaattaaatatttaaataaacttgaagtagaacgtacttaaagtgcacaaattggtagcttgaattcccaccccctccccccacataagaggtgggcttgtccaagactccgagggacagagggagaatcgctggtgcccagccagtcggtgacagagcagggattagagatggacccctgaggcttagccccacgctctcttccccaaaccctggggcctcagtcagcctctggtaatcccttctgtgcccagggcaccagagctgacgtttcccttcagcaaggcaggggccgaggctgccagagccctgctggcgtcatcctgcctgggatagctcgagaggtggggtggggggattacaaacctctaacagcaccacaggctgcccggggaacatctgctactacagccttgcagcccggagtcccggattttactggttcccgtgcctgcggacaggcccccagggctagcggctttgtggagggaacactgggtatcctctccacagtccaggtaggtgggacccccactcctggctctcagcctttaggaac

SEQ ID NO: 19083 - DNA, 2300 bp, Homo sapien
catgggtgagcaggggacagtgtctccctggcatcagcagcccgcctaggcagtgtccgcttcctttgggaggacgagaacagatcagtgtttctgacagtctggtctagtgccccataaagagctcattgaaaaccggcttgtggcagcgtgggcttcctgcacagtctggagtataaagggaagcgatgttaacgccccccgttcacccgagagctctgcagaagacacagcagcaggcaggagcgtcatggtgcagaggggagggactggatgaggagttaggaaaacacacgctggccttgacggagaaaagttagacaatggcgattttaaattcagaatgaggctgggcgaggtcgcctcatgcctgtaatctcatcactttgggaggctgaggcagccagatcacttgagcccaggagttcgagaccagactagacaacatagcaagactctgtctctgcaaaaaaaattaaaaaagagctgggtgtggtggcacatgcctgtaatcccagctacttaggacactgaggtagaaggcttgcttgagcctgggaggtcgaggctccagtgagctatgatggtgccactgccctccaacctgggcaacagagcaagactctgtcccaaaaaatatatatataggccgggcatggtagctcatgcctgtaatcccagcactttgggaggccgaggcggccagatcacttgaggtcaggcaggagttcgagaccagcctggccaacatggtgaaaccccgtctctactaaaaatacaaaaattagccgggtgtggtggcacatgcctatagtcccagctactcaggaggctgaggcagaagaatcgcttgaacctgggaggcggaggtgtcagtgagtcgagaccacaccactgcactccagcctggacaatacagtgagattccatctccaaaaaaaaaaaaaaaaaaaaaaaaaaaatatatatatatatatatatacatatacaaacacacacacacacacacacacacacacacacacattatatatatatatttccaaatgaaagcaaattggggcataaatcagggttgaagtttgttctcagggttttcagaataggaggctaaagaaaagccagcccaggacctgggctgcacacaccaccgcctgccctccctccttcctccccaagaggaagaacccagcctacttgaagagcgtcagcctccaggagccacgcagccgatggcaggagagttcagagaagcgccctggcttccgccgccaggcctcactgtcccagagcatccgcaagtgagcccccctacacccaagcccagcaccccccacccagcaacctgtggattctcggggcctggacatgattgggcctggtccctgcgtcccctctctggaaggaggaggccggcattaatgagcaatgtctccctgtggcctattatcatggtatagatggggaaatgggtatgtgctttgcggaatatcacggtgtggaggctggggggcttcgaggagctgggtggatcagtgtgggggtgcctggggccctagcctggctcctcacgctcccgtcatcccctgcttctgctcatctggtcactgggctccagccaggggcctcacaggcagatccgccccccacctccctgtaggcacgcgggcacacacgtgccatcaccccttccacacactcaggtgcacaggcgtagacaagcgtatgcccacctgtcccttgtctgcttccgcaggggcgcagcccagtggtttggagtcagcggcgactgggaggggcagcggcagcagtggcagcgccgcagcctgcaccactgcagcatgcgctacggccgcctgaaggcctcgtgccagcgtgacctggagctccccagccaggaggcaccgtccttccagggcactgagtccccaaagccctgcaagatgcccaaggtgggatccatggggaaaggaggcaggggtggggaccctaatggctctgcttaccgcccccctcccttccagattgtggatccgctggcccggggccgggccttccgccacccggaggagatggacaggccccacgccccgcacccaccgctgacccccggagtcctgtccctcacctccttcaccagtgtccgttctggctactcccacctgccacgccgcaagagaatgtctgtggcccacatgagcttgcaagctgccgctgccctcctcaaggtgcggggctccctcctgcagggcccccacctctgcccggcctcccttccttgcccctcccttccactcctc

SEQ ID NO: 19084 - DNA, 2300 bp, Homo sapien
cttatgaaatctttgcattcatcaaaaaagacaagaggcctagggccgggtgtggtggctgaaacctgtaatcccagcactttgggaggccgaggcaggtggatcacctgaggtcaggagttcgagaccagcctgaccaacatggagaaaccccatctctactaaaaatacaaaattagctgggcgtggtggcgcatgcccgtaatccgagcttcttgggaggctgaggcaggagaatcacttgaacctgggaggtggaggttgcggtgagccgagatcgcgccactgcactccaatctgggtgacagaatgagaccccatcacaaaaaaaaagaaaaaagaaaaaaagtaggtctgtccgtatgtgttgacagggaaagatgtctacaatgcaggtaaaatgatagagtgtgggctgggcttggtggctcacgcccataaccccggctacttgggaggctgaggcaagagaattgcttgaacctgggaggtggagggtgcaatgagattggctcacagcaatctcttcctctcgggttcaagtgattctcctgcctcagcctcccgagtagctggaactacaggaatgaggcactatgcctggctaatttttgtattttagtagagatggtgtttcactgtgttggccaggctagtctcgaactcctgaccttaagtgatccatccaccttggtctcccaaagtgttgggattgtacgtgtaagccaccacacacagctgtgtgattttttttttttttcaatgagcatatgccacttttattgttaaacagtgttctcactatgggggagaaaagtgccagacaggtggcagtttcagttatcttttttttttgagacattttctcactctgtcgcccaggctggagtgcagtggcatgatcttggctcactgcaacctctgcctcctgggttcaagcaattctcgtgcctcagcctcccaagtagctgggattataggcatgcgccaccacacctggctaattttgtatttttagtagagacagggttttaccatgttggccaggctggtctcaaactcctgacctcaggtgatccacctacctcggcctcccaaagtgctgggattacaggcatgagccacgcacccagccagttttagttatctttgaaaaatgaactggggctgggcacagtgagcttgcacctgtaatcccagcacttgggaggccaaggcaggcagatggcttaagcccaggagttccagaccagcctggctaacatggagagacccccacctctacagaaaaaagacaagaaaaataaactgggtggccttgggggacagggaccagcacagtaggtttctcatctctcggcccacctcggcctccccaagtgctggtattacaggtgtgagccaccgtccctggcctgcatcttcatgctcttttcagggtttggttcttgcctcaagcggagagatcagaaattgaatgaggtagtaagttgaggacctcccagacccatatggtccgggatgcaaatgatggtcagaaatagacctcactccaaccactgggcctgaggttcagcctggttcaggctgggtttagtccccagggatggtttgtttttggttttgtgtgtgtgtgtgtgtgtgtgtgtgtgtgtgtgtgtgtgtgtgtgtgtgttttcagacagagtcttgctctgtcgccaggctggagtgcagtggcgcgatctcggcttactataaccgctgcctcctgggttcaagccatcctgcctcagcctcccgagtagctgggattacaggcacgtgccaccacgcctagctaattttttgtatttttagtagagacggggtttcaccatgttggccaggatggtctcgatctcctgacctcgtgatccccccacctcggcctcccaaagtgctgggattacaggcgtgagccaccgcgcccagccgcccagagatgtttgaaccaactttaggcaagttggttcttggtctgggctgcgtgccctggcgtcagggtcctgacactgcgccaccccgcaccgcccaccgctgctctcccggtctccattccagccctcccgcctcctgcccacaatggcctctgctgacaagaatggcgggagcgtgtcctctgtgtccagcagccgcctgcagagccggaagccacccaacctctccatcaccatcccgccacccgagaaagagacccaggcccctggcgagcaggacagcatgctgcctgaggtaagggggctggcctgggggctcactgttctgccgtaggtaacaga

SEQ ID NO: 19085 - DNA, 2300 bp, Homo sapien
acgggcgcttgtgctgttttcctgctccggctctgcagagccgtgctgccgggcacttcctgtccaggtttctgtgtggacacagtgcttcagtgtgtgaagccatctgctcattttttgttgttgtttgagacggagtctcactctgtcgcccaggctggaggcctggagtgcagtggcgagatctcggctcactgtaaccacaccccccgtcctgggttcaagtgattctcctgcctcagtctcccgaatagctgggactacagttgcccaccaccacacccagctcttttttttttttttttttttttgagacagagttttgctgttgttgcccaggctggagtgcaatggcgagatttcggctcaccgctaactccaccttccaggttcaagcgattctcctgcctcagcctcccgagtagctgggattacagggatgcaccaccatgcctggctaatgttttttgtatttttagtagagataggctttctccatgttggtcaggctggtctcgaactcccgacctcaggtgatccgcccgcctcggcctcccaaaatgctgggattacaggcatgagccaccgcgcccagcctaatttttgtatttttagtagagatggggtttcaccatgttggccaggctggtcttgaactcctggccttaggtgatccgcccacctcagcctcccaaaatgctgagattacaggcgtgagccactgtgcccggtgacatcatccactcatttgctcctccagacgcttctctggggaggaaccgttactctcccccttgtgcaggtcaggacttgggtgatgagttgtcaggtgactaacccgacagcaaatgcaagaccattggcccagtatgcgctgccggctccattgcttttgatcatgaaccccacccccagcagagcttggccagtttgagacaatgaggggcccaggaaagctgggtcaggggtaagcaagggcacaggaagagacgaagagaggtcctggaagtcccagtgagacgtttggactttgggtgagaacaggaaatcctgggagagagttgagcagggaagcaacaggtgtgatctatgcttttgggaggtgaccccagctgcggtgcggagaatgatcagtctcagggggcttgaggcagcaggtagaggaattgagagagtggagtgagcctccaggtgaggagatggtggaggtgaggtggagatggtggaggtgaggtagagatggaggaggaggacaggttcagatggctgctgtctcgccgacccgtgcatgccacgcctcagcccacacacgcccttggctgaagggctcccagggagatgggtatggagtccctggcttcgtacaaggagaggaaaaacaaaacttgcccaggaaccttgggatgtgaaggagaggaaacagctgggggggtttatttttatttttatttttatttttgagacgaagtttcgctcttgttgcccaggctggagtgcaatggtgcaatctcggctcactgcaacctctgcctcccgggttcaagcaattctcctacctcagcctcccgagtagctgagattacaggcatgcgccaccacacccagctaattttttgtatttttagtagagacggggtttctccatgttggtcatgctggtctcgaactcccgacctcaggtgatctgcccaccttggcctcccaaagtgctgggagtacaggcatgagccaccgcgcccggccacagctgggggttttaacaagaagacggtcatggggcagagcaagagacgaaacgaagagaatgaaacaggcagagggtgttaattctggtggagtcagaggggaactggggactggtggcacacgcacaggaaagccccagatggggtactgggcaacagccactgaaatttgggatgtacttactcttcaacccagccattctgcttccagaacttggtcttgtaatagttaaacaagcacacgcggtgtatgcaagggtgttagttgcaacatcagacccatgtctcaaattccggaaacatcctaaataaccagcagtctggacttaagtaaatcttggtgcattccacttatgaaatctttgcattcatcaaaaaagacaagaggcctagggccgggtgtggtggctgaaacctgtaatcccagcactttgggaggccgaggcaggtggatcacctgaggtcaggagttcgagaccagcctgaccaacatggagaaaccccatctctactaaaaatacaaaattagctgggcgtggtggcgcatgcccgtaa

SEQ ID NO: 19086 - DNA, 2300 bp, Homo sapien
ggctatgtgagcttgggcaagttaccaaacccctctgagcctccattcaccatctacagaatggaagagacgctaatgtcaccctggaaggtgttttgaagggtaatgtgtgtaaagggccaaacaaggccccgcacagttaaggacttaaatcctgcccggccccgggagggcttccggcatcttggggttcccctcaaaggatggcctgggcaggacttcttaaaaacaaacaggcggctgggcgcggtggctcacgcctgtaatcccagcactttgggaggccgaggcaggcggatcacgaggtcaggggatcgagaccatcctggctaacatggtgaaaccccgtctctactaaaagtataaaaaattagccgggtgtggtggcgggcgtctgtagtcccagctcctccggaggctgaggcaggagaatggcgtgaacccgggaggcggtgcttgaagggagctgagatcatgccactgcactccagcctgggctacagagcgagactccatctcaaaaaaaaaaaaaaaacaggaatgcccctgggtttcgtgctttaaaatggttgattttatgttgtgtgacttttaagttcaataaattaccaatcaaagcaacaaaacacttccagatcatttgaactttgccttaagtatcagaaggcagttagtaattcctggactttgaatgttaaatatgtggggttcttttgttttgttttgttttgtttcgagacggagtcttgctctgtcacccaggctggagtgcagtggcgcgatctcggctcactgcaacctccatctcccgggttcaagtaactctcctgcctcagcctcccgagtagctgggattacaggcccaccacacccagctaattattttgttgtttttggttttggttttggttgtgagacagagtctcacactgtcatctgggctggagtacaatggcgcgatcttggctcactgcaacctccgcctcccatgtttaagtgattctcctgcctcagcctcctgagtagctgggattacaggcgcccgccaccacacccggctacttttttgtatttttagtagagatggggtttcactatgttggccagactggtctcgaactcctgacctcgtgatccaccctcctcagcctcccaaagtgctgggattacaggcgtgagccactgcacccagccccggctaatttttgtattcttagtagagacagggtttcaccatgttggccaggctggtctcgaactcttgacctcatgattcccccaccttggcctcccaaagtgctgggattacaggtgtgagcgcctgcaccctgcccaaaaatatgtggttttgtttgttttttgaggcagagtctccctctgtcgcccaggctggagtgtaatggcacaatctcggctcactgcaacctccgcctcccaggttcaagcaattctcctgcctcaacctcccgagtagctgggactaaaggtgtgcaccaccatacccagctaacttttgtatttttagtagagatgggtttttaccatgttggccaggccgatctcgaactcctgacctcaggtgatccacctgcctcagcctcccaaaatgctgggattacaggtgtgagctactgcccctggccgaaagttaaatgtttctgttctgttcaagtaatattgagaaaaataacaggggccatcttgactctaatgttctgctccaatcaggttcccagaccagaggactgttgttaggtgattggctgtgaacaccctgaggccagtgcccctcgctgcttggcactcggagatgcctgattagcacctttaatcccttaccagtgaggcaggtggaattggccccattttacagatggggagactgaggtgaggaaggttaaagcactcagtggtgggcatgccccctggagccggccctcctttcttccagctgtgagtacccaggaagctgcaccgtgtggcctggagctgtctatctgtccttccagccacctgtctgtccagccacccttccacagactgaggcttgacaccggagcatctgtacagagcaaggagaagacaagaacatgctctaaagcccttcacagcaagacccaggaagccgcgggcaaactcagactcgaaggtaggaagctgggcggccgggtggctggacccagggcgctggctgctgtgcccacgtccagatacctcctgcggggcccacgctctctgtctgaacagcggtggacagtgaatgaagaaagtcaattcagggagcgagagggaggaataag

SEQ ID NO: 19087 - DNA, 2300 bp, Homo sapien
ccactttctcccgggtgagcaccgggcggaccggggccgaagtttgttggttgagccagccaaggtggaaacaggtgcgggggtggggatgagggactcacacagcagggctggaccggagctcagaaattggacccaggagtcctgacttctggatggaggggctggggaaggttggccctgggcttgccttttacctgtttggcccctcggatgttcccccagggcattgggatagagacggataagttccctagggtacagaccccgccccactcccacgccagggcgcaaaggaagcctaggttttggccctgccccattccatgaaagattaacggagggggctctagggttggagctactgagagggtggcagcgggtgtgtctgaggagcagaaggcggtggggagctgaccccacttggggagaggctgctgttgcctgggcggctggcatcaggcccccagtgtgtgccatttgctggtaatataatgagaccagcatctgccttattcgaccctcactgtccgtagggcaggcagtggaaagggaggcgtgttttagagctgtggttctcaaccaggggcgactttgcctgccatgggatatttggcaatgttggagtcattttgggtgtcacacacttgggaggggaagtgagtgttgttgttactggcaggtagtgggtagaggccagggacgctaccagacatcttcagggcacggaacagcccacataacgaggaattatccagcccaaggtgttgggctgtgctgaggctgagaaaccctgcgcagcagctggtccatcaggttccttctcaatgatgctccctcactggggaaactacctcagttttccagagtggttaggggaggaacttggaataaacctgaatgagatgaggggtaaggcagtgtgagggcacttattcccctcacaagagtcttcctttggtgccatgagacaccgcctttcccaatctccactggccctgcaggaagctggtctaggtgctgtgggggagaggttgggaacagaggacccccttgcagcccaggcctggggtgcttaaccccagggcaatctcccaggaaggctgggctgaggcagcccttgagctcaaatatccctgggctgggagggtgggcagagggcgagctctcttcccatagattttcccaaagctggattgctgaagctggcatggttgcctgataccatgtgacctgctggaattttcccttctgaactcacacctaactcctccaattatgtacaccttttgaaagtgacatccaaggagtatcagggctcctaattcctggggggtccccaggctgcttttgtcctgcaataaagagggcaccctgggttagctgacgagccctggagtgggcccagctgctgatggggtggaggcacccctgcccatggtgttagctgagcagaggtgagagatgggagacatcaaagcacaggccaggtggccccccagtagggatgactcagagttgtttgtattgggctggaggaatgtacttccagttttctggcaacaaggaggggtggctggcacggtgggagaggatcggatgaagcagccacgtccatgcccaggagctggggccacctcgctgccctccctccctgttttcttgcagtagccattatacccatcctgttcacttctggacccagccttcttgcctgggaaccctggtggaggtttcgagcttgggttctttttgttggtgttggtggcttttgttttttttgttttgttttgtttttgtttttgtttttttggtctcttgactgtaaaaggctgaagtgaaactcccaccttttcatttgcacaaaaaacaaaagtggcctccattgctgtgagcctctcaagggacagggctgagcacccaggcttgtacaaagttgttcaggaagtcggcagtggagctcgggtgtgaacccagttgcccaccctcaggccccacccaagagccccacgaacaaaccctcagtgactcctacctgtctgtacctggtgtaaccacacacacacacagacacacacaaacagacacacagagacacacacaaacacacagacacacacagactcacacacacacacacacacacacacacacacacactctctttctctccagcccaggagggggacttttgttcctataagaggaggaataaatcacactacaaatgctttgggtgacgcacttggggcccgagtcctgctctggggtcagtggtgctgtttttcctgtggcctcag

SEQ ID NO: 19088 - DNA, 2300 bp, Homo sapien
gaggctgcaataagccatgagtatactgtactccagcctgggtgacaccaaaaccttgtctcaaaacaaaaacaaagagtttagacagtgtttctctttaagttatgtaagtaatatatgcacatgatacaaaatgaaaagcaagtgactctctccccctaaacccctgcagggttactccacagatatccttccagaaagtttgtatggatctaccaacatatatatgtctgttctatttaaatttaggtaaataggattatactaaacatgcagcttgcttttttttttttaacttactataagttggagataattcctttctcagtacatggatagctgcctcgttgcttttaacagctgtgtgacattatcacaagttatacccctggcctatttaacattcttccctctctggcctcacaggtgcgtgttgctgcagccaaggctgtaatcagcctccctgcacctatgtggccgggcagcacgccatgtttgcatgggacaaatccctgacaccagcttaagcaccaccatgaatccctcccctcctggggactcctgcagagcttccagtagagctccaggagagagaacccagctcaggcatttgcagcagtgtttgttagagtctaaagtcagatcatgaccgagtttaaaccccagctgctcccctcacatctccctctgcctcagttttctcatccctaaaatggggatgatcataatggtacccacttcatagacctgtactgcggattatacagactaaagcactttggaatggctagctgctctcacccttcctgttacagtattgagttccaacgtctccctgtagaatgctggcacttcgtgggcaggccctggttttgttcctctctgcacataaccccaggatgtgctggttgcacaataaatggtcccttacatttgttactaggagcaacccccaccccagctttggcccactccccctccttccagcctgtgccctcctcatggccccagagctggggaggagagatgcatctctcaggataatctccagcagccaggtgctccccacctccacccaggtcagcaataaacaccagagtccttgggttggggggcagggtggctcaggagctctctaagggccagaggttttgccttggccctgacaaccccacccccacccctccaagcctgagtctcttcaaactctgctcctcctggcctagccaggcctcctggagagggacggcgagatgataagcgctggggctgagaacggggcatccagaccttggagttcggtcctagctgccctggccaaggttttgtttgtctagtcccaagaggcaggcccttggagtccagggaagagagaaggaaccacctgggcagacagacccaagccaaggggccaggtgtcgccagcgtccccaatctccagtctggctctggcccgcatggcagctggaagggccagagctgggtgggttctgtcaatgcttctacggggtgtgtagggggttggcaggagtcacaaatgttggccttagctgcagggcaaatgcagataggacctccacggagtgcctgttcccaacccaagggcacagcagagctaggagagaggcctcagggtccaggagggagaggaggtgttcaggcccagcttcccggagagagtgtgactacagactaaaagggtcaagggaacaggcccacttggcctgaggatgagggcgctggaagaaggggatgggagattgggtgctttttcttgatggggaggggcgacttgaagacggcaatcaagacctagatgacgtgtttggtctggggtggagtgaggacgccaagagggaaaggacggcgccctgaagagaccagctcaggcgaaaacagggctctgcccaggcggggacccagctgggtggagggcggaggcaggaacccaggaagccgactgagcaaagactgcgtccaggccccgcccccatgagcccggccacgccccctggagcccagccccgcctcccggccgcccgcgcgcaggtagggaagaggcggagcgccgccgccccgcccccgaggagccaccgcccagccgctcgcaggcgccgcacggagttgcgtcccggggacttggggccgcagggaggtgagcgcggggcgacgagcggggcaggactcacggccgcccagccgcaggcgccggaagggtcccgaggttgtgcccgagcctgccctggagcggtggtgcgcggccaggaagggtgcccagtgcccggtgcccgccctgcgga

SEQ ID NO: 19089 - DNA, 2300 bp, Homo sapien
tcccagcactttgggaggccgaggtgggcggatcacctgaagtcaggagatcaagaccatcgtggccaacatgctgaaaccccgtctctgctaaaaaatacaaaaattagccgggcgtggtggcacatgcttgtaatcccagctacttgggaggctgaggcaagagaatcgcttgaacccaggaggcagaggttgcggtgagctgagattgtgccattgcactccagcctgagcaacaacagcaaaactccgtctcaaaaataaataaataaataaataaaagaaggtcaaggttcaaggttcaatccttggatctatcactaaagcactgggacaaacagggcccttctgccttctgtctggatatctcgcctctgattccttcatctctattgtacccttgctgggaggcgatttccagaaccaaatcttaaaaacctcctgactttttttttttttttaagacggagtctcgctctgtcccccaggctggagtgcagtggccagatctcggctcactgcaagctccgcctcccgggttcacgccattctcctgcctcagcctcccgagtagctgggactacaggtgcccgccaccacgcccggctaattttttgtatttttagtagagacggggtttcaccgtgttagccaggatggtctcgatctcctgacttcgtgatctgcccgcctcagcctcccaaagtgctgggattacaggtgtcagccaccacacccggccttgttttttttttttttttttgagactgagtgttgctctgttgcccaggctggagtgcagtggcccgatctcagctcactgcaacctcctcctcctgggttcaagcgattctcctgcctcagcctcttgagtagcgggactacaggcacgcgccaccacgcctggctaatttttgtatttttagtagcgatgcggtttcaccatgttggccaggatggtcttgatctcctgacctcaagtgatctgcccacctcggcctcccaaagtgctgggattacaggtgtgaggcaccgtgcccggccttgcctcctgaccttttaacaaggctgacctcccccaacccccacaaaaccccagttccagtttccagccctgcgttcctgatgaaccaggtgaggaacccacagcaatcttaatccccaatttagagagaagcccagggggagccaaaggtgagacacaggggatggggcgcccttggtgtgggacaggggatggggcacccttggtgtgggacaggggatggggcgcccttggtgtgggagaggggatggggcgcccttggtgtgggacaggggatggggcgcccttggtgtgggagaggggatgggccgcccttggtgtgggacaggggatggggcgcccttggtgtgggacaggggatggggcgcccttggtgtgggagaggggatggggcgcccttggtgtgggagaggggatggggtgcccttggtagtgggacaggggatggggcgcccttgttgtgggacaggggatggggcgcccttggtgtgggagaggggatggggtgcccttggtagtgggacaggggatggggtgcccttggtagtgggacaggggatggggcgcccttggtgtgggagaggggatggggtgcccttggtagtgggacaggggatggggcgcccttggtagtgggacaggggatggggcgcccttggtgtgggagaggggatggggcgcccttggtgtgggacagtggatggggcgcccttggtgtgggaggtcaggggaggactttcaggaaaaaggcctgcgtccagaaccggggatgggggacagaggtgagggaaggtggcaggaagagactgcacgagtgtgcacaggtacagcaagaacgggtctgtttaatgacacagctgggtctggttacaaacatcagaaactagaaaaggaggacgggcggttgcacagatgaggatgaggatgaagatgaggatgaggatgggccaggaggggacacagcaggagccacagcagcaaaacatccttgaagacgacacacgtgaccaaggggcacacacggggggcccccctggcaagcctgacgcagatgaatagacagggccgactgccggccaggaggagggtggggtggggaaagccctcggccctcggagctgagggtgagacccaggcatgtggtcccgccgacctgctgcccagcagcccggatcccccggggctgccctggtggccaaggcaggtggagctagcggtcgaggtttctggactgaggcccctcccccagtgcggt

SEQ ID NO: 19090 - DNA, 2300 bp, Homo sapien
ccccgaccttgtgaggactgattaagctcactgggcccaggttctcccctccagcggtagggtcaaggcatgcactgtggcattgagcacgtattcggagtctcgatctgatgagactgggccttgcttgcaaggagctgccactctaaacaaatgtgctgtcaagtacaatgactgcagtagagtgacccaggagttattcaaggcgcctacagggcactttcagagttgcaggcatcagggcaacgtttaaagaggagcaagggcctctgaatttgcagtgcacaaggcaggatgagccctcagacagaagacgctgccgaagctactgacatgaaagcatggagcatctgccagtaactgcaaggtgaatggaggtgaagcaatgatgtcaccgtggaagcatcaggagaggaggaagaaaggggaggaatattggataatgaagccagagagacgggagactcaacagtgaagggctggcagttttaccctctggacaatcctctccaaacttttctgattacacgccctcttcagtaaaaggcagaattcaagtgtgcactcacaaaatagacaggtgcagccacttacaaattatatgctagactactgtacagattcattcctacaccatacgactatattacatttgcaaaggatgagatgaaaagaaatagttacacgatttctcctattttctttccacatcccaaggggacctgttgggcagccacttggtcacaccaactttgagaagctgttcagtgtgtgtgtggagcatggagccagccatggccacgctgagacatgggtctgggagtggtgtgagaacctgaacccacccgctcccctccagcccctccaagacccccaggaggcattagattttcattccctcaacaagggggagacagtgtcagaggcactgcctcagggtcccccaggcacctgaaccctgagctcccaggaggggcccaggctgcagctgaggctggccagggtgagttctcctcgcctcccccggaccttaaagtcggattttaagaataaatacatgaaccatagtgaaagcgcagagccaacccttagcaatgcttgggcaatgggacatcaagtcttgagcgaggacaggggtcgccgggagcctgagtgacatctcttcccaacactgccaggccctgtctggcctcaggctgtccccaggactgagcagccgctgcagggcaggcaccatgggattctccccccacctctggcccaatctcacactgccctggatagggcccaccaggaggaaggatttgcctcccccaggcccggaatcgggcccttggtggcggctgagatgtccccagcagcctgcgccttcctcaagactttttgtctgccaggtcctgtctgccctatccggtgcctctctggacttcctccgccaccagctgggctagaattcagggcagcggctggttcttgcctgtccgtgtcattcataagccacgggggacttctggccgccgccgccgcgttcgtgcaccgagggcatggaggtgctgggcggaaggagagggggcgcaggcctctggcgcccgaggtcggaggtgcgctcaagttccgacagccggggcggtgggcgggcagggggacgacccccgtgctaaccccccagagcctgggcgtccagagccgtgggagtggcgccgcggcccccagcggctggctcgggggcgcggggagaggcccgggcgaggggagcccagctaggtccacggcggccgccggaggggctcctgttcgcccccacgggcgggctggcggtcggcctcgccgcgaaagctcgggagtgttggactttgagtcagttccccgccgcgggaagggtccgcacgcgcacactcgcgacgccgcaagcactgggacccggaacccagcgctcccggcccgcgcccgccccagcgcactcctgtgcggcccgcgccgcccagcgccgcgtgaccgcccattcctcccgggacccccagcgccccggccacacctacccgagccccgccccgcggtgcaactccgccgtggcctgcgggtgggcgggcggcagtcgcgtcgcccccaccccgcgcagccttcaccttgccggcattggctcttacccacacggggctgggggtttggagcggatttgtttttttaaacattttccagcagaccacatccccgccccaccgctggctgtcccccgccccccgcacatataccctgcacacacgcacgcacacacacacacacacccggcgcgcacagac

SEQ ID NO: 19091 - DNA, 2300 bp, Homo sapien
aatgctgggtggtccacgctattgagcccgggtctagagttgggcagggagaatttaaattctggcttccctcttactaatggaaagactatgggggaaatttatgcaatcagtttatttatatgtaaactaggattaataacagtggttgtgaggttttggtgagggtgcagagtgattgctccataaatgctagcagctgtcttgtttcatgctcgggacctgtgctttagttttctccagaggtttcctacctattaagtcactcgggaggctcagtaaccccagaggattggcaggacatgtgtttttaatctttggttaatggttgtggaaactgagggacagggagatttaggtggcttgctccagatcatctatctcatttgtggctaatgcgggatgctcaggcccgattccaggcagggtctcttctacatgaaatgggcctggacctcctggcaggagagaaaaggccaaatctgaggaccatctggccaggcctggcctggcgtgacttagccagaaggaagcagttgcctattaactccttgggacccagttaactggaaaaattggtctgacatcgaggaaccacctgccgatggtggctgccgtggaaggctggcagtgggggtgacatttctactctccagtcacactgtcctaaatgccaactgattccttaggtggtcctgcccctcaatattggggtgaattgatagggatgggaggaggaggaagaggagagtcagaaacatgggaaggtcgtgcccttcaatcctgaccccagtgctttcctctgtttagggagaaagaacctctgaagtaagccctcacctctgcaggtggggctcaggcccagagactgggatcagctggctcaggcaggtagggcagggctgggagccggggagggcagagggcaaggcttgggacaggcaggaagcaacaggcaagtcccggccatgtgggaggatagcaggcagtgttcagctcttgccactgatggaggttcaaagtaggcggatggactcatgcctttggctgctaccttgagcctgttgtggtccgggccatggggcaaggatgagtttgaagagaaccaggtgtagtttgaccacattttctaggcttggggatggcgaggtggtcgtgctggggcatgagggcagtgtcggaggacgcccaagggagaggcggtgctcggaaacatccactctgaaatgcgagtcccatccccaggtgtgggagaagtgctgatctgctctggttttctgtttcagctcaggtcctggttcgtcccctagcccaggaggatgctgtgggagctgcagcagcggcaagagggagaatggggggaagcagcactagagaaggtagacgcctccctctcagcccgggacctgccagtctccccttcccccaggccctgggtgtgggctcctgagcaggacctggctgggcctggcagaaagagcagacgtgctcgctgctctcggacgggcttccttccctctgagttcctgaggctcctctgagggactgctgagcctgagaaagcctaggatgagggacttgctgggtccaccaggctaattctggggcagccagcagcccaggcaagaggcaggaataagtaaggagtgaggagaccccagaagcaagggacggctgatagctcacatttactaagcaagggcttccattcattctgtaatttaatcttcagtcacccacagagcctggtaatgttattatccacaatttctaaatggggaaacacagagacaggttaaataatttgcccaacatcacctagctaggaagtggaggctcccaggctcacactggagctgcagagcccacgctcctacccaccatggcaggcggcctccccctggaacctaacagtttgcaggggttgggggtggtttgctggcctggccaactgcctgtcagcccaggagctattctgttaagccgccacttgtggtccgaggtgctggtgtcggtttgccacagtggcactcgcttttgtgtcatttgcctttccccagttcccagagctcatcctgtcactggctgctctgctgaaattatcaataagaaatgccagttggatctgtgacatgtctgcctgcagctggatgggagcaacggacagcttgtcctccgaatgtgttttctgtatgtgtgcaagcgcgtgtgttccaaacgggcagtagcgtgtgggaaggaaaaagcctgacacttgtttttatcaatttgctgatgctcagtcccggcggctgcctcct

SEQ ID NO: 19092 - DNA, 2300 bp, Homo sapien
acactgagaagaagtgatgctgggcctgctggagccatcttgcatctgcgaggcttccattaagtaggagctgaaggactgcgatggcagagtagagagaagaaagaacatgagtcctcagtgatgctgctgacccgcagaaaccgccagtcccaacacccctgaacttcagacctcgttttgattcagagacacatttatacatttcatatatatatacacacacatatatatgtatacatgtatacatatatatacacatatacatgttttatatatatatatttttatatatatatatatattttttttttttttttttgagacagagctttgctcttgtcgcccaggctggaatgcagtggcatgatctcagctcactgcaacctctacctcctggattcatgtgattctcctgcctcagcctcccaagtagctgggattacaggtgtgcaccatcacacccagctaatttttgtatttttggtagagacagagtttcaccattctggccaggctggtctcgaactcctgacctcaggtaacccacccacttcagcctcccaaagtgctggaatcacaagcatgagccatcacagctggtcgcattttcatattctaaaatgcaggatgtgtcttacaagcaatggcatctcagtttgagtgaattacaaaatgtgagattttaggctgggtgcagtggctcacgcctgtaatcccagcactttgggaggccgaggagggtggatcacgaggtcaggagattgagaccatcctggctaacacagtgaaaccccatctctactaaaaatacaaaaaaaaaaattagccaggcgtggtggcgggtgcctgtagtcccagctactcaggaggctgaggcaggagaatggcttgaacccgggaggcagagcttgcagtgagtggagatcgtaccactgcactccagcctgggcgacagagcgagactccatctcaaaaaaaataaataaataaaaagtgagattttaaaaagaaatcttattaagtcattttaagttgggtgttctgtttcagtcaaatcatcctaaatgatatcttttaaaaataattcttcccagaagaatggatcatggcagaatacagaaaatgagctcatgtgtgcaagcctccttccggaaatcataacagctatgtgtatatgaagtgtttactctgtggcaggtactctggaagcaccttttattcactgtctcatctgattctcatgacagccctgtcattatcccccacccccccaccttcccatttcacagctgaggaagtcaaggtgcagaaaggttaaaggaactcataagtgaaggcactgcgatctgaactcaaacaatccagcctaaaaacccatggtctcagccaccatgccatgtttcctaaaaaaattacgctatgacagtggaccgtttttgcttaactccagagactttaattcacccacctagaaaacctgtcatgaaaatatagaggattttttcctgagagttcttaggaccgtgaaacagtgtcacaaatcctgttcagaaagctgggatcatgcagatgaccaggcagatggaagaaaagtaaaaatataaaaatttaaaaacctgggatcactgctttaagtttcaccgagctttaactttctggaagaggagaaatataacacagaccctacgcattgagaatagatggcgttggagttgtggattatctgtgcttgccaacagtgtacaggaaaaaaagcgatgcatttgacttccctgcttggcagagccactgcctctagagtattactcaaaaattgattttttaaaaataaaaataaatgaatttgaagacgatataatgctccatggatctcttctgttatttcctgggcatgtctctccatgcccagaaacccttgccttctcacagctgttgcataacctttgcttgtggtggtgtttgttcctgttgccttgaaagtcccttcactgcattctcttctctgctctgcaaattccagcttgtacttaaatacttcctgcgaagttttgactgagacgctgcaacaattcccgagctgtttcatcgtggcaccttcctggtggcaggtggattagcacattgtctgcaacccaggaggacttggaggaaagtcccagctctgctgattctagctgagtaaccttggcaaaggtcacctcacttctctctgagtcttattttctcatctgtaaaatgaggaggaggaggaggatcatccaaacatcacgggacttcgttaaatcagtgcttcgggg

SEQ ID NO: 19093 - DNA, 2300 bp, Homo sapien
ccgggaatgcagcccagtaggtttcagcctcgtttcacccagctcctattcaagatggagttttctggttccaatgcctctgacagtagtacttcatcgcattgtgaggattaaacgagttcatacatgtacagaaaccagtatagggaatggcacctggtaagtgctatgaagtattagctatcattactatcttgtctacagtaggtcaccagcccgctagcagcttttgggaaattccacacttagaattcccactgtaagtctcaaatgaaaggaactatgtttgcagggatagaacacattcttcctttcagtattacacaaaataacgtgtcttcaagggtaaggtagagaaacctaatggccagaattactgctgaatgaattaatgattatttgctgaagacttactgtgagcatagcaggtaaataccaaaccctgcactgttaagaaattaaaaagaaaaaaataaaaataaaaagaggctgggcgtggtggctcacgcctgtaatcccagcactttgggaggctgagacgggtggatcacctgaggtcaggagtttgagaacagcctaacatggagaaaccccatctctactaaaaatacaaaattagctgggcgtggtggcgcatgcctgtaatcccagctactcaggaggctgaggcaggagaatcacttgagcttgggaggcggaggttgccgtgagccgagatcgtgccattgcattccagcctgggcaacaagagcaaaagtccatctcaaaaaaaaaaaaaaaaaaaaataataataataataaaaagagacttctgctcttgaagagcttacaatcaaatgaaaggaggtaaacataagcaaatgtggtaatttgaagataagtatctgcaacatattaccatctgcaggacaatataacccacaccgaaggccacagagatcactgttaatgggtggatgagaacagggagactggaatggagaaaaggctctcggtcttgcaaacttaaactagctttcaaataggtgcaaattctggccctgattgttgatgtcgtttttgccttatttttatttcaaaaacgaagccagaccgggcgcagtggctcacctttgtaatcccagcactttgggaggccaaaacaggaggactgcttgaggccaggagtttgagaccaacccgggcaacatagtgagacctcatctctgcaaaataaaaataatcagctgggcgtggtggcgctcgcctgtcgtcccggccactcaggaggctgaggcgggaggatcacttgagcccgggaggtccaggctacaataagttatgattgcaccactgcactccagcctgcgtgccagggtgaaaccttatctcaaaaacaaaccaaaaaaacccagaaacaaaaaaaaatgaagccaaggtgtttgcctgaaaaataacactcagaagagcagtgggtgttacatcattctccgttcttttcgtaattcagctcgtgacacttgcctttttttctcttctcggaatgccccgggcccctgggcagccgcggaggccgagccccgtcgctctccagcgctccttgccgcccgcgcctcggcttcaccggcctcgccccaaacttaaaaacacctgagcaggaggttgaacgattccctcggaatctctcctcttcactaacccagcgaaccaccccaaatgcccctatcctcccccaaataaaatccgcagagcaattaacaaagatactcggccaagccccggtttcctcatctgtccctgccccctcgaactttctgtgcttccccagtctcgaccagggacaaactgtgttgaagctcaatgactttctggcagaagtgaacctccagcttcgttttctgacagccgtggttcttcacaggcctggtttcccactccggaccctccactgcccctggtggcggccaccatcttacccccagctccagggtcgcgctgaggacgcggccagcccccagccgccgtagttttgaactacatttcccaccagccctttctcaacatcgcgagagttccggagagattgccgagaagacttgcgcgcaggggcggtctcgcgttcttttcgaggtcggccgcgtggctggaagacatggccactccagtcggtgttgagcacggcgagcagtctcaggcctttagtgatgatggtaaggctgcctgggtgggaaaacggggtcttccttgacacgacactaacatacttggcttcccttcctcagagacgaagtggtgacgataatctcggtttctccctcata

SEQ ID NO: 19094 - DNA, 2300 bp, Homo sapien
aaggacaggtgaggcctctggcgggcatgccattgtggttgacaatggcaccattgttcctggagtcccctcagtgggggccacagggctcacacaccctggtccagtggatgctgagggggtgccaggattctggatgcaagatacagccactgaaggtgaggggggatctggtcccggactccctgctgattcaggcgtcacgggactcctctgcagtatgggatgtgaatggccagcatttacccaacgcttgtgacttgccaggcactttacagagaccgtgcaacccatggttttactggtgtggggataaaagcctggtgcctttcattcagtgagtcagcggtagggtcaggatttgcacccagagtaccccccacctcgagagctggcattctttggggagctcagactcccaggagaaggggatttatggagttcctcctcccagcatgttacagggcacacacacggtcaccacagcagccctgagtgggacccgtgtacccatttccagatgacaaagcagggacgctgagaggttcaggaacatgtccagggtcacccagctggaaccatctagatctaggaccctctgaccccagcgctggggttgtttccatttccccacactggcccctggaagaatgatgtgtggcctcttgaaatctcacaatagccctgtgtgggaaattgagggtcagagacactgagggacgtgtcccaggtggcagccactgcatgcgagctagcatctggccctacctgctggcctccaggttcctccacccacacccaaaggccgttaactcaaagcttccctcctcaggggctgtgggtgccacagccacagggttaggggatctcaggaaaaggggatctgcagtgccggaggaagctgagttgggtttctagaagcttcctcccctgaccaggggcttaaggagtgtcctaccatagtgtctatgccacactgagtcctcacactagaacctctcttctgtgaagtggaacaaaatagagcagctttagacttttgttttgttttgagacggagtctcactctgtcacccaggctggagtgcaatggtgcaatctcagctcactgcaatgtctgcctcctgggttcaagcgattctcctgcctcagcctctcaagaagctgggattacaggcacgcaccaccacgcctggctaatttttgtatttttagtggagatggggtttcaccatgttggccaggctggtcttgaactcctgacctcaaatgatccgtctgcctcggccacccaaagtgttgggattataggcgtaagccaccgcgcctggccttagtttcagtgtagccacagtacatgtacgagttatctattactgtgtaacaaatgacctcaaaacttggtggctttaaacaacaaatattgactatcttgtggtttcaatgggtcaggaatttgtggggagcttagtgggaggttttggcccaggtgcagatgatgggctgcatcatctgagagacccaaaagcttgactggagctgacatcaagatggcgtctcacgggcccttgccacttgggccctctgtaggctatttgagtgtcctcacgacatggcagctaacttcatccagagtgagtgatctgagaacgtaaaggaagccacagtgccttttatgacctagtctctaagccacacaccatcactttcctctttatcagaaaaatcctgtgcatgagtcgctaagtccagcccatactccaggggatggcaattgggtgccacctcctgaaggagcattagaggatttgtggacctacactgaaaccagtacagcacctctgggtgggaatgaaaggtatttaagggaaattctccagtcggctcagggggcaaggttgggtggagggctgtccacactgaggagctaaacatgtcctggttcccctctgggctcattgtctctattctgacaggacctgcagtatatcttcatcccctcagacatccgcgactatgtgatgctgagatcggccattctgggcgtgcctgtccctgagggcctagataaaggggacaggtgagcagccaggccgtggtggtgtggggcgtggcagaggggcaagggacactgtggttatctcctttttgctcccagggcccatcatggggtaagaggaggtgggtgaagggcagtaagaacagccctaagaattcaatcatccccaattattcacataacagcactgggaaattctactttttgtctacccctggaaagcccaggtgaccctccgggt

SEQ ID NO: 19095 - DNA, 2300 bp, Homo sapien
ggaggccaaggtgggcagatcacctgaggtcaggagtttgagaccagcctggccaacgtggtaaagcccccatccctactaaaaatacaaaaaaaaaaagctgggcatgggggtgcactcctgtaatcccagctactggggaggctgaggcaggagaatcgcttgaacctgggaggtggaagttgcagtgagccgagatcacgcctctgcactccagcctgggtaacaggctgtttcaaaaaaaaaaaaaaaaaaaaagactagagtcccggcagggagaggctgggctgtgtgtgggggccaagtttgtaggtttgtaagtggaagttgaataaattactaatgaatgattctccttttctccatgaagtagagggtaaggcacttactgagagcaagggctaggagggatatttatgggcacagagagaaggtctgaggaaatgtgagaagccagtgatcaggggataagtaacatctacaggaattttgacaagtaaacccataaagattgaaatgaaagtcgtgacaccataaattccaagtagtgcccatctgcggggtagcaagatgagtctggctctgctgagcagtcttggggtgaaggaaagaactggcccaatgtgagtgacctccagtgaccctgacttggtaggagtactgagactggatggactgaatggccattcctgaccacaggcccaggccctgggaggttttcgggaagccttgcaatcagacaggtacctgttgctgcacccagacttcctcggatacatgaagaacagattagagccaaaggcccgtgacacggtagcctaggtccctctcatccttgcagcctgctgacagttgggagtctggggcatgtcacagcctgccgcatgtcacagcttgccgaacagtggccactgaagcacacccatctcatccatcactcactgccagggagtgttccacttagagagcacgggtgctgagcttcccagccctttctgatgctggagcctgctagaccaggggtccccaatcccaagcctggtccgagacctgttaggaacagggcatcgcagcaggaggtgagtggagggggaaggagcattaccgcctgagctccgcctccttcagatcagcctcggcattagagtctcaaaggagtgcgaacccttttgtgaaatgcgcatgccagggatctaggttgcgggctccttatgagagcatcttaactcatgcctgatgatctgaggtggaacagtttcatccccaacccccccacccccacccccctccgtggaaaaattgtcttccaggaaaccagtccctggtgccaataagtttgggaacccgttgtgctgaacatttcaggtggtctctctgactggcctcgttctgtgaaaggaactcaatgcgattgaggggactggccaccctggatggttaccaaataagcgctgacagccttagctcccccacgaaacccatcacggcaagctccccacctcacccccttttcccccctctaccgccagcccagagactgagctgtcgggttttgctcctccaccctgcccgccccctcccagctgtcctggcgtccgcagactgacagatctgagggtcctttggagggagccgggcacatctcctcccggccgccgcccacccgccacagagtctagaggccgagtgccgggcccgcagagggcagagcgcagccagcgcagcaggtggcggcgtctacccgcgcctagctagccccggacggcgcgaggaaagcgccctgcccaacccgagactggcggcctcccggggctgggctctggagagagcgcagtggcaggagtggccgctgccgaagtcccccgggcagggggcagggccaaaggagcgcgcgctctgggcgccgggacgacactccagccccgggggacccgccgcccagctcccgagggtgcggcagcctctggccactcagccggggccgagagggagctgccgggcgggcaggcgccgcaggcacccggcgggcagggcggggcagggcaagacggccgcctccgcaagtgccacccggcccacccggttctctcccttctgcctgggacgtcagcggacggggcgctcgcgggccggggctgtatggggctcccgcgcgggtcgttcttctggctgctgctcctgctcacggctgcctgctcggggctcctctttgccctgtacttctcggcggtgcagcggtacccggggccagcggccggagccaggtaggggctgccgagcgcagagcgggagggcgcagg

SEQ ID NO: 19096 - DNA, 2300 bp, Homo sapien
aacaaaggcagaggcattttctatgcaagtccagttaaaaatgtgtgtgtttaggccagacgcggtggctcacgcctttaataccaacattctgggaggccaagggtggaggatcacttgaggtgaggaatttgagaccagcctgggtaacagagtgagatccagtctctaaacacacacaagtgctcgcgcacgcgtgcacacacacacacacacacacacacacacacagagattagctgggcatggtggtgcatgcctgtagtcccagctactcgagaggctgaggccacaggatcgcttgagcccaggagtttgaggctgtagtgagctgtgattgtgccactgcactccaacctgggcgacagagcaagactctgtctcttaaagaaaaaaaaaaaaaaaaaattgggcgcggtggctcacgcctgtaaaatcccagcaccttgggaggccaaggtgggcagatcacgagatcaagagatcaagaccattctggccaacatggtgaaaccccatctctactaaaaatacaaaaaaaaaaaagagccaggcgtggtggcatgcgctgtaatcccagctactcggaaggctgaggcaggggaattgcttgaaccagggagatggagggtgcagtgagccaagatcgcgccactgcactccagcttgggtgacagagccagactccgtctcaaaaaaaaaaaaaaaaagaagggtttcaaggaggaaggatccctgggaggtaaggaggaagaactgtcagctgtcagccctttcctaacacccttgggaagtttaggcttcagtttcaaggtcagaatagagagtgcccccgctggagaccctgaataaatgtgttgctttgaggctgagaaaggctggaaataccacccagggtcagctgcagctcaggctaggaggccttaatggaggaagggcttgcataggtaatcagcctgcttcccatattgccttggccggccctgcctttctccagtgatcaaagacctttgtttcctgcctcgaataacaataatcgtgtatcacataggtccaaggtctgtgtcttattccaatttgtattcccagtgcctgcacagcacactgcacagaatagacatttagtaaacgtttgtcggatgagatgctctcctgtatgtcctatgtacatatctcaaattctattccgcttttgtttgaatctattttctggccaggcacggtggctcacacgtgtcatcccaacactttgggaggccgaggcaggtggatcactgggcaggtcaggagttcaagaccagcctggccagcatggtgaaacccccatctctactaaaaatacaaaaattagccaggcatggtggcgggtgcctgtaatctcagctactcaggggggtggggcaggagaatgacttgaacccaggagatggaggttgcagtgagctgaaatcgtaccactgcactccagcctgggtgacagagcaagactgtgtctcaaaaaaaaaaaaaaaaacaaaaaactacttatgcttctgacctgtttccacaatcttcagccttcatcaaaggttatctctgtccctaggcatcaacgcacagagaacattaaagaaaggtctctacagtccctggcaaagcctaagtcccaggcacccacaagggcaaggaggacaaccatctatgcagagccagtgccagagaacaatgccctcaacacacaaacccagcccaaggcccacaccaccggagacagaggaaaggaggccaaccaggcaccgccggaggagcaggacaaggtgccccacacagcacagagggcagcatggaagagcccagaaaaagagaaaaccatggtgaacacactgtcacccagagggcaagatgcagggatggcctctggcaggacagaggcacaatcatggaagagccaggacacaaagacgacccaaggaaatgggggccagaccaggaagctgacggcctccaggacggtgtcagagaagcaccagggcaaagcggcaaccacagccaagacgctcattcccaaaagtcagcacagaatgctggctcccacaggagcagtgtcaacaaggacgagacagaaaggagtgaccacagcagtcatcccacctaaggagaagaaacctcaggccaccccaccccctgcccctttccagagccccacgacgcagagaaaccaaagactgaaggccgccaacttcaaatctgagcctcggtgggattttgaggaaaaatacagcttcgaaataggaggccttcagacggtgagtttttgccac

SEQ ID NO: 19097 - DNA, 2300 bp, Homo sapien
agtcaatttctcctaaaacacacacttctctggatcccacattctgcccaggcacatgctacagcagcagtgggctggaacctgagaaccaggaaactaggactctggattatcctgccacaccagttggccacaaggtcttcaagttcaacctgcctctaatgtggcgagagggacagattgtccacagtagctcagcttgcacccaggagctcagctggatctccatgccctgcggaaggcagcgagcactgacagccagtgccttcttcagaacacagggcacgatgaaagagatactctatttagtcacactagtactgtgggtaagaacatgccttttcactgtgcacttatttgcatagcgttgcaagcaggcaccaggatacaggaatataattgtacatgtcaagtgcataaaggaactcaggataaggggccagttaggacaaagagttatgacttgatacagatcaattcagaaaatgtttatagagttaacatatgagcatctgtaggttaggcacggtgagagagaaagagagaggttgagtcagtactaacagagatgtttctccttgccaccatgacttgaaacagtgctgtgagttgcagtgtacagtaggggataaaggaaaccatcagtcgtctgtattaccctcagctgctcagacgtatgttcctgcctttttcgtcctccttgaggaaggtggtttaatcatttatcggtgcgtgccatgggtgaaggccaagagccttgtgtacagaactgaaaactgtacgttaggagaaatgcccaccgccaggtgtgaacagtgagcccaggctccaaaacctctcccacagttcaacaccctggacaatatttttataaaattactaactcacagtactttatggagggctgcttctctgaatttttaaagttttctacaaatggtcttgatgtttttcctctgaggtgtacttttttttcccaagaattatgtgggttttgttttgcattgctttgatcaaggtagagttaatgatttctcgtaggtgctactaagcagtggatacgaatgcaatcggccaggcacggtggctcacacctgtaatcctagcactttgggaggccgaggcaggtggatcatgaggtcagaagatcgagaccatcctggccagcatggtgaaaccccgtctccactaaaaatacaaaaattagccgggtgtggtgttgggtgcctgtagtcccagctactcaggaggctgaggcaggagaatcacttgagcccgggaggcggaggttgcagtgagccaagattgcgccactgcactccaggctggcaacgagtgagaatgtctcaaaaaaaaaaaagaaagaaaaatgcaatcatggctgggcatggtggccgatgcctgtaatcccagcactttgggaggctgaggtgggaggatcacttaagtccaggagtttgagaccagcctgggcaacatactgagacccatctctatttcttaaaaaaagaatgcaatctctaggtcagttggatctggaccccaagccagtggctcaccatgtgctcttgggctggcagcttgttcttggaggccatttcctcctctgtcaaatggaggtgatgacagtacccagcccctagagtggctgtgagggttccatgagtgcctgtgaagactccccactgcccagctcagagtgagccctcatacgtgctggtcattgttgtaatggtcatgatttcagaagagaaacagagaaggttgagctaaagtgttgaacatgtgtgttgggtgcctaccacaaacaaagccctgtgcatggtggcctcaaggtgtcttcatgataatcccaaaaggaagataactgcttttttccatttatatggcggcagatgggttaagtaacctgaccaagatgagactgcatataatgtggttatatttctcataaagcttgactttcagatattggcttcaaagacaaaaaaggaaggtaaacatgtttgaacacaaggagtttcccttcctttaagccacgccagcttataagccttcatacagcagtgaaggcggttcctcccttcccaggcagagactgataaactcagcacttgccggagtggctcattgttaagacaaagggtgtgcacttcctggccaggaaacctgagcggtgagactcccagctgcctacatcaaggccccaggacatgcagaaccttcctctagaacccgacccaccaccatgaggtcctgcctgtggagatgcaggcacctgagccaaggcgtccagtggt

SEQ ID NO: 19098 - DNA, 2300 bp, Homo sapien
ccaccacacctggctaattgttttatagagacagagtctgactatgttgctcaggctggtcttgaactcctgggctcaagtgatcttcccatcttggcctcctaaagttctaggattacaggcatgagccactgcacctgaccctctttcttcttacaggagggcacaaagcacacatcataggctgctgcttcaccagacaggggaaccgactgtagacacagctttcccaggggacaagggaggctgggaagtgggacttcagtatttcaactactagatgctgctctagacagaaaattttgcaggatggaagatgcggggctgaggagaggagggaagggtgaagcaaaggaatatggtagcaaaagtatgggagcgaacgtggagaccacccctccaggcagtgtgggggatgccagtggcccagggctatgctgaggtcctgcggttgcagagcctgtaacgtgcttacagccgacccagctgcagagcagggctgagaggtccgacactgtgatgtggtttacgttctctgaaggcactgagcccgtggtgtgtggggggcaggaactgcagaaaccagaagagtgagatgcagccaggatgcagtgcccggctgggctgaggagcacagggcaccagagtggagcaaacaacaaacatatggctccctgggttcggcagccgcctcgccccacctgaggtgtttgtgctgcagaagttgtcctgtgctggtcagatggtgtagctgagcctcataaagataacaagacattgctcccagcacagaacccgcgtggagcaaacatttaggccagtcttcctccacacccatcccttgataaaaggggcagggccgccacctgccatagggtatcttgtgcaaattaggaaaaggcacccccctttctctggccagtgaaaccccacaggcttccctccccgctcctttgccaagcaccgtcttgcacacacttgtatgctccctgatttcccagctgataatgttttttctttctccactttcggctcattcctctcaacgaaggctgtttctaacctacttcttcatagcactacctcaagctgcttcatggagcctatcttcttcctcattacatcactgtgggacatgcagtcaacaatcaaatgaggcccaaagggaaactgaggcacagagcacctaagtgatacctggggtccccaaacctccccggcaaacctgagatttcgcatcccagtttttagagccctcaaaagttgcgtgtgtcagacccaaccagctccgatgttctaagtgggttttattttcattttcttcttgttctgaaaagcaaccgcagtcacacaagagagaggagagtcccaactccgccggctgcacacaggctccctctctccccagtgggctaggagcaccttcttcctctttgtcctttcttctcgacagagttcagaaggaacagctggctgccatcttcaagctcatgaaagacaacaaggagacgtttggcgagatgtccgacggcgacgtgcaggagcagctccggctctacgacatgtagactgcgcccacgggatgcacagcggccatgcctgatgctgtccccacccttgccccatgcccttgttctttccagacttctgtaggcctaattttcccttataaacatagatgcaggcgtacattctataggtacttgccgagttcttgcagtgtgtatattactttgcaggaatcaaaattgttttattcagaagacaaagtccctgacccctctggtttctgcttgctggtgaggttccagctgttattgggctctgaggccctctcctgatccaaatctttttttgtttgtttgagatggagtctcactctgtctcccaggctggagtgcagtggcgtgatcttggctcactgcaacctccacctccctgattcaagcgactctcctgcctcagcctcccgagtagctgggattgcaggcatgcaccatcacacctggctaattttgtattttcagtagagacagcgttttgccatgctggccaggctcgtctcgaactcctgacctcaggtgatccgcccaccttggcctcccaaagtgctgggattacacgcgtgagccaccatgcccggccaatactacactcttattctgccttacgaggatttctggaagcttctgtaactgtagggaagaaagctgtaggggagcatggtttttttgttttgtttttgtttttgagacgaggtctcactgtcacccaggctggagtgcagtggtgccatcatg

SEQ ID NO: 19099 - DNA, 2300 bp, Homo sapien
atcgtaccattgcactccaacctgggcaacaagagtgaaactgtctcaaaaaaaaaaaaagaaaaaatcagacttccaaagtcaagtacaattttttttttcttttggtgacagggtcttactcttgcccaggctggaatgcagtggcacccccatggcttactacagcctcaacctcttgggctcaagcgacgcacctgcctcggcctcccaatgtgctgtgattacaggtgtgagccactgtgcctggcccagaatctaaatgtgtaccagcctctctgtgctcaggagggcttgggcacgtcagctgatactgggtcctttggggatacggatctgccctggctcatggactcctcgccctggagtgcaattatttgtttgtctttcctactggaccacgagctccgtaaggcagggactgtgctcattgttgctgttgtttttcatttaatctttgtgtcctttgcacataataggagaactggcctcctgtctattcttgatattgggcttagttccggggccgtgccctgaataggtcagtgactgtttgcctgtcattaaagagagacatcaaccatgagaaaaaccaactgtttttctgtccatgcacacaacactccacagaacccttcacttctgataccaaatatgcagccagccccacccctgcaaccaacaccttctccagccacccagacaccaagtgggtgtcctcccgttcaactctgacattaactgcctggaatcagtgcagaccccacaggttagggcccagtcccacagactgccccctacttcaggggccaatcacaagtatcaggtcccctcgttccccacactttggtcctacttgcctacaaatcaagggttccatgaacccctcctcaagttgagtaatttgctacagcgtcttacggagctcagggaagcacttatgttaactggtttattagaaaggaagtgataaaggctacagatgaacagccagatggaggtacctaagtagagtaaggtccagtagggtcctgaatgcaggagcttccgtccccatggagttggggtacgctaccccctgcgcacgggaatgcattcagcagcctggaagctctccaaaccctatcgggatgttgacggaggcctcatcacataggcgtcatcgattcttaactcaatctccagctcctctccagtctctggaggaagctggggggtggtggggctgaaagttccaagctcctcattgcagcttgatctctctggtgatcagcccacccaggagttacctcattagaacaaaagacactcctgtcacccgggaaattccaacggacttaggagctctgtgccagggactgggatcaaaaccaaatgttagaacaaaacatgctgctagcacccctgtaacttaggaaattcaagggacttaggagctcagtgtcagggctgggcatggtggcatgcacctgtgatcccagctattccagaggctgaggcaggaggatcgcttgagccctggaggtcaagactgcagtgagccgtgattgcaccactgcactccagtctgggcaacagagcaagatcctgtctcaaaaaacaaacaaaataaaaactgtgtcaagaactgggggccgaaaccaaatatatatatatttaggatgttacattctttctacttttttttttccaagtgatccttctgcctcagccttctaagtaggtgggatcacaggtgcgtgccaccatgcacagctaatttttaaattttcagtagaggcgaggtgtgcactatgttgccaggctggtcttgaacttctgggctcaagcagccctcccacctcagcctcccaaagtgctgagattgcaggcatgagccaccacacctggcctcttactttttttttcttttttagaatatataagaaaataaataaagaaaaaatggggtctttggatctgactgtccaaagacaccattagcatttaaaaaatatatttagtcattcatgcatattaatggaaagtccaaattatactgaactctataagacggaaaggaaaagctgccccccaagctcctttcccaagaggtagccactgctgacagtttctcgtgggcccttccaaaaaacaaaccttttctctgcattttcgagcacatgcgtgcatttccactttgccatttacagcaagatgactgcgctgctcacgtggggctgctgcttgcatttttccctcgatttatcttgatgtacttttcatgtcagcacctatcaacgcctccttttttttttttt

SEQ ID NO: 19100 - DNA, 2300 bp, Homo sapien
gtcatctaagccccagtgaacctcctgggaggagagctagccctggccagctgtctccaaagtgactggatgctacagaagaactgggactgtcttctgcacactcgtgcctcctggagttgtcagaacactgagcagtctcctagttctgcgtccgtctagccatggggtctgccatgaaagcctgtggatctgctattgggttggtattttaaactttcacttgggtgaaacttgttcatcattttaaataaagcaacatgatttggagttgtgtttttggcattgttttgtccttattttctttcttactcatttgaaagtcaacaatgtactttgtcagcagaacaggactttaaaaaaatgtatttacactttaaaacaatgggatggagcacaaaattaaggccctgggccaggagcattgatgcacacctgtaatcccagctgcccaagaggctaaggcaggaggatcacttgagcccaggatgtcgaggctgcagaaagctatgatcatgcctgtgaatagccactgcactccagcctgggcaacatagtgagaccctgtctctttaaaaaaaaaaaaagaaagaaagaccctgtctctttaaaaaaaaaaaaaaaaaattggctgggcgcggaggctcacgcctgtaatcccaacactttgggaggctgaggcaggcagattgcctgaggtcaggagttcaagaccagtctggccaacacggtgaaaccctgtctactaaaaacagaaaaaaattagccgggcatggtggtgggcgcctgtaatcccagctactcaggaggctgaggtgggagtttcgcttgaacccgggaggtggaggttgcagtgagccgcgattgcgccactgcactccagcctgggcaacagaataagactccatctcaaaagaaaaaaaataggcccatacactggctgaaacttccacagtggttaaaagctagtcgcccgtagataaagcctatttcacattttatagtttataggctcttttcatcaaccaccactaaaaggaagtgcatggcccgcttaatatcgtgcagtgcagcagaattcagctctccctgttgctgaggggtctcgtttgtgtatcttcatttaaaaagaagcactccatctaatatctggtttatatcacagatcagctcaggcactgtaatattcccaaaaaagtattaaaggcatcctcagcaaaaactggaaccgtgttttttttaacattaggccttatgtttggcgtgatacctgacatgcccgtcctgtgtttatttaaaataactaaagagtgggtggggagtggtaggaaagtatgtttttggttacaacgtgtttatctcaaaatccactgttcagcaacagaggcctgggaggatctggagaaacaaaaacaatagccttcatttccttcattgtaccctcccaccctgcatgcattctggaattgtgcaaagaagaaagtctggtaagaggaatagcgttgaccaaggacctgcagctgaatttcaggtctaggggcgggggagccatgttactgttaacagggaggcctgtgttgaaggctgctggcctcagctccgaagggagcattcactggccgggatctggagatgtcctctgtgaaagtgcattaaggcaaccctgaggattaaaagcaactcctgacatgcctataaaaacggcagtggctgaacgtaatccggcattatgattgctttacaagccaatccaggctgccgtttccatgaagcttcccgggtttgcttgtctctctgcattcccacatttccaaaatgctctaagacgaaccgccgtactaaggccaaagatgacaacctaagggcacctcatacagtatttcaaattgaacctgagctaaattgtgccccaaagcgtcaaggctgcccaggccgggcaggggttggccctcctgtgcctcccaggtggtcagggctctgccccctcaacacccccgcccgcagcctgtgcgtcaccctcccggggccggagggggcgggggcggggcgcggcgatgggggctccgccccgaggcggggcgcggcgaccgggcgcggcgacggggcgcggcgggctccctcggggtcccagctggcccgcactcggcggccgcggcgcgatggaggcgccggccgagctactggccgcgctgcctgcgctggccaccgcgctggcccttctgctcgcctggctactggtgcggcgtggggcggccgcgagcccggagcctgcccgcgcgcccccggaacccgcgcccccg

SEQ ID NO: 19101 - DNA, 2300 bp, Homo sapien
ggaggcggaggctgcagtgagctgagattgcgccactgcactccagcttggacgacagagggagactccatctcaatgaagaaaaaaaaaagaaaaaaaaagaaaaatcactaatgtggtttattgctggactttattaaaacctcccttagagatcagtgcttcaaccatagctgcacattcaagtcacctgaagagctttcagaaattctgatgcgcaggcatcacccgaattaaatcagtctccccagtagggcccaggcaggcctcaggagccccctaaatgagttcaatgtacagccgagggagtactcactgtttccaaaaaagattagcaactgaactcagcgagcaaatgctgttgtagataagattttaaccacaggccgggcgcggtggctcacacctgcaatcgcagcactttgggaggccgaggcgggcagatcacctgaagtcgggagttcgagaccagcctgaccaacatggtgaaaccccgtctctactaaaaatacaaaattagctgggtgtggtggcgcatgcctgtaatcccagttacaggaggctgaggcaggagaagcgcttgaactcgggagatggaggttgctgtgagccgagatcgcaccacggcactgcagcctgggctacaagagtgacgctctgtctcaaaaaaaaaaaaaaaaaaaaaagaaaaggattttaaccacttagctgcagaatactttacctgtaagggggcctgcgcttctccccagcatactggaaaaggtcatcagtgaaaaactttggcaccttgtagtcttccaaaagtttccttcttttagggtgttcaccatagctgctgtcaaagatgtaaaggggactatcatctcgagtgctctccatgtactcgatgtagtatttcatcttcatcttcactgagtagccatcgttatcctcaccacacttgaacttctggttccgatatttcctttttaggcgctccagagtccatttctcctgcgcagaccagccctcttgcgcattcaacaaaaccacgggcttgtaaggtctttcataccgctccacaaattcttccacagacagctgtaaagcatctgccctttccacgttatcctgagggaattaaaaaagacctgtccagttaaaaaaaaaaaaaaagtccagtggcagataagggtgtccccaaggccaactggtaatgacaaaccgaaggaagttgactctcgtctggctcctccggggtgggggcagggcgcgtgcgtgaggccacgtcgttcctagagccaccccccatgagccttgacagccaggtcccctaggggacccgccgcccaaaggagtcagggacgacgggccttctagttgagagcgccacaggcgtgggactcccgtcgtccgccagagcagacgggcggccacagcacgggaggaagcagacccgccccggaatccgcgcctcggggaccccaaactccgcggggtgcgggtgagcctctacgaggtcccgggcgctcggggcgagggcagcctcgggcccagagaaaggtgcgtagcggctggaggtgccgatgcccggcctggccacccccgcccgacccgctcaccgccacggccgccgggctcagcgagaagctctcgtagtagttgtgccgggtccaatccagcgagtccttgagctccggccgcgcactccgcttggcctcgcggatgcgcttcttgctcttgtggttcattctgcggggtcgccagctggttccgctacgacctcggcgcagcccgcttcctgacactaacgcacccctccccggcctgggcggcggcgacggcagtacccaaacgcccttcgctcagtcccggcgcctttaaagtcgccttccagaaaattcactccccagccacctcccgagcctcgggttgggcaagcggccgccgtcttccccgccccgacgcctctcgcggttttccattggctttggctcccctggggtactccttcacatacggcgggcctccgccatgttgggaaggtcacgtcggctgcgtcaccgccccgccccgccccgcccctcccctcccgcgctgccgctgtgcccatcacttccggtcgcgccagccgcccgttgccagttctgcgcgtgtgagtctctttcgccttgctccgggctttcttcgctcgcagcgcggcagggttatcaccagatctgggctttccccttcttgccgtcaggtgctacggccacgtggcccgcggcttcccgctcgcgcagtctggcagcccggagccttccgcggtcccccgc

SEQ ID NO: 19102 - DNA, 2300 bp, Homo sapien
ttaaaaccaaatgaaatactgcaaagtgaaagtgctttgaaaaaccgaagacaggcagggcatggtggctcactcctgcaatcccagcacttaggcaggcgggaggatcacttgaatccgggagttggaggttgcagtgagctgtgatcgcgccactgcgctccagcctgggcgccagagcgagacagtgtctcaaaaaaaagaaaagaaaaagaattattattgagagttttgttgtagctgtgagcttagaggaagaagcgaggtccaacccaagaaacactttgggcaccaaataaaactggaaaccctgatcccaaaactcacacaaaagtgagagataaggatgaatcaagaaacccttggacaagatcaaaagaagcattagaggtcagtcaagaatgtcactttcctggcaggaaagattcgatgtggagaaagccggcccggcgcagtggctcatgcctgtaatcctagcactttgggaggccgaggcaggaggatcacttaagcttacagttcgagaccagcctgaccaacatagtgaccagggtcacttcttggcagggtctccaaaattcttactgagagacatttaatgcaccgaagggcttcatatccgacgtttttgctccgggggtcaacctaaagcaggaagctgcgcagctgagcgtccgcacccccggtccctcaggaacccagccaagtcagccgacatccgctcctgacctcaggcgcctcctggcgggtgctgctgcacgcacctgcgggacgtggacctccaggacagccccgtcggcccccggacccggctcctccgagaatcgaaagcgctgggcccggaccccctgtcctcggaaatcgtgctcgcccagtagggcgtcgttgggccccgggcgggcgggggaccgcggaaggctccgggctgccagactgcgcgagcgggaagccgcgggccacgtggccgtagcacctgacggcaagaaggggaaagcccagatctggtgataaccctgccgcgctgcgagcgaagaaagcccggagcaaggcgaaagagactcacacgcgcagaactggcaacgggcggctggcgcgaccggaagtgatgggcacagcggcagcgcgggaggggaggggcggggcggggcggggcggtgacgcagccgacgtgaccttcccaacatggcggaggcccgccgtatgtgaaggagtaccccaggggagccaaagccaatggaaaaccgcgagaggcgtcggggcggggaagacggcggccgcttgcccaacccgaggctcgggaggtggctggggagtgaattttctggaaggcgactttaaaggcgccgggactgagcgaagggcgtttgggtactgccgtcgccgccgcccaggccggggaggggtgcgttagtgtcaggaagcgggctgcgccgaggtcgtagcggaaccagctggcgaccccgcagaatgaaccacaagagcaagaagcgcatccgcgaggccaagcggagtgcgcggccggagctcaaggactcgctggattggacccggcacaactactacgagagcttctcgctgagcccggcggccgtggcggtgagcgggtcgggcgggggtggccaggccgggcatcggcacctccagccgctacgcacctttctctgggcccgaggctgccctcgccccgagcgcccgggacctcgtagaggctcacccgcaccccgcggagtttggggtccccgaggcgcggattccggggcgggtctgcttcctcccgtgctgtggccgcccgtctgctctggcggacgacgggagtcccacgcctgtggcgctctcaactagaaggcccgtcgtccctgactcctttgggcggcgggtcccctaggggacctggctgtcaaggctcatggggggtggctctaggaacgacgtggcctcacgcacgcgccctgcccccaccccggaggagccagacgagagtcaacttccttcggtttgtcattaccagttggccttggggacacccttatctgccactggactttttttttttttttaactggacaggtcttttttaattccctcaggataacgtggaaagggcagatgctttacagctgtctgtggaagaatttgtggagcggtatgaaagaccttacaagcccgtggttttgttgaatgcgcaagagggctggtctgcgcaggagaaatggactctggagcgcctaaaaaggaaatatcggaaccagaagttcaagtgtggtgaggataacgatggctactcagtgaagatgaagatg

SEQ ID NO: 19103 - DNA, 2300 bp, Homo sapien
gtatttaaacgtgaagccagccgggagcggtggcttacacctgtaatcccagcactttggtaggccgaggcaggtgcatcacctgaggtcaggagttcaagatcagcttggccaacatggcaaaaccccgtctctactaaaaatacaaaaattagccaggcatggtggtgggcgcctataatcccagctacttgggaggctgaggcaggagaatcacttgaacccacgaggcggaggttgcagtgagctgagattgtgccactgcactcgtctgggtgacagagcgagactccatctccaaaaaaaaaaaaaaaaatccgtgaagccagattgggtgtggtggccaatgcctgtagtctcagttacttgaaaggctgaggtgggaggatcacttgagcccagaggttgaggttgcagttagcaaaaaaaagtgaagctgtttggaaacaatcagaaatagcctccactccagtctttttttttttttttcttcttgacaatgtcttgctctgttgctcatgcctgagtgcagtggcctgatcatagctcacagcagcctcgacctctcgggctcaagcaatcctcccacctcaccctccggagtagctggggctacaggcacaagccacgatgcctaatttttctactttttgtagagacgtagtatcactatattgcccaggctggtctggaactcctggtcccaagcgatcctcccgcctccgcctcccatttaacttctctaaagctgtttctttagcatgggacatgcctcacaggctggtgttaaaaccaaatgaaatactgcaaagtgaaagtgctttgaaaaaccgaagacaggcagggcatggtggctcactcctgcaatcccagcacttaggcaggcgggaggatcacttgaatccgggagttggaggttgcagtgagctgtgatcgcgccactgcgctccagcctgggcgccagagcgagacagtgtctcaaaaaaaagaaaagaaaaagaattattattgagagttttgttgtagctgtgagcttagaggaagaagcgaggtccaacccaagaaacactttgggcaccaaataaaactggaaaccctgatcccaaaactcacacaaaagtgagagataaggatgaatcaagaaacccttggacaagatcaaaagaagcattagaggtcagtcaagaatgtcactttcctggcaggaaagattcgatgtggagaaagccggcccggcgcagtggctcatgcctgtaatcctagcactttgggaggccgaggcaggaggatcacttaagcttacagttcgagaccagcctgaccaacatagtgaccagggtcacttcttggcagggtctccaaaattcttactgagagacatttaatgcaccgaagggcttcatatccgacgtttttgctccgggggtcaacctaaagcaggaagctgcgcagctgagcgtccgcacccccggtccctcaggaacccagccaagtcagccgacatccgctcctgacctcaggcgcctcctggcgggtgctgctgcacgcacctgcgggacgtggacctccaggacagccccgtcggcccccggacccggctcctccgagaatcgaaagcgctgggcccggaccccctgtcctcggaaatcgtgctcgcccagtagggcgtcgttgggccccgggcgggcgggggaccgcggaaggctccgggctgccagactgcgcgagcgggaagccgcgggccacgtggccgtagcacctgacggcaagaaggggaaagcccagatctggtgataaccctgccgcgctgcgagcgaagaaagcccggagcaaggcgaaagagactcacacgcgcagaactggcaacgggcggctggcgcgaccggaagtgatgggcacagcggcagcgcgggaggggaggggcggggcggggcggggcggtgacgcagccgacgtgaccttcccaacatggcggaggcccgccgtatgtgaaggagtaccccaggggagccaaagccaatggaaaaccgcgagaggcgtcggggcggggaagacggcggccgcttgcccaacccgaggctcgggaggtggctggggagtgaattttctggaaggcgactttaaaggcgccgggactgagcgaagggcgtttgggtactgccgtcgccgccgcccaggccggggaggggtgcgttagtgtcaggaagcgggctgcgccgaggtcgtagcggaaccagctggcgaccccgcagaatgaaccacaagagcaagaagcgcatccgcgaggccaagcggagtgc

SEQ ID NO: 19104 - DNA, 2300 bp, Homo sapien
agcttgagaatgcagtgggtctgaagatggtcaagtctgtttgccttagattttgatgtcacctagacaacacttaaactcatatgaaacaaaaattaaaatacgtattacaagtacttggattgttccttagtcattaaataggatataaattaggttgagaagggggtatcacaacctcaagaaaagtgccacttaaagcattgcttttaggtgttcaactggcatttccactttaacttaggaaatgataggcactaaacattccacttccatactatgcagtcagccacaatcacaaaattgaataggtccttcaaataaatgggggaaaaaaagaccgagacatattctgagaaaagctaacaccaagaaaatgttttaattaaactacagaaacaatggttataatacagaatattcataagcaaaaagatacaccatgttataagtacttacaaagttacaaccatttgcttccttaacattttccatgttaagttcatacatgtagatatgatcagatttaccatttttagggggaagagggaaaaaaaggtgtatttatcatcagctagatgtgctcactgtatgctccgttatttatatgcaaggcccgggtgactggaagtgcagttgtcaggcattttaataaactggacagccatttgtttctgcacgacaaggcatctttacacaggagcaatcgggagaaaacaggaaacagccaagcactctgcactgcaacacgccaccttaacagctaaccagcattactcaactgctacacaactgcgcctagtgcacaaaaatacataagagaagagattagaattgtgtttgataaacaatcctttcaaaaaatcaagtcttttcacctgaaaagtctttatacaaatttgggttcagattaccatttagatctgaaggtaaataacatatacaaatttacaccaacttttgtaggtttttaattttaaggaatgaaggcaatgctgagtcaatctcttgacagctttaggctgtgtgtaatggctgcacacgttttccttaaaagtcaggaggccacaaattaggttaccaatctgtttaatttcaaacaaaaaaagtcagcactatataacaaaatgaaattttacctcaaatatccaaatccaataatgaaatctgaagtcgttcacctcactaaattacaagaaatttgaataacagcaacaaaatggcacataaaatgaagtttgccaactgaggcaaagcttaaacaagtaaaaagttagacaaatgttacaaaataaccttttcaatagccagttgcttgttccaaggactcttcttcgatggactatgtggtcctttttccccaagtcctccgtttacactgcttgccgatacatctaggtttgaaaagaaagaagttcagcttaccttccattaaagtgcacatggtttcagtttcaggcacgtacttactaaggctctggtcaaaccagtagggtacagaaatgttccacccagccatgtttttaaaaggcccaattaggaaaatttcacaaaggctaccatcagcatgtacaagtttgaatttacgtattcctggccaaataaccaaggtgaagaaaggtaaggggaagaaaaaaaaagaaaaaaaaaagggctgtatccaaacaaaaacaactcgagatcagagaattggtctatatttcattaagataaattgtttcaaatgaaacatttggtaattgagaatactactttaatatctgagctacttagggccctttcctttttaaaaaataggaccaaacaatttaagagttaaagacacactatcctttccccacccagtgcaatacctgtaactttcttttggggttccaaatgttcactgcttcttattgcaattcttttgccacatccattagaatatgaagtcccagtcagtacaacaatagttgaactgattgtttctctaagaggatagtgcatctttaacatttaaagacaaacctgctccaatacacgcccacagaaactggtccctggaggatcagccaaatcagttaaaatctgcaatactggccaatattcttttatcaaacaggagaccgcagctttaaagggggaaaatgcagacgttggataaaaacagcaagaaatagtcattttcattaataggtctcaaacagtttacgaaacagccattattatctaagcttcatacacatcctttctgcagacccctctcttcagtattactcccaaaggtgagtaacctccgagcagcactcctaatgatagga

SEQ ID NO: 19105 - DNA, 2300 bp, Homo sapien
cccacccagtgcaatacctgtaactttcttttggggttccaaatgttcactgcttcttattgcaattcttttgccacatccattagaatatgaagtcccagtcagtacaacaatagttgaactgattgtttctctaagaggatagtgcatctttaacatttaaagacaaacctgctccaatacacgcccacagaaactggtccctggaggatcagccaaatcagttaaaatctgcaatactggccaatattcttttatcaaacaggagaccgcagctttaaagggggaaaatgcagacgttggataaaaacagcaagaaatagtcattttcattaataggtctcaaacagtttacgaaacagccattattatctaagcttcatacacatcctttctgcagacccctctcttcagtattactcccaaaggtgagtaacctccgagcagcactcctaatgataggagtcattcttacattaacacgactcaaaaagacctaccccaaatcccatttatgaattagggttatgtgtctcggattcccagacattaccattttcttaagaggacaccgctccttcctcttcaggagacttggggggactcttcgatcgcgacctggatttggattccctcttggacactgggggaggactcctggaccgagaccgggacctggaccgcgaacgagatctggagaccgacgaggacttggacttggaccttcgtgcggatctggacttggaggtcgaccgagatcgagaacgagtgcgggaccgagacttcgagcggctgtagcgagatcggctgcgagacctggaacgactccgactccgggatcggctgcggcgacgccgcctagggctgcgggcgggacgagcaagcacagcggggttaattccaggcagcggggccggccccgcccgcgcgctcccgcccaggccgccattatctcgccgccagacgccatttccccagtcgcgaggcggggtcctccgccccgcgccgcccacaccccggccactcccgggtcgcagacggcggaagctcgcggggtggccggagggtcgcgagacgcggcgtgcacccccgccccgtccgggcccgcaccacgtgcttcgccgcggacctttgtgaggtcgcccgggcctcccgcgcgccccgccccgcctcccgcggtcccctcagccccgtttacctgcggctccggcgtccgtagccaccgcccccgtacctgcggggtggcggtccccggcggctgtggtgtgagtccggggggcggccgtagcgcgccatttgcacccgcagctcgcggccgtccagcacggccccgtccatggcatccatagcgtcctcagcgtcgcgcttgtcgtgaaagcgaacgaaggcgaagccgcgggactccttggtgtagcggtcccgcgggatgtacacgtcgccgacgcgcccgtacttctcgaagacgcgcctcagcgtgtcgggcgaggtgcggtaggtcaggttgtccaccttgagggaggtcataccctccacatcgggaggggggcggccgtagctcatagctctgagtggcggcccggagccccgcgaactggcgccggcttcctcagctctgggcggtgcgacgccgcgcctctcaggcagttgccttccgcgtggggacactgggaaaggccttgccgcagaacagcacggacgggctccgcaggctagcgcacctgagtaacaactgggcgggcagccggcctctgcgcccgtttatatcgctcctcacaaaatggcgcccgcgccacccggaaatgaaaccttctgattggcccaccgcgccccgcttcgtaacgaccctgccgcgcgccccgcccctacccgaagcgcctgcgcacagcccggcgggcgggccaaaaagcgcggagtcacggctggagggagggggagcggaattagcgggcagttggaaagcccgcgaaacgctttttccgcctgggaggccggacgatcgcgattgggcaggaggaagaggaggtgctccccatctgggcccccacctttttttcatgccaatactccaagttcacgccccttttttgctcagccgtcagccccgtctccgtctgaagagtgcttctgccctcatttgcctctccctgtgaccccggccccctcagactccgctgcgtcgtctctcggccccgtccagccgttcctgactgctcttcgccggagtccgcttcccaaccccctttcgccagagcccgagagctccgtcggctctgcgtcctggcggtggggactccccgcgg

SEQ ID NO: 19106 - DNA, 2300 bp, Homo sapien
cgagaccgggacctggaccgcgaacgagatctggagaccgacgaggacttggacttggaccttcgtgcggatctggacttggaggtcgaccgagatcgagaacgagtgcgggaccgagacttcgagcggctgtagcgagatcggctgcgagacctggaacgactccgactccgggatcggctgcggcgacgccgcctagggctgcgggcgggacgagcaagcacagcggggttaattccaggcagcggggccggccccgcccgcgcgctcccgcccaggccgccattatctcgccgccagacgccatttccccagtcgcgaggcggggtcctccgccccgcgccgcccacaccccggccactcccgggtcgcagacggcggaagctcgcggggtggccggagggtcgcgagacgcggcgtgcacccccgccccgtccgggcccgcaccacgtgcttcgccgcggacctttgtgaggtcgcccgggcctcccgcgcgccccgccccgcctcccgcggtcccctcagccccgtttacctgcggctccggcgtccgtagccaccgcccccgtacctgcggggtggcggtccccggcggctgtggtgtgagtccggggggcggccgtagcgcgccatttgcacccgcagctcgcggccgtccagcacggccccgtccatggcatccatagcgtcctcagcgtcgcgcttgtcgtgaaagcgaacgaaggcgaagccgcgggactccttggtgtagcggtcccgcgggatgtacacgtcgccgacgcgcccgtacttctcgaagacgcgcctcagcgtgtcgggcgaggtgcggtaggtcaggttgtccaccttgagggaggtcataccctccacatcgggaggggggcggccgtagctcatagctctgagtggcggcccggagccccgcgaactggcgccggcttcctcagctctgggcggtgcgacgccgcgcctctcaggcagttgccttccgcgtggggacactgggaaaggccttgccgcagaacagcacggacgggctccgcaggctagcgcacctgagtaacaactgggcgggcagccggcctctgcgcccgtttatatcgctcctcacaaaatggcgcccgcgccacccggaaatgaaaccttctgattggcccaccgcgccccgcttcgtaacgaccctgccgcgcgccccgcccctacccgaagcgcctgcgcacagcccggcgggcgggccaaaaagcgcggagtcacggctggagggagggggagcggaattagcgggcagttggaaagcccgcgaaacgctttttccgcctgggaggccggacgatcgcgattgggcaggaggaagaggaggtgctccccatctgggcccccacctttttttcatgccaatactccaagttcacgccccttttttgctcagccgtcagccccgtctccgtctgaagagtgcttctgccctcatttgcctctccctgtgaccccggccccctcagactccgctgcgtcgtctctcggccccgtccagccgttcctgactgctcttcgccggagtccgcttcccaaccccctttcgccagagcccgagagctccgtcggctctgcgtcctggcggtggggactccccgcggagcgcttgcgcgtgccaggccacccgggactacgtttcccagcgggccgagcggccggcgccgcggctgcggtcaggtgacccggtcgcctggccgcagtgagtcaggctgggagggcggggccgcgccggctgctgcggctggcacttggccctttaatccccttcgtgggcccctcaacctggagcggataaattcttggcgcttctccgggggttgtgctcttccgtactcggatcgcttcttaggagtatcctaactgccggtggggagaacttcgccctaaacctggggttccgatccaggaactggaagttgacagcttggctgcctggctcctgcatctgccttctccactcaccatctcatttctttctccaggattgtcagtggcttcgccccgaggagagctgactgccctgggctgctgcctccggcagagctgagccaaaatgtccccggaatctaaaaagcttttcaacatcattattttaggagttgcctttatgtttatgttcactgcctttcaaacttgtggaaatgtggcggtgagttggaatctgtcctccctcctttgaagtgcccatcataatgcagtccagaaatgaaaataaacgttcattatatctaatagcgcgctttaattgcatctttcatttttcc

SEQ ID NO: 19107 - DNA, 2300 bp, Homo sapien
ttacccatctgtaaaattgggactaatcaccttaacaaaaatctaaaagctcctgacatacgtatattaatcgtcatgaattacaaaaacagaaggaccaaatgtttcaagaatcacaacatcttctataggactgggaattctaatcatgacaatactagagtgcttattcaatgccatgcactgtgccaagtgctttacatgcattgtctgaactaggaaattaggctcacggaaacacttacctaagataacaatgcaataaataccttgtagagtcaggatttcaaacctagtgcctaattccacaggaaacctaaactcatcagctttattctattatgttctctcagtctaggcactgagaagagaaaatgccatcaccacttattcaatcacaatattctattgctggtgattctgatgagatttaagcaactactgtcaaatataaagcaaaatcaatcatacggtacaatacctggtatatccactgccgtgaaaatctgtcctatttaagctcctgatgacagtttgctgtgtggaagataaaactaatcaacgaaaatgttttgcagtctccctcccacccttgggaagtgtgactccaagtactcagcaagagaataaagtaaaagttcataatgtacttaatactgaagtccattatgagaaaagaaaaaggacaacagaactgcagaaggcaaaccaatgacagggaggggggaggaaaagcagctgtaaccatccaagtactaaggaagcgcttaatacagacgagaaacaaaataaccaggttaacatccaaacccctaatcaaatcagattaaacgataatgcttaacgcccccatgagaaatgtctgacacaagaaatcaaacctaatcataaaaaatgaggaagtctgggtgggaaaaatgaaagatgcaattaaagcgcgctattagatataatgaacgtttattttcatttctggactgcattatgatgggcacttcaaaggagggaggacagattccaactcaccgccacatttccacaagtttgaaaggcagtgaacataaacataaaggcaactcctaaaataatgatgttgaaaagctttttagattccggggacattttggctcagctctgccggaggcagcagcccagggcagtcagctctcctcggggcgaagccactgacaatcctggagaaagaaatgagatggtgagtggagaaggcagatgcaggagccaggcagccaagctgtcaacttccagttcctggatcggaaccccaggtttagggcgaagttctccccaccggcagttaggatactcctaagaagcgatccgagtacggaagagcacaacccccggagaagcgccaagaatttatccgctccaggttgaggggcccacgaaggggattaaagggccaagtgccagccgcagcagccggcgcggccccgccctcccagcctgactcactgcggccaggcgaccgggtcacctgaccgcagccgcggcgccggccgctcggcccgctgggaaacgtagtcccgggtggcctggcacgcgcaagcgctccgcggggagtccccaccgccaggacgcagagccgacggagctctcgggctctggcgaaagggggttgggaagcggactccggcgaagagcagtcaggaacggctggacggggccgagagacgacgcagcggagtctgagggggccggggtcacagggagaggcaaatgagggcagaagcactcttcagacggagacggggctgacggctgagcaaaaaaggggcgtgaacttggagtattggcatgaaaaaaaggtgggggcccagatggggagcacctcctcttcctcctgcccaatcgcgatcgtccggcctcccaggcggaaaaagcgtttcgcgggctttccaactgcccgctaattccgctccccctccctccagccgtgactccgcgctttttggcccgcccgccgggctgtgcgcaggcgcttcgggtaggggcggggcgcgcggcagggtcgttacgaagcggggcgcggtgggccaatcagaaggtttcatttccgggtggcgcgggcgccattttgtgaggagcgatataaacgggcgcagaggccggctgcccgcccagttgttactcaggtgcgctagcctgcggagcccgtccgtgctgttctgcggcaaggcctttcccagtgtccccacgcggaaggcaactgcctgagaggcgcggcgtcgcaccgcccagagctgaggaagccggcgccagttcgcggggctccgggc

SEQ ID NO: 19108 - DNA, 2300 bp, Homo sapien
cagatcacgaggtcaggagttcgagaccagcctgaccaacatggtggaaactcatctctactaaaaatacaaaaaattagccagctgtggtggcaggcgcctgtagtcccaactacttgggaggctgaggcaggagaattgctggaacccaggaggtggaagttgcagtgagctgagatcgcaccactgtactccagcatgggcgacagagcgagactcttcctcaattaaaaaagaaaaaagaaaaaagaaaagaaagtaaagaaacaaaagaatggctactccatagacagagtagccctgaggactgttggtttattttaaggttgttttttgatcagttgctaagcaagggatggattttttaagagttttctggaaaaggagcgagcaagccccagaactgagggttcctccctttttaagcaatatagggatatagggtaacttctgggcattgccacggcatttgtaaactgtcacggctctagtgggagtgtctattagtatgctaatatgttatacttagcatataatgaggttgaggatgactaaagttccctttagtcgctgtgttggttttggtgggtttgggctggctctttttcttttacagcatcctgttgtatttattatcagggtctttatgacctgtatcttgtgataccagtcctgaggacctcctgtctcatcctgtgactaagaatgcctgacatcctgggaatgcggggcagcaggtctcagccccattttacccagcccctatttaagttggagttgccccagttcaaatgcctctgacactacccccacttacttcagatgccagtcctaaatccaggccgtccatacttcttactgaccagctgtaaagggaggggagttcctataatccccagctcatatttgataatttgctagaatggcttgcagaactcaggaaaacatttttttttttgaaacagggtctcactttgttgcccaggctggagtgcagtggtgctatcatagttcactgcagcctcaaactcctgggctcacgtgatcctcccacctcagcctcccgagtagctggaaccacaggtgcgcaccaccacgcccggttaatgttttaaataaatttatgtagagatggggtctcactatgttgctcaagctggtcttgaactcccacgctcaagcaatcctcccacctcagcctcccaaagtgctgggattacacgtcggagccaccatgcctggcccaggaaaacaatttacttaaaattgccagtttattgtagaggatacaactcaagaagagccaaatggaagagatgtgtaaggtgagcttggggtggggatgcaaagcctctatgccccgtccagggatgccaccctcccagcaccccatgtattcaccaacctcgaagctcatcacgtctccagatttgagagattttatgcagcttaatggcagcctcctccctgccctttcaggagatcagtgggtgggatgaaacgcccaaccttctaatcacttggtctttctggtgaccagtcatttgtgagactatatggggaccccaccctttgtcacctcagtacatgtgttatcagagaggctcataacaaccaaagacactcctgtctttcaggaaattccaaggcttgtaggagttctgtgccactgaggacaaagaccaaatatatttcttattatatcacatctagtaaaggtctgagcctcaaggtgactctcgggaagtggttagcaaccagtgagctgttgctctattatgatttagaaaataaggaaatgaggcagggcatggtggctcatgcctgtaatcccaacactttgggaggctgaggcaggaggatcacctgaggtcaggagttcgagaccagcctgaccaacgtggcaaagccccgtctctacgaaaaatacaaaattagccaggcatggtggcacatgcctgtaatcccagctactcgggaggctgaggcgggagaattgcttgaacccaggaggcggaggttgcagtgagccaagatcgcaccagtgtactccagcctaggcaacaagagtgaaactccatctcaaaaaaaaaaaaaaaaaaagaaaatatggaaatgcaatagattcagaatcataagatgtagacacagaaggaatcttggagaacatttaaaacttagggaactcttgagacaaaatctcactctgtcacccaggctggagtgcattgtcacgatcttggctcactgtaacccctgcctcccagttcaagcaactctcgtgcctcagcctcccaagt

SEQ ID NO: 19109 - DNA, 2300 bp, Homo sapien
cccggggttcaagtgattctcccgcctcagcctcctgaatagctgggatacaggtgcatgtcaccacgcctggctaatttttgtatttttagtagagacagggtttcaccatgttggccaggctggtctcgaactcctgacctgaggtgatccacccgcctcggcctcccaaagtgctgggattacaggtgtgagccactgcccctggccgaattgtatatttttaaatggttaattttatgttatgtgaatttctccttgatttttttttttaaacaagaaatagagtatgctctggtaaggttcagctcggggaagttccctgtccataattaccgtgagctctagagggactggagttctaggtgccctggccaagcgcacactggggctccatgtctccactcattgacctggttggtccctggctttcccaggttccagacatcaaagggggtacgtcaacagtgcgcaccatcatgccaattaaatgccgtgatgcaccatatatacgcctaaccagcaatcaaccaaaatagcacttaggggcaaactcccacccgtgtcttacaaataactgcagttgtagaatgtacaaggaaatgacagagtctgccattaacctcaggcctgcagcatctccagactgcgctgctcacagatggcttgcactgagggaagcatcagtgtcacccggggagccaactgcaagcccatctacttcgggtccctccaggcagtgtctgctttctctaagaaacaggaatgaagaatattcttatctctacccattaggcctgaggacgactctggacttggttgataaaacaaccaaattagaaggagaagcggggcctcagcacccggaggacagatcttggtggctgtcaagcctttggttttagctgaggaggaagagagaaggcgccagagccttggggctcccctgtgagatattaatcctgaaagctatatgtgcaggccccgctgagtgccccacagtcctcaccgtggcccgaggggggagatacttttttttttttgagatggagttttgctctgtcacccaaactggagtgcaatggcgcgatctcggctcactgcaacctccgcctcccaggttcaagaaattctcctgcctcagccaggcttacaggcatccgccaccacgcccagctaatttttgtatttttagtagagattgagtttctccatgttggtcagcctggtcttgaactcctgacctcaggtgatctgcccacctcggcctcttaaagtgctgggattataggtgtgagccaccgcgcccggctggaggatgtgatcttatgacatcattcatttacttatttagagacagagtcttgctccatcacccaggctggagtgcagtggcacaatcatggctcactgcagtctcgaagtcctgcagtgagtctcaagtgatcctcccacctcagcctccctaggaactgggaccacaggtgcacgccaccacacctggctaatttttgtattttttattttgccatgttgcccagggtggtctcgaatgcctggattccagcgatcttcccaccttggccttccaaagtgctgagattccaagtgtgagcagctgagcccagccttatgatgtatgtcatctatatggttgaggaggccaagcccagccaggcaggagaggtgctccagcccaggcaatctgtaagcggcagtgctgagatgtgcacccagggctgtctgatccaaagtctgtgcttttacataagataatacgctggggaatcatttttttttttttttttttttgagacagagtcttgctctgttgcccaggctggagtgcagtggcgtgatctcagctcactgcaacctccccgctatgctggggagtcttagggttagctcagggctatggctgaaatgtttgccttctgcccctgccaagttcatatgttgaaacctcaactggtgtgacggtatttgaatatggggccttggggaggtaattaggtcaaaagggtggagcccgtgtagatggatgaaagcccctataaaaagacaagagagagcttgcttccgctccgctctccaccagtaaggatacaacaaggagaggccgcctacaagccaggaagacaatcgttcagtagccttcagatccgccaacaccttgatcctgggcttgcggctgccagacctgtgagaaagcgatgcccattgtttaagcccctggtctttgatctgttaccgcagcgcgagctgaccacgcactcagtgtgaggcgatgacctttt

SEQ ID NO: 19110 - DNA, 2300 bp, Homo sapien
ctgcagacaagaggccaaaaaaaggggacagacttcaaaagggacaggcagctggacaatctggcttgcaaaatgccactggctggcccagcatagtggctcatgcctgtaataccagcactttgggaggccgaggcaagcggatcacttgaggtcaggagtttgagagcagcctggccaacatggcgaaacctgtctctactaaaaatacaaaaattttgcatttttataggcatttattacaggtatcgtggcacgtgcctgtaatcccagctactcaagaggctgaggcagaagaatctcttgaacccaaaaggcggagtttgcagtgagccgagattgcgccactgtactccagcctgggaaacagagcgagactccatctcaaaaaaaaaaaaaaaaaaaaaaaaaagtcactggctgtcctctgcttgcttccctccctggcccaagccagccgtcaaatggcagagaggctttcccgctccaacttcaaagtccagatctaagggtgtgtggcccaggggaagaggggagtaccttcccctaccttctaaattctggcttctgtggagggtaggccacctccccagatgacccacaccagaggtggccatgccttctagggaaccccatctccaccactgaggaagaggcttcccctttggcctaaaatggcaaccagatataaatgccaccccctaagcctactcaatcagaagaacccccaatcagaagagagacacctaatcagaaggaccatttcattccttagtgtagatatggcttattgccaggatttgtggcagatgtaggcacccaggcatgagatgtgatttacaggcctggcagagacctctgccctccaacatctccttagccagcctgccacgatgcccaaatttccggccaccattcatcactcttctgcacaaaggcacggtcagcatgtccttgttcaatgcaaatttgttacctagcctgtgtaacacattatatctgctaacaccaatttatcacccattttcacattagcagagagcaaggcagtgagataatggaactcagcaccggtaaattttgatgaagaaggagcagcaaagcagagagcgtgagtcatggccagtgagtaatggcccaggaagggggccgggaggtgggcagggcaggcagcaaggggcctgggtatgggggattggaggggaccaggcccagctggaggaaaataaagtctcctcctcgcataagccaggctgcagcatcgtggcctgagctgggaagaccctcagagtcatttgacacatgactgaggctttgggcacttcccagggtggggtggtcagatatgacctcgggaagtgcttttgaagccggagagctttcttcaggctggctctgcgagctcccaggagtctctgtctctgcaactgcaaacacatctccagagccaggaagtacgaggagggggaggggaggacgcctagatgctaagagacgacatgagatcctacatgctttagggttgcaagggaccttggtgagcttctggtcactatcatttcataatggagactctgagacgtgcacacttgatcgcccactggctagtggaggatctggggctacaactcagtacgcccctgcgcctggctctgtgagcgggccccagcaccacaggccgagtttatactcagatcagtaagcaaagaggagccacgggagtttctgaccagggaggggcagaagataggcatgtgttgccaagcgaaatcgtgggaagcggctgatgaggaagcccacggaggcacctggcagaagagaagggtctccgctgggtgcgcatctcttctgtgctctgcgggagccaaagcagctttcggccctcggggctggtggcgccctgggaagctgcttggctcaggggaaggagcagggacccccgcccgcccgtcctcgaagctggtcctcggcgtcccagccccgcacggccccgggcagggcgcacagcggggctgcggccacgaggtggcgccggcgcgccttggaagcgcagctgcagctcccgggccgccccagcgccgctcggccgcctcctccgaggaacaatgcggcgcctccgggcgtagcgtcgcgcggggccggacgccggacaccagagcgcgggcggcggagccagcgggcgagagagcgcgcggcgggcgcgggttgccctcgtcgagagccatgggcgcggcgcggcgcggggctgaggatcggcgcggcccggaggcgctggggaccggggcgcgggcccggggccg

SEQ ID NO: 19111 - DNA, 2300 bp, Homo sapien
agaagaatctcttgaacccaaaaggcggagtttgcagtgagccgagattgcgccactgtactccagcctgggaaacagagcgagactccatctcaaaaaaaaaaaaaaaaaaaaaaaaaagtcactggctgtcctctgcttgcttccctccctggcccaagccagccgtcaaatggcagagaggctttcccgctccaacttcaaagtccagatctaagggtgtgtggcccaggggaagaggggagtaccttcccctaccttctaaattctggcttctgtggagggtaggccacctccccagatgacccacaccagaggtggccatgccttctagggaaccccatctccaccactgaggaagaggcttcccctttggcctaaaatggcaaccagatataaatgccaccccctaagcctactcaatcagaagaacccccaatcagaagagagacacctaatcagaaggaccatttcattccttagtgtagatatggcttattgccaggatttgtggcagatgtaggcacccaggcatgagatgtgatttacaggcctggcagagacctctgccctccaacatctccttagccagcctgccacgatgcccaaatttccggccaccattcatcactcttctgcacaaaggcacggtcagcatgtccttgttcaatgcaaatttgttacctagcctgtgtaacacattatatctgctaacaccaatttatcacccattttcacattagcagagagcaaggcagtgagataatggaactcagcaccggtaaattttgatgaagaaggagcagcaaagcagagagcgtgagtcatggccagtgagtaatggcccaggaagggggccgggaggtgggcagggcaggcagcaaggggcctgggtatgggggattggaggggaccaggcccagctggaggaaaataaagtctcctcctcgcataagccaggctgcagcatcgtggcctgagctgggaagaccctcagagtcatttgacacatgactgaggctttgggcacttcccagggtggggtggtcagatatgacctcgggaagtgcttttgaagccggagagctttcttcaggctggctctgcgagctcccaggagtctctgtctctgcaactgcaaacacatctccagagccaggaagtacgaggagggggaggggaggacgcctagatgctaagagacgacatgagatcctacatgctttagggttgcaagggaccttggtgagcttctggtcactatcatttcataatggagactctgagacgtgcacacttgatcgcccactggctagtggaggatctggggctacaactcagtacgcccctgcgcctggctctgtgagcgggccccagcaccacaggccgagtttatactcagatcagtaagcaaagaggagccacgggagtttctgaccagggaggggcagaagataggcatgtgttgccaagcgaaatcgtgggaagcggctgatgaggaagcccacggaggcacctggcagaagagaagggtctccgctgggtgcgcatctcttctgtgctctgcgggagccaaagcagctttcggccctcggggctggtggcgccctgggaagctgcttggctcaggggaaggagcagggacccccgcccgcccgtcctcgaagctggtcctcggcgtcccagccccgcacggccccgggcagggcgcacagcggggctgcggccacgaggtggcgccggcgcgccttggaagcgcagctgcagctcccgggccgccccagcgccgctcggccgcctcctccgaggaacaatgcggcgcctccgggcgtagcgtcgcgcggggccggacgccggacaccagagcgcgggcggcggagccagcgggcgagagagcgcgcggcgggcgcgggttgccctcgtcgagagccatgggcgcggcgcggcgcggggctgaggatcggcgcggcccggaggcgctggggaccggggcgcgggcccggggccgcctttagccggcaccgagggcgcggggccggggatgagggcgcccgccgcggggagcccgtctgcgcgccgcggcaccttcccgcccagcgagcgagcccgagcaggcagacgcgcggccggcggtctgggggcgcgccgcctcccggtccccaaaatgtgaagcggggagggcggagacgcagagacggcccggccgggcgccctcgccgccctccggcagccgcgccgctccctccgctgcacgcccaggcctgagcagcgaggccaccgggccgcgcgctcccagcttc

SEQ ID NO: 19112 - DNA, 2300 bp, Homo sapien
agaccccagcaccacggacagtgctcgcgacccagggctgcttccctgtctggtcctgccctggttttctttcaggcccttatctgaaggcaggattgggggtggaggtgcatgggtccccaaagttgtgtaacttcaccccagggtctccctgggctgcccggagacccgcagccatcagtgagtcccttcagttgaggtggggggcaggctgcaatcatagcaccccagcttattcatcctcaaaggcaggctggggtcctgttccctgtggttttcccagggctgctggcagggtctttattccataggtgcccctggaatgttgcttgagtggatacatggatggctgaagccattttaacttgaatccactccaaatggcccccagctgccttgggggacattgaaccccaggatggggttctggcagagggagatgcagatgaggtgtgttagggggcttcaggttctgggctgaagggggtagacacctttctcatagcagggttgttggatcctggcaggcagcccaggtccccagctctaaatacaactccttcactcccctggcctcttctccagggactagagacatgagtgggggaagtccgtccttgtcctcagactgggaggacaaatagctgatttcccctgggatctccctgagcatgggacagcacctctcctgtgccatggccgtggctgttgtctccagagccacctgacttcctctgagggaccccaagatctgagccccacccccaggcttggtggaattccgtgaggcgtccctctgcgctaaggaaagtgtcccttgcgcggtcttgcctactgaatcatgtctcctgtccttcctgctgggggtgtggtcttcgagtctctccttggagctcccaagcccctctctgctttggggttctcctcttctctgcccaaatctctaacagcttcctttaaatatgggctgggaattttgttgtgctttttatttccttctgcaattatatgttttctttaatggaccaaattttaattaaatactgctctgccagtttcaaataatgaagattaaaatgcataaagcaagtcttgcataaagacacaaacaagcatggaacttgagggcggggagtggaggggcaaggcccggaggtctctggcatgacgtggggctctctccagggagcctgactccacacaagatggggttcctcaccctgatctggggttggtgggagggcgcccctctcagctctaccagttcatcaagtcctctgataggttcaagttcccagaagagccccaaggctgtgctggtgagctcagcttgcctgtttggggcctaggattgatgagggaagcagcaggaccctgggtctggacttgaggaaggaagggttctgtgccttgttccctgctgtccccctggggttaccccagagcctggctcctgctggataatcaataactacatgttgaaggcaggaacaggagtcctgttctgaccagccctccctcccacccagtgtgacagcacacacacctatatgacaccccttgcacaggtatgaggacaccctggccagtccgtggtgcaggctgatgaccctgggcgtgcctgcctaggggagatgtgtgttggggggagcctgggcatgggccgtgtggctctgccctggacatcttaccatctagtggtggaagtggaggggggtgttcaaacaagctcatgactgctgcagcaaggcctctgcacactgcaccaaggctggcctgagtgattgatggggtctggctggcctcaggccctgctgtgtccatcactggttctcaaactttagcatgcagtggaatcttcaggagactttgctaaaacagcttgcttgctccaccccagagtatctgattcagtaatttggggtctgggcccggcattggcatttctaaggagtctcaggtgatgctgactgctcgtctggggactgcactttcaggactgcagctgttaatgaaccagctctgcctggaggctagagcccgcctgcctcatgcctaagtgtgcgtcattctgccttgtggtttctcgtgtggctcgaggccagcatcttgtagttgagctctctttatcctatagtgggggggccctcctgggtctggagctcagcccccatcctttcattctcccttgcttccttcactcatgcactcattcgtaaaacatttgtgcagccggtacgtggtggagcgtcagggcacgatggcccttcctgccctcctgacccgcctccttcctctcc

SEQ ID NO: 19113 - DNA, 2300 bp, Homo sapien
gagctcatcaccacgggggcctctgcaagatggggtaggtcacatcccagagctgtcctgcccgaggagaaagaggctagggtaggtatcctcctcttcccatccatctgtggctgagggtggtgcctgggatgccagttcctgacacttttggcctgcacacagatgggctcggcaggccagagacagccttgaggtggagtcaccggtgacggagggtggggcgctgatggccctgctgcagggagaggttgtgtgaccttgtaatgctggatcctagcaaagcaccggcctagacagagtggggagggataaaaagctcccttgctagctctcaacgcagtgttgtcccctgtcctgggctggtggcttaagttctggcaaggccttgtagagcaaaagcaactagaggccaggagcaggggctcacacctgtaatccctgcactttgggaggccgaagcgggcggatcacttgaggccaggagtttgagagcagcctggccaacatggtgaaaccccatctctactaaaaatacaaaaagaaatttagacaggcgtggtggcacacgactgtgatccaccaagaggctgaggcaggagaatcgcttgaacctgggaggtggaggttacagtgagccgagatcatgccactgcactccagcctcggtgacagagcgagactccatctcaaaaaaattttaaaaagataaataggaacttggccccttggccacgccctaggaagagggccaggtatttgactggtaccagcttataggcttaaatggggctagaagtaccagtgccaggaaggaggccttaggtagggacctcagtgcataggaaagaagagtgaagggggttaactgattaatttcactgctggaaactgaccaaccccagccccctgcacggggaagctggcaacaaggcgtacaggtaggcaagggggctcctgtcaccccacagtctcctccagcttcttctcccacttctccacccacctccctctgctctcctccctctcccctccccttgcaaaccaatcctctaagacttctcctgcagaggggctcgggcaaggctggggagggggactacatagacttttccaatgtggggagcagcgtttggcccaacctccaagacacattgttaagctaaaagagcgagacactccaccttggggataacttgcccccccgggaggcccagaaagcggggtcgggggagggctgtgtgcatgaaggtgctgcgatagtcgcgggtatttctggtgggacacacaagaaattgataactgggggaaggactgactgtctgcggtgagaggaaacttccctttcattgctttcctgtttggtttttttttacatgaacatctgtttaattttgttaattagttaattaaaaaataacaattacaaaaggattaaggaagcaaggtattgcaaatctgaccagctgagatttgtgctgggccccaaaccaacggaggcccctctgccttcagacccctcccttctgtgggccccacccctccgcataacagctcaccccctcagctcacagcagctcaaaaacatttatgtgcccaagagtcacccggggggagggccttaaatgcagatcctcgagcctatcccgcaccttcccatttaataggacccagcttcgcgtgggaatctgcattttaaacaagaactctgggtaattctaatcttcccattttattatttttttaaaattttctttttatattatttgaatagagatggggtggggtggggggggggtctcattttgttgcccaggccagtctcgaactcctgggcacaagcaatcctcccgcctcggcctcccaaagagctgggattacaggcatgagccaccatgcccggcctaataattctattttagaaaacagatttagggacagctggtggaggctgagagcaaatgagggctgccatcatggggagtggcttgttctgcaagtcatgtggccttttacagggagagggagggaggagcggccaggatggggagaaagaggtgagaagaagaggtgagaagagggaggtctaagacacagcgagccggccccgggcctgacagccatggaaaaccagggcccggcaccccttctgtgtctctgcacctccctgggtttgcctgtggacatctctgtgtccagagcaaggccattcaaggtgatgccaacactggcttccgctgcacccctccctgctgtcattcccgcaggccagcagttcccaggcaggatcagcacctgtc

SEQ ID NO: 19114 - DNA, 2300 bp, Homo sapien
gattagggcgcacacctgtaattagacctaatgggggtaatttccaggccaggcaggctggctcctccggcaggagattcgtggcaggcggaacgtcgtcgtcgtcgttggccgtgagtgtttgcttcacacagggacctttgaattatcttgtgacaagggcttacagacacaggagcaagagtaactcagagatttgctgtcacggagccggggagcggcatttggaggggaaagctcttctctggggagttttatttataacctgagagtgaagccttgtccccgcaagacccccagaagtgtgtggggctcagaggctcccaggacttcgtcatgagtgtttagggaaccagctggggcagcaactggctgccagggtcttcttgggccatcggctcgggaatgagagcaggtcgggacagggctgtgcagagcacggggcttcaaggctgggctggggatgggacctgcagattctccgggacttcgaacttgccccagcgttgagaatacccacgcacagtgcagggggacgtcagtgctggggcaatgtccggcttcaaggacatcagtgactgccgcttccctgggacccttgagtgtcagggatgtccccttggccagaggccccaggacgagtctcctaagaagtggggtacacagaaggcaggaccgagcttggcgcagttggactttctagcaccacccaacgctgatgaggaagaaaggaggtggttgcaggcttgagtcaaacagttagatttcacccactggctaaagacgggaaagcggcctcattaggagatgggctgggccaggtcaggtgccaccaggcatggtggggtggggaggttgaagcctaaaacagacctttctctgagtccgggatggctccttcctgagtcctgactgctgcccctgccctttcaggtcagtgattttctccacggtggctctgcactgggcctgagaaggttaatggaacaggaaggggttggttggttaagaagtcggggggaggcaggagtacccccttactcctctgtcactcttccctccactcccctggtttcttttacccaagctactgcatgcatctgcccacaggacaggttgctgtgtgactattagatatttatttatttatttatttttgagacaaagtctcactctgttgcccaggctggagtgcaatggtgcagtctcagctcactgcaacctccacctcccaggttcaagtgattctcctgcctcagcctcccaagtagctgggattacaggcacctgccaccacgcctagctaattttttttgtattagtagagccgggtttcaccacgttggccaggctggtcttgaactcctgacctcaggcgatccgcccacctcggcctcccaaagtgctgggattacaggcatgagccaccgtgccgggctaactattagatatttagacagacaacctgtggcctctgtttgggggtttgtgcctgtgggggcagggtactttacaaatgtcatctcattcccgctgactgggagatgcccctgtgttcctctgcatgaatgtcccatgtcttgggcaggatacaggcagagctggggatgccttttcattccatgactatttcctgagcacccactgtatgccaggcactgtgccaggcactggagattcagtgtgaacaagccatagtccccaccctcaaggtgtccataagtttatgagagacatgacgaatacacaggagacaataacacaggggctcattctgtgctgggggaagtctggggtgctgggagtcaccaaggaaagtgttcctgtaacaggagtgggggtggggctcagggaaagctccctggagcaggtgatgcctaagagggtgggtgggctgtgggaagaggaggtgtcaaagcccagtaggggacacagcgctgagctttatcctcattgcagttgggacagggacctgggagggggtggggagggatgaggctgggccttgtgggtcctgagcctgagtcccggagggctactggagggtgtgcggggaacggggactctgagctgggtggaagggccaggtggatggggtggtcggctccctgggcatggcacaggatgtgagagcccaccagacctccacccccaatgccgagcatggcagggcccccgacggctgggccttctcccgccccatgtgtctgcccatccctcccacaggtagacccctacctaccctacgagtacacctgcgaggggatgctggagcggatccacgcctacatccagcacca

SEQ ID NO: 19115 - DNA, 2300 bp, Homo sapien
gactctatcctgcaggtcagacaggcagccccggagaagacctgctaggtgcacggctggcttgtttctaacatcacctgtggtcagcagcgccaccaagagccaccaccagggggcagaggtagggccatgtagtagacgcctgtagttttcgcctgtccaggacgccttcacccctgcttcctttgagaaaagtccctctcccactccaagtggtactgacggggatcacccacacaaaagaaacctggaggctcccctcctggggcacccggcttctgctccaaccaggtgagcccaatgcctgcctgaagccacttgcgttgtttacaaacctgtttactccagttaagctgattatacaattatatcctttcattcttatgtaaactcatgaaatatggtaaaacaaaacagaactgtagctcctccatcaaaacaaaaatgtaagttaaatatttccaagttaataaaactaacagtatgtattgttgaatgtgagtgagacaactcaaagacattgtgaaggaggtgcggtcataaaaatctcgctctgtcacccaagctggagtgcagtggcacggtctttattttattttattttattttattttttgagacggagtttctctgttgttgcccaggctagagtgcaatggcgcaatctcggctcaccgcaacctccacctgcctggttcaagcaattctcttgcctcagcctcccaagtagctgggattacaggcatgcaccaccacgcctggctaattttttgtaattttagtagagacggggtttctccatgtcggtcaggctggtctcaaactcccgaccacaggtgatctgcccgccttggcctcccaaagtgctggaattacagggtcgagccaccatgcctggcctcagtggtgcagtcttggctcactgcaccctccgcctcctgggttcaagcgattctcctgcctcagactcccaagtagctgggattacaagtgtgtgccaccacacctggctaattttgtatttttagtagagatggagtttcaccaggttggtcaggctggtttcgaactcccaacatcaagtgatccatctgcctcggcctcccaaagtgtacctggccttttttttttaatggttatttcttggtgatatgttaaacaaggggtggattattcatgcctcccctttttagaccatgtagggtaacttcctgacgttgccacggcatttgtaaactgtcatggcgctggtgggcgtgtaccagtgagggcaaccagaggtcactctcatagccatcttggttttggaggattttggccgtcttctttactgcagcctgtttgatcagcaaggtctttatgagctgtatgacctagcaatgcatccaagtaggtctcagctttattttacccagcccctattcaagatggagttgctctggttcaaacgcctctgagacaaggtccagcaattcttccttggttgtgggattagactcagagcaagattcctgttcgttgcttcctgtgcccacagacagtgaactgtcgggaatctaccaggtcttttggagcaataggcttttcagggggtatcccaataggccaggacggcctgcatcttcacgtagcccctctgctcttgagctttctccttcctgccacctggggtggtggaaagggcattgggtttggagcagaaatgacttaggtgtgaacccagctctgccacttcctggccggctgtgcttggaaaagtaaccaagcatctccggagcgccccacttctcatctacaagacaggagtggtctttgcacttaattcagagggttgcatgaggagtagagagataatgctttcacggctccaggaacccagcgggctttcaagaaatgggatgttccttctgattccctcgctccagggccctcccctctggcccaggctctagtccccattaatcacaccgcgcgggctgcgacccctttaagtccggcttggatgacccagatccaaagtcatcgactctctagctgctatctctatggtaagttatcacttccggccggaagttgctgacggagctacttccgcccaggggagtgggaagtaagtggagacacgtgctttggcctgttggaggggaaacccgctctcgcctcctggtggtcgccgactcgcagtccgcaggatgactcagggcagccctgaccacagttccgccgccatcggccctagcctgcggaattgggctcgccccgggacgataacagagctctgccgggggctggaggcactg

SEQ ID NO: 19116 - DNA, 2300 bp, Homo sapien
ataaagttttttgtgattggttgatgtctcaagtctgttttttcttcaaaatgtttaactgaagtataatatacatataaaagcttgcaaatcataaatgaatgtatggctcaacaaatttcccaatctcttttaatctatagattgaccattcccctctttttttcctttggaatttgataaagaatatatttgtcttgtaccgtttcccacagtctgtactttgccaattgtttttcatggtgtcatttagcatgttcctctattctgtatttcctgtaaactggtggttgcatctagaagttcagcaggtcaggtgaatttttttttttttttttttttttgacacggagtcttgctggagtccagcccaggctggagtgcagggcaggtggcgtgatcttgcctcactgcaacctctgcccaggttcaagtgattctcctgcctcagcctcccaagtagctgggattacaggcatctggcaccacacccggctactttttgtatttttagtggagacgaggtctcaccgtgttgaccaggatggtctcaaactcctgacctcaggtgatccacccacctaggtctcccagactgttgggattacaggcgtgagccaccgcaacggcgttaaagcgtcttttgaaggtggatgtgatttttttttttttttttgggacggagtctcgctctgtcgaccaggctggggtgcagtggcgcgatctcggctcactgcaagctctgcctccagggttcacgccattctcctgcctcagactcccaagtagctgggactacaggcgcccgccaccacgcccggctaatctgttgtatttttagtagagacagggatttcaccgtgttagccaggatggtctcgatctcctgacctcgtgatccgcccacctcggcctcccaaagtgctgagattacaggcgtgagccaccgcgcccggccggtggatgtgatttctacaaacaagcaaaagccagtcagactgaatgtagtgaataatgtaggtgacccagctggaagatgatggtttgacgtggaacacaaggggtgatgaggccatgaatgatttgcttgtgtgtctggtaaactggctttgatggaaattcctaaacaggtccaaaaacgttctgtccaatggcagcatgaaatgtacagccactcagggtgactaatgtgaacggaacaacagtgactttgacagtgaaattgcatgttggttataaaaccagctttgctgtgtgggtgggcatgcgaggtgcccctttctagtcatgagctcctcttaaggaccccaaaatgtctcagtggtaccggattgaaaattggggctggacggtgctctcctgctgaaattcgggagctacttagcagccccaccttggcaccctcgtttccgaggggcaggccctgggcgcgcgtctcagtttcaagcccgcggcccgacactagagccgtctggatgtgttgacaaggatgccgctgggctccacccgggctcacccgggccctcccgagccctgggccgcgcagcaccggcgtccgcctcctccccattactcggcgagaatgcggtcggggcactggcgcgagcagcctggtgctcctgaacagtcaacaagaaatgaggaagcacgggggcagccgccagggcgaccagaggcaggcctcagagcagcagccatacgggagggccccggtggttttgacctcccgcaaacttcccttttcccgctcagccgaacccctcccctgcacgccggcagccccttggggcttcactccgcctccgcccgctactcgcgaagcccagcccggccccgcccccaacaagtgacgcaaaactgggaggggccacgaggacctcgggcacatccagcagtgcgacggggccggcgccttctccgagctcctcccacgctcgcgggtcggagctcgcgcctgcgcagttcgggccccgggtgtcctcccccctcccctttcttagcaaccatcgcccgctcccgcccccgctccctcggccgcggccgcgcacgcgcgcccctcccggcgcccggccccgcccaccccgtcacccgtaacaaccacaagtgccgtcgccgcgccccttccccctcccgcctccccggccccctccccggaaccggcggtcgagctacggtcgcggagcagtggaaccgagactgccccgcggagccgccggtatgagcgcccctcgccaccccgtgtcccaggcccggcctttctgacaagaggtaggcgcgtcgtcgcggcgggtccgagtgcg

SEQ ID NO: 19117 - DNA, 2300 bp, Homo sapien
gacaacaccagaaggaagttcctcatttatgcaggaaatgactaccagggtcctggaggcctgctggattacatcgacaaagagattattccagatttcctgagtggggagtgcatggtatgtcctgaggcgaggaactgcacatttggccccttatgcaggtgggagaggtcggtgtcgatttgcacaaatgattttcagaacttccagttgtttggatgttttgtttttgttttgtttcttttggccgccatttctctgatccagggttaagctaaagagaaccattgaagtaattgttgatactgtacatttcttcattgttaaatacgaatgagaattcgtagaatcaaatacgattgcagcttgctttgattcacacggctttgtgtgaatcagatctttaaacaattttagaggagctgtcatattttctaaaatactgttaaaaaattgaatcagttctcaaaatttcccacccgcccctccccgtccttttttttatggagacagggtccggctctgtcacccaggctggagtgcagtggtgcgatcacagctcagcagcctgacttggtgggctcaggtgatcctcccacctcagccacccaagtagctgggactgtaggcgtgcaccaccatacccagcgaattttttgtagaggcagagtctcactattttgccccagactggatgacatttttggtttttttttttcttcttgagatggagtcttgctctgttgcacaggctggagtgcagtggtgcaatctcagctcactgcagcctccgcctcccagattcaagcgattcttcagtctcagcctctggagtaactgggattacaggcatgcgccactacccacagctaattgttttatttttagtagagatggggtttcaccatgtcagccaggctggtctcaaactcctgacctcaagtaatccgcccacctcggccttccaaagtgccgggattacaggcatgagccaccatgcctggcctggataacatttttaaagtaaaaaaacgaagggaagtggttctcaacatacgtttggggtttttaatatactgagttgctgggtaatgaagcagaggcctccacttctatatcctgtactcagagaagctcagaaccttggggtccttataggcttctagcccatggtgcacagttgtgtcttgggagcattacggaagccagagcctctagaagtcccagtgacttgttccatggcacacggcggtggctgaactcagcagggagtgaagctccttttcagaagggctctctagtcatccttcatatgaaaagttacccgtttggaatgtgtacccactgggtttgactcaggtatttagctaatgaattggacattcaggggactttggactttctgaatggttagagaaatttagaaaacaaatgaatttagctttcacttcatcagttccactttaaggaaattacaggcatcatcacagtacaatgcaaagagcaagtaagttacagtaaaggttataggaccagaatttagcaagcgcctatgaggttaaaccgcaggctcaggttcgtagaaacctctgaactcctttcatgatatgagctagccatcccgtgttgttgctgcttccaattatgacacgaagaattgagctggagcccaaggagacctgcctcaccgcgttgtgcctgtttgtcacatgccgacctccgtagtgtgtttgcggtgctgagcgtctttgtggttaattgaactgtccaaaaacttgggccttctaaggcttcttcacctctctcctgagctgctgttgaggctgattgttgaaaggaggttgttccctcctgctctctggtggccggaggttactaaccagcgggcagtctggtatttttccaccacgacatcactgctttgacacttatgctgtactgcaggctgaagactgaaatgtttattttctatgtagttgcttcccaaggctaatagaacgaggacttcgattttatgaactttagtgtggagtcattgtgtcaaggtcaattaggagatttatgttatgtacaagttctaattcaacttgtttcaggcaaattcaaaagaagttcttcattagtttttggctggtgttatagaccagtcatttgactttagacagaaaacattattcattgattctgtatcttcactataattccctatcataaaaataatgcctgtggctattgagagcaaaactcttttcttaaagtaatacttttcctttacagggcaatataaatacccctaatgc

SEQ ID NO: 19118 - DNA, 2300 bp, Homo sapien
tttttaaagtaaaaaaacgaagggaagtggttctcaacatacgtttggggtttttaatatactgagttgctgggtaatgaagcagaggcctccacttctatatcctgtactcagagaagctcagaaccttggggtccttataggcttctagcccatggtgcacagttgtgtcttgggagcattacggaagccagagcctctagaagtcccagtgacttgttccatggcacacggcggtggctgaactcagcagggagtgaagctccttttcagaagggctctctagtcatccttcatatgaaaagttacccgtttggaatgtgtacccactgggtttgactcaggtatttagctaatgaattggacattcaggggactttggactttctgaatggttagagaaatttagaaaacaaatgaatttagctttcacttcatcagttccactttaaggaaattacaggcatcatcacagtacaatgcaaagagcaagtaagttacagtaaaggttataggaccagaatttagcaagcgcctatgaggttaaaccgcaggctcaggttcgtagaaacctctgaactcctttcatgatatgagctagccatcccgtgttgttgctgcttccaattatgacacgaagaattgagctggagcccaaggagacctgcctcaccgcgttgtgcctgtttgtcacatgccgacctccgtagtgtgtttgcggtgctgagcgtctttgtggttaattgaactgtccaaaaacttgggccttctaaggcttcttcacctctctcctgagctgctgttgaggctgattgttgaaaggaggttgttccctcctgctctctggtggccggaggttactaaccagcgggcagtctggtatttttccaccacgacatcactgctttgacacttatgctgtactgcaggctgaagactgaaatgtttattttctatgtagttgcttcccaaggctaatagaacgaggacttcgattttatgaactttagtgtggagtcattgtgtcaaggtcaattaggagatttatgttatgtacaagttctaattcaacttgtttcaggcaaattcaaaagaagttcttcattagtttttggctggtgttatagaccagtcatttgactttagacagaaaacattattcattgattctgtatcttcactataattccctatcataaaaataatgcctgtggctattgagagcaaaactcttttcttaaagtaatacttttcctttacagggcaatataaatacccctaatgcttatatgagtcagctttagtaactgggtgcagtgcctcacgcattttagtaggaattctgtggtacatcagcttcaacttgttcccgtttatgcagagtaaaacacatgtatttaagtggtttttaaaaacatattgctcagtagtgcagagtgttttacgaccctgccagtgttttccattttctcagcaacctccagaagttgagtgcagggggatagtgctggccggtgtgtctgggtttcgtggggttggtttgtgtttgcacaggtttcactgctgtgtttcttcttccagtgcgaagtgccagagggtggactggtccccaaatctctgtaccggactgcagaggagctggagaacgaagacctgaagctctggactgagaccatctaccagtctgcaagcgtcttcaaaggagccccacatgaggtacgtcctccgccttcctgcacctgggccggcccttcctccgcagagggcctggccctcgcagggcttcctggcagcctttcattcagaacagtccactcgtttttctgctctttgtctttaggcttttgttgacactcgatatttagtttcagtaaatgtcaacgtcgaagaatgggtctctctcagaatagaaactagctgtgcttgatcagagtgcctggaaaggaaattggatctcttgacctccattttactaaagccaccaaacacagagataggaatagctaatctttccttgttggagcacttaactcctgaatttagtttatttcatggttatattgaacaagtttcatgtgctactttttctttttttttttctagacagagttttgctctgttgcccaggctggagtacactggcatgatctcaactcactgcaacctccgccttatgggttcaagcaattctcctgcctcagcctcccaagtagctgggattacaggcacccgccaccacgcctggctaatttttgtatttttagtaaaggtggggtttcaccatgttggccaggctggtc

SEQ ID NO: 19119 - DNA, 2300 bp, Homo sapien
cggcgtgatctccactccctgcaacctccgcctccggggttcaagggattctcctgtctccacctcccaagtagctgggattacaggcccccgacaccacgcctagctaatttttctattttttagtagagatggggtttcaccagttggccaggctagtcttgaattcctgatctcagctcttgtcattttatttggatttattctaagattatttgatcaacatctgttttccctatcaaaatataagcaccccatcctggggcccataatgagtaatcaagaaatatatgttgaggccgggcgtggtggctcatggctgtaatcccaacactttgggaggtcgaggtgggtggatcacttgaggtcaggagttcaagaccagcctggccaacatggtgaaaccccatctctattaaaaataccaaaaaatgagccgggtgtggtggcgggcgcctgtagtcccaggtactagggaggctgaggcatgagaattgcttgaacctgggagggggaggttgcagtgagccgagatggcgccactgcactccagcctgggtgatagagtgagattcttgtctcaaaaaaaaaaaaaaaaaaagaaaaagaaatatatgttgaatcagtaaatgaaaaagcaatgtaattaccaggacaaagcacatgggcatttggaaagctctggaggatatttccagagtgctttccggaagggtggtagcacggaacacttgcaccaggcatatgggagggtctgcgtagccacgccttcaccataaatttcacacatgtagcaaagcttcagtcatctaacaagtgcaagcccccgggccagccataaagtgagagtacagtcagcagcagacgctgagccaagcaggcagagagcagctgactgagtcaaagatgaaaaggtggccacagacctggcgtgtctgggcccctctggagccagaagacaggaaccatctccctggttgcctgttaaagccacgtctaatcattcaggcctggaagtctggggaagcggcagaggaaaggactggaaagaagttgacagaagaggctgagcatggtggctcacacctgtaatcccagcattttgggaggctgaggtgagcagatcacaaggtcaggagttcaagaccagcctggccaatatcgtgaaaccccctgtctactaaaaaaaaaacaaaaaacacaaaaattagctgggcgtggtggcacgcacctgtagtcccagctactcgggaggctgaggcagaagaattgcttgaacctgggaggcagaggttgcagtgagttgagatcatgccactgcactccagcctgggcgacagagtgagactctgtctcaaaaaaaaaaaaatgttgacagaagagaagaaaaggcaggcggaggtggcagagctcagagacagaggcaggtgtcagaggcagtggcgggctcaggaggtctcacatctgctgccagtgtgagaaggtctgctctggggaccgtctggggctcatcggctcacacttctggcactggggctgggaagatttgaagatcaggactgctgaccagggcacctacgtggggcttccccatggtgtgttgatcctaagatgactgcagtgatccttgtctcctggtactcacagcctctgtagctcctttctaagcaacagaatatacctctgtgcaacaatcaggttgcaagagattctcattttcctcttggcagcagactcccttccttattggctttgataggccgagtggctacgttgggaaggcccacacaggaggagcccatttctagctggctaagaactcaggtgctctgtctttgagccacctttttatttttatttacttttattttatttttgagatagggtcttgctctgtcactcaggctgaagtgcagtggtacaatcacagctcactgcagcctcaacctcctgggctgaagcaatcttcccacctccgcctcctgggtagctgggactacaggcatgcatcgctgtgcctggctaactttaaattttgtgtagagacagggtctcactacgttgcccaggctagtctcaaacttctgagctcaagctatcctcctgcctcagcctcccaaaatgctgggattacaggtgtgagccactatacctggcccttcaagacttaaagaaatgaaattctgcaccaggtatggtgcctcatgcctgtaatcccagcactttgggaggccgaggcaggcggatcacatgaggtcaggaatttgagagcaggctggccaacatgatgaaacccccta

SEQ ID NO: 19120 - DNA, 2300 bp, Homo sapien
tccctccctctctcttgtccttctttctgatttcttggaatcggaaggaaaattcggatatccaggaaccatcacacaggaggcacccatgtgatgtgtccaacatcactccacgcaggtgtccttgggtcctgggtgcccaggttcctgtgaattgtgaccccaggcagaagcgtgagcatccgcagaggaacccacctacccaaagccagggaacagccagggctggcatcctcagggtgactgtgctccagggcacctctgacttgtgctgagtaaaatggacaaagccagcaatgcacccataacccagattcttgagacaccgctggactttgggaatcccaggcattaggctcgtggcagtgtcatcatggctaggctgggggcagtgtcatcatggtgcttgctggccaagtcaggacacggcctaagccggaatctgctggtgctggtacaagcggtgagtgggcgtgtgggtgggggttgcggttagggtgtggacatcccagaatccaggacgctgttcacaattcgtccatactccctgctcccctcccttacagcacttccctcccgaggcctcctgagcctctaacccccagataaggaaaggggtggactcagttgaagtccagtgtccactccggtccaatcagctctacctggggtgaggggaaactcctctggctgggctgctccctctgcagggctgtggctggacagattactcaagaaaggaagcaggtgggccggaacgaacccacggtgccacataggcctccgttctcatgcatataagtttcccacactcaggcaggaaatgaaaatgcttcttggacccccaaggagagtaaaggagaggggaagaggaggaggatttttcggggctgttagtgacactttcagcctcctgtgcatttttgggagggctgcaggagaaggcaatgctgcgcccctacccagaactagcgagcgcttcccaactggcctcccgccttcctctcgtcctctacggcctccattggcagctgtgcaagggcccggccctgcctctgtctctccacactcgctgtgatacctcaggcctcccaggctccgccacgcccttccctctttcgggaacagctgccttccatcaccttggctgcctggctaattcctgctcattccttaaaaccctgttttgatttcgcctcaataaaactctgacaccaccctccagtcataattagtcacttcttcctctgtacgttggaaacaccgctttatcgtggagactttaaggatatccaagtagagagaattcttccgtgcaagttttgcatcctctcaccactgcctgcgttacccgagttgtaaagggcggctccctgtgtctgccccgctgcaccgatacaccgagctgcgcacggtgcccagcgcagggagaacaaatgatcatctgtccaacgcgcccatttacaggtgaggaaactaaggctccaactcaatcgacgcactctgcccttttgattaccagaaaagtagcaggacaggtgtcctgtcccgccctaccccggcccactaagccggcaccccggctccgacccccggctgtgcccggcgccgccgcggtgcccggcgccgccgcctcgcccggcggggccgcccggagcgcccgcacctccgcccgcttccacctggccgggcccgccccgcccggactcgggactgggaagtgcggcgactcccggaaccagccattggcgccagcgcggggagctgggggtgcagagctgcgggcgcggcgggccacgcaggcggcccccacccccggcctggcctggtctggtctggtctgcgctgccgcgcgggggcgccccctcccaggcccggcgcccgccagccccgctccgccaggtgcagcgcagcgcaggggtgggcgggggtggggctcggcgcgcacgttcacggggcggggagggggcgggtcaggggcgggaccacagccggctgggccggggttctatgcgcatctccggggaggggcggggcgggggcggggccggggcggggcccggtcggtgcactccagacggcgggccgccccctcttcccgccttcctactaccggcccaggattagcgccctgggagcgcgcgccccgctgcctcgccgccacactttcctgggagcggcggccacggaggcaccatgaagaagtcttactcaggtgggcttcgcgcccggggtggggaggggtcggtgtcccgggaccagcgctgctcacctgagtgcctgcggccgggagtggcgag

SEQ ID NO: 19121 - DNA, 2300 bp, Homo sapien
gcccaagctctgcctcctgtctgatcagccatggcattggattcttataggagagtgaaccgtattgtgaacggcacatgtgagggatctaggttgcgtgcttcttatgagaatctgatgcctgatgatctgtcaccgtctcccatcaccaccagatgggaccgtctggttgcaggaaaataagctcagggctccaactgattctacattatggtgagttgtataattatctcattatatattataataataatagaaataaagtgcacaatcaatacaacgtgcttgtggccgggtgcagtggctcacacctgtaatcccagagtgaaactctgtctcaaaaaataaaaaataaaggccaggcacagtggcttatgcctgtaatcccagcactttgggaggccaaggctggcggatcacgaggtcaggagttcaagatcagcctggccaatatggtgaaaccccgtttctactaaaaatacaaaaattagccggacacggtggcaggcgtctgtagtcccagcttcttgggaggctgaggcagaagaattgcttgaacccaggtggcggaggttgcagtgaactgagatagtgccactgtactccagcctgggtggcagagcgagactctgtctcaataaaataaaataaaataaaataataaatataatacacttgaatcatctcaaaaccatctccccactccctggtctgtggaaaaattgtcttccctgaaaccgatcccaggtgccaaaaaggttgggggccactgccttcatcgcctgcccctttgagcctctggtggctgtgggtgtcccttggcttgtggctgcatggcccttaccttcaacaccagcatctacagatctctccgggccccatctccacttggccatccctgtctgtgtcaaatctccctctgcccccgtcttgtatgagcaccgagactgcctttagggaccacctagaccatccagggtgctctcgccacagcaagatctgcaactgaatcacagatgcaaaaactcttgttccaaacaaggtcccatttgcaggtctagggattaggacatgctatccctggggccattattcagccttctctcgtgactatgatccctcccttcctccccagcctcccacctcggctgagatgctgtccccacctccctcactgtctggctgcctgtggggctgtcctccaggctctttgggaggaggtggttgcttgatgtctcccagaaggctgggaatggtcctccccaccccccaggaagatgtcctttctgccaaggagattgcatttggggtcctatcccaggcagagagcggacgggactgtggcctgaagtggcacttcagggcctttggctctgtcatctagccgagggctgtgcatgggcctcacctggtcacaggtaactcacctggctctgtggggcagggattgtaaactcagaggcctgcggggtgtgtcgaggtagaggggtgcaaatattgtaaatttgttgggggccttggggagcagcacagactgaaaagtgttttgtctgaagagcagaactgtcttataccagccctgtgcggccaggcaggaaggcttccgtggtgcggccacgcgtcctccctttctcaacagaagctgacagtctggagttttcagagagattgcctgagttctcagccttggcacaaacacacattctctttaaacaggcttgggccaacagaaccagcctccgtgtctcgggtttgaatgaacccttgaggtgaagcttaaagacagagaggatgcccctgattcccaccccagggacccacattgtaaacccccacctgctctgctgagcccttggcctcagcatggaccctgaccatgtgctggtggggaccccccaggtaagtaagcagcctctgaggaccccggatgaacagtggggaacagcactgatcccccagtggggccccgagttcccggagaggaagactcgctccctcccaggggacggctagagactcactgactcatgcgtgtgtggtaggaatcttccaggaagtccccgtcccgttcgccctctctgcctgggcggggacggcaactgcctctgtcactgcagactaatgggacggaggggggtgacttctcagggttcctcctgggcaggtgctccggaaccttttctcagcacgctggcctggggcacggccgttcctcctgcccagccacgttggggtacagggtgaagaagggctggggccagcccaggacagaggaaggcgaggcaggcacgcaggaactg

SEQ ID NO: 19122 - DNA, 2300 bp, Homo sapien
cttgaacccaggtggcggaggttgcagtgaactgagatagtgccactgtactccagcctgggtggcagagcgagactctgtctcaataaaataaaataaaataaaataataaatataatacacttgaatcatctcaaaaccatctccccactccctggtctgtggaaaaattgtcttccctgaaaccgatcccaggtgccaaaaaggttgggggccactgccttcatcgcctgcccctttgagcctctggtggctgtgggtgtcccttggcttgtggctgcatggcccttaccttcaacaccagcatctacagatctctccgggccccatctccacttggccatccctgtctgtgtcaaatctccctctgcccccgtcttgtatgagcaccgagactgcctttagggaccacctagaccatccagggtgctctcgccacagcaagatctgcaactgaatcacagatgcaaaaactcttgttccaaacaaggtcccatttgcaggtctagggattaggacatgctatccctggggccattattcagccttctctcgtgactatgatccctcccttcctccccagcctcccacctcggctgagatgctgtccccacctccctcactgtctggctgcctgtggggctgtcctccaggctctttgggaggaggtggttgcttgatgtctcccagaaggctgggaatggtcctccccaccccccaggaagatgtcctttctgccaaggagattgcatttggggtcctatcccaggcagagagcggacgggactgtggcctgaagtggcacttcagggcctttggctctgtcatctagccgagggctgtgcatgggcctcacctggtcacaggtaactcacctggctctgtggggcagggattgtaaactcagaggcctgcggggtgtgtcgaggtagaggggtgcaaatattgtaaatttgttgggggccttggggagcagcacagactgaaaagtgttttgtctgaagagcagaactgtcttataccagccctgtgcggccaggcaggaaggcttccgtggtgcggccacgcgtcctccctttctcaacagaagctgacagtctggagttttcagagagattgcctgagttctcagccttggcacaaacacacattctctttaaacaggcttgggccaacagaaccagcctccgtgtctcgggtttgaatgaacccttgaggtgaagcttaaagacagagaggatgcccctgattcccaccccagggacccacattgtaaacccccacctgctctgctgagcccttggcctcagcatggaccctgaccatgtgctggtggggaccccccaggtaagtaagcagcctctgaggaccccggatgaacagtggggaacagcactgatcccccagtggggccccgagttcccggagaggaagactcgctccctcccaggggacggctagagactcactgactcatgcgtgtgtggtaggaatcttccaggaagtccccgtcccgttcgccctctctgcctgggcggggacggcaactgcctctgtcactgcagactaatgggacggaggggggtgacttctcagggttcctcctgggcaggtgctccggaaccttttctcagcacgctggcctggggcacggccgttcctcctgcccagccacgttggggtacagggtgaagaagggctggggccagcccaggacagaggaaggcgaggcaggcacgcaggaactgggctttttaaacccttaagcccaaggaaatcgtagcatcgcgggacagggaaaatgaaagactttggaagtcgtcaggaatttgactctgtgagttggtttccaagagtctaagttaagcatctccaagtggatattaaaaaggagcagcaagcctcggggcggcgggggctggaggaggtggagagaggaggctgccggaagccgcactcgggacctctgcagccaccgaccagaccgggcggccgggactctgggactctcgcaggcagacccggtggtctgccggactcctcggggcccacttcgggccctctctcctgcctcctatttttggatttctctcctttgctccctttttcctcccgttttgaagagacaatgctacttcagtttggagcacaaacatatgatcagcacatggaaatgtggtaattcggatgcattcgtgattgcaacagattgaagaaattagaccagacaaagagtgtttttagaggaggaggaggaggaggaggaggctgagagagggagggcgacgggggtgagaaag

SEQ ID NO: 19123 - DNA, 2300 bp, Homo sapien
ctgggagtatggccaagccctgatttgggtttcctgaaagagctcggggaacctccttacctggaggtttctaggcctggtcatgtggctctgagtgattacattgaaggggcagtggctggggctggagccggtgggctctgagcacagtcacgaaggcatgcgcactttctggctgctctcctgccattgtcccttgggttcccattttggtgaggcgtgcaccctggcggcgctccccagggaactaaatatgtttgctgcactgtgcgtggagatggagaatgtacaattggctgaccctgtgctaatctggtggaactccatgccagccctgggaaagaacaattgcatgggtgtgtccacactcaccaggtgctttttagaaaaacactcgagaataatgctgtggcttaggatggctgttgtgccggacccggcatcttcccaggggggctgtgttgttgggctgagtttcttaggtactggacccccaaatccccaaatacggcgtggacaggtggcccagtaggggctggactatccgataggcccaggtgctggagttcagacaagacataccctggcctggcgtggaagatacggggtgctattaatggcagcaatggctgcatttctgaaacccgggctcccaggccgacgagggtgtgcacgcatctgaaatgtctgtggttttgcagttcccatgtccacaaactcacttggttgaaaatagttcaaaatatccaaagcatgagggagggagtgcctgcttttcttaaaaaggaaggacttgatttcatctacttaaaaagccacccaaacctagaacattttccgcaagagaccccctgccccccgcctctccagaatggctggagagtctcagcactcctgcacatttgggatatttcagagggggtggggaggggcaagtgggcagcgagcgacctcagacccaggatgagctgtcaggcgctccccggccacacattcaagggaccggagtgcagttgtagcgttgcggcctgctgcttcgggggtgggggtgttgttccatgctgtgaattctcacatggcccctgactctgggcagaggccgagggtctaagggacggggtgacagggagagcatgcaggagtgggtttctggctttccagggcgagtggaagaagcgcctctctctcttgtaggtgacagacctggggggcccttcttgaggatgagagcctgttgcttctcaagttctgtgtctaacccaggtccccaggtctaccccagcccctcggccctgcctgccttgtggatgatatagtttaagggtagagaccgctggcctggagggaaggctaggcctcaggttagggcccagaagggagggagaagcccttggggcagctccctttctgctcactcactgcctagctccttccttcacaccttccttcggaaacgtctgctcctgacaaggtctacttcctgctctcaggaggcccttattgtggaggaagggaggcgtcgcccgtccctggcttctctgacagccgtgttccatccccgccctgtgccccttctcccggacagtgccttctccagggctcacccaggagggtgcagcggtggcccccggggcggtggtcgtggtgggggtgttagctgcaggggtgccctcggtgggtgggagttggtggcctctcgctggtgccatgggactcgcatgttcgccctgcgcccctcggctcttgagcccacaggccgggatcctgcctgccagccgcgtgcgctgccgtttaacccttgcaggcgcagagcgcgcggcggcggtgacagagaactttgtttggctgcccaaatacagcctcctgcagaaggaccctgcgcccggggaaggggaggaatctcttcccctctgggcgcccgccctcctcgccatggcccggcctccacatccgcccacatctggccgcagcggggcgcccggggggaggggctgaggccgcgtctctcgccgtcccctgggcgcgggccaggcggggaggaggggggcgctccggtcgtgtgcccaggactgtcccccagcggccactcgggccccagccccccaggcctggccttgacaggcgggcggagcagccagtgcgagacagggaggccggtgcgggtgcgggaacctgatccgcccgggaggcgggggcggggcgggggcgcagcgcgcggggaggggccggcgcccgccttcctcccccattcattcagctgagccagggggcctaggggctcctccggcggctagctctgc

SEQ ID NO: 19124 - DNA, 2300 bp, Homo sapien
acccggcaacgggatagggaggtcgttcctcacctccgactgagtggacagccgcgtcctgctcgggtggacagccctcccctcccccacgccagtttcggggccgccaagttgtgcagcccgtgggccgggagcaccgaacggacacagcccaggtcgtggcagggtctagagtgggatgtcccatggcccccatccaggcctggggatatcctcatccgcctcccagaatcgggccgtgggggacagaaggggcctgcgtgcgggcagggagagtattttggctctctcctgtcttcggggtttacaaagtgtgttgggacttgcggggctgctctgtccaagcctgggtctggcgtccgcgtctctgagcctgtgagtgcgtgcgctttcctgcgtcctcttgactgccggtgctggggctctgcgtcctgcgtccgcgggagtaaatacagcaggcgaaggggaagctcacacaatggtctccagcgctctggggcagggcttctgaggggcgggcctgcctctgccgggacctggagcccccgcccctcggagaggctcctaggctgacttgggcagagccctctggtgggccgggagggggaaaggctgtgttgaaatgagcaaactgtccaggtgtcaggccaagctgggaggtgaccagcctgaggtcctccccgctccatggccagaaccagggctgacatctgggtgtcctgagcccagctgcccacacggcccacctggggtcagccctatctgagtgggggaggcggggcctcctgggggaccagaactttggctggacgccaagcagagtgccagtggctgttcttcagggctgggcctgaggagggtgtggggcggcgaagggacgggagggggttgtgatccagtggccactggcgctgtgcagagtgtgagctggaaacatcgtagttactttgtcagcttagtggtgaaagccctttttcaggctctatccctttgcatccctgcttcccagagggaggggaggtctgggtctgcagagctgggagggcttgctgttcccgcccccctcccccacaacacctcctcatctggacatctttgggcacatgctcatactggggtctccctaggtccactgtgttccgttgagcctcctgcagtccccgagtgaatgtgacctccctgcccctgcctctttgcaactcctccctgcgaccgctcctccaggggccttccttgtcccaaatgtccaagtggcacgacttagccggtctgaccactttccagtaagcccttatggagagaggccctgtgttgtgcagagctctcctcctgcctgcgggatcgaggtctctgctctcagttcctaacagaaagtgtcgggcccccagtgggatttctggggaagaactctcgtgtctcaacgggagccctgtggcgggaggggaggccagggtttggggttgtgttcgttgtacagctgtcaccatttgcactatgaaagttgttagtgccccttccttgggtctctgggtgtaactccacccttgcccccatgtgcctccatctggagctgcttctgcggctgtctcccaagccagttttgtgaccctgtaatttagtccaagacaatgggctcattgagaccatcctggtgcagcagttggcaatcctttggctctgggggaaggtttctcagtctcggggagtggggcctcaatctgctggttccctgtgtttatcagtctcccccttgtgtgtcctgaatggttttgctgggaattctggtcttagagccatcaggtggcccgagtcgataggcgtgagagagtgtgtgtgtgcatgagtgcgcatgtgcatgggggctgacctggggtatggaaaggtggccctccctggtgcccaaggagcctggagtatagttggagggtgtgggggtgtgtatatgggagttggacaaccttgggtggacagacagacgtggggaagggatgattgaaggaggtggaggagagagtgtgattcagcccagccaggggtgatgtggacaggcagcttccgaatcagggtagagaaaagtcaccactagctagcaggggagaagtcagtatggaggaggcggaccttgagggagagtaggaattggattgcaagaggaaggagagccttctggccagcagcagccagcagcagtgggggaggctggaatgagctggctggagagggggctggggcataaggaggggcctgcctgtgaagatcatatgggccaggctgcggagggccaggcatgcccgccggga

SEQ ID NO: 19125 - DNA, 2300 bp, Homo sapien
tcctgtagccccactccctgtaagaaagtcaggtgcctcccgaagcttctccctggccccaggccagaggtgacagtgggggccccttgcttgcgctggtgactgtggctggttgttggtgcctggccctgccctgcactgtgcacccattgaaggcggcatcatccgggcctctccggtggccatgcatgggtgagcagcccacgacacatctgcttccagcatcgtgtgggccggggctttcagaggggctgagggcttggatggccctgcaggggggtgctcctggccttgtgaccgaaaggagctgaaggtttggagaagccgttgggccgaggtcagttcttatagatttggcgaggagggaacagatgctcacggagctgctccaggcactgcacacactgcctcactctgcgctgacagccaagaggctggttccccgccgacccccattttacagataatgtgctcccccagttccttagtggtggagccaggattcgaacccacgcaggcagcctcctgggcctgtagtcctacccttcatctccctccaggacctatgtcttggggttggcaggataatgactcccagagttgagcacatcctaatccccagcacctgggactacgttaggtgacatggcagggccagctaaggtcactaatcagctggtcttaaaatagggagatgatcctggatgatccacacgggcccgctgtcatcacaagagtttttaaaagcgcaatagaccatctgaggggtgcagtgggagaggcttggaaggaggaaggaggccacaagccaagaaatgcaggtgaacagaaaatgcaggaaaacgcagtctcccctgcagcctcgggagggtgcgcagccctgtggacaccttccctgtagcctagtgaggtggagtgtgggactaatctgtgttgtttgacatcacaagtgtgtggtcatttgctacagcagtgatgggaattgaatgccattaggcagcagtgcttctatcccggaagaattaggataaattcccctgtggatctcaagctctgggagattctgggctcctctggactgctccagttctgcaatcataggaaaggtctcccatgtctgtttgggagaagaaaaccccgtagcaaatccatttccccttttgacaaatgaaggcgagggtgtgggctggacacatgtttcctttttgtggattttttttgttttaacacttagaattctgtagctgaaggagactttggggggttgtctgcctgatttgcaagtgaagaaatggaggcccagggaagttaagtgactggcccagggtcatgcagagtcatgctggaatatcaagctagatagcccagttcctgctccaaagtgctttcctccctggttggggaggagggttggagggagtggaccccgagcaacagcagcattggcaggggttggaagagtagctactgtatccaggtgctggagcctctggccacttcctgcaggaaccaggtgacccaccatggcacaggcctctccctgtctatctgcagccctgggggccccagggaccagaggacactctggcctgagggctggggcctgagagaagagatggaagtacccctagtctggcctgcccccgtggcgtcctgcaggcatatccggcagcccaggggtcctagagaacttggctggtgggcgtccccaccttgccgcagctgcaccctgtggccagcagcttgcaggacttgggctgttgcctgtggccctgaaacagtcattttctgagctgagtggggatcaggtgagcagatccccacaccttaactgctgtgatctttctgtcctggaggctggtgggcagcctggttggtgcttcatggcactttatgaccggccctgtcaccaggctcgtgagttgctcccctcctttcgggcatcctgaacggcttccctgagagccccgccctgggccttcgcctctgcaggcccccgctgcctggggcgcctccttcccctggaagctgggcctctttggggactcattaagaagggccttgccgagtgctgccaaattgccccatctggtccccatttgttccacttaccaccctattttaacttttatgtctcctccttggctctaagatctgagcaggcagggcctgtgaggcaccccaggtcccctgatgctgccagcacccaggggactgttagtacatatgcagggagggaaggaatgaaggaagagatgacttggggagtcctccagttcccatttgtaactggcacattg

SEQ ID NO: 19126 - DNA, 2300 bp, Homo sapien
caagggggaaagaaaagaatatcaaatatctgtcatttttacattgattacatgttgaattgataatattttgggctctgttaagtgaatgatattaaaattaatatcacctgttcttacattttttaatgatttcctttttcttttcttttctttttttttttaaatatggggtctcacactgttgcccaggctggagtgcagtggcacgatctcggctcactgcaacctttgcctcccaggtttgagcgattctcctgcctcagcctcccaagtagctgggattacaggtggctgctaccatgcctggctaatttttgtatttttagtagagacagggttttgccatgttggccaggctggttttgaactcctgacctcaggtgatctgcccacctcagcctcccaaagtgctggtatgacaggcgtgagccactgtgcctggcttgttcttacattttttattgtaggtgctggaaaatgtaaggttgcgtctgtggcccatgtgccgtttctgctggagggttggaccgagggccagccgagaaggctctggggctgctctacctgaatgctgagtgtgtgctgagcggtagagaactttgagaagtgctgaaggacagaggctttgtgtgggggatgcagccccaggccggagatgccttctctgtgctctggagaccctcatttggtgacagcaagaggaaccactgcaagaggggcggccacctcagcaaagcacccaggatgctggcctcccagctcaggaatccagaggcagaggaggggaggaggctgggcttggaggagagcagggtcttgggccctgggaaaagcctggggggccagaaagctgggggacagattgaggccagaggcaaagagaagaaggttcggagaggagggccaaggaagaagggttctgcccacggggagggagaggcccacggggcaggggcgtggtgggagctgcatcctcgaggctttctgttgaccctgacacctggccagaaaggagttccttctggcatcctttgtcagcggtttctggagctgccctttaggggccagtgatgagggtgccctgggctgggctgcagacagtggaaaagacaggctcttctcactcccagtgctggggaaattagcttcttggaggaagggggagctgtattttctgagtggccgcacttcctggcctagacgtgtgtgtcttgctgtaattttggcgactggtgttggtggtgcccattttatggatggggaaggtcaaattccacagatattgagtgacaggcccagggccttggatttcagtgtttgactcagaacccaggtctctgatctgccaccagcctccctcccattcagatgggaacagggactccgggcatgcagtcttctcccagacactcccccggctctggcctggcgcccggagaccagtagcagcagctccccacggccgttcactgtgagggtggggagggccgtgggaccaggaggccttagggggaaagttggccatgaggagtgggaagcgacgggtcagatgccagtgactgctggctggggagccgctggacgtggctggcctgtttggccagtgtggcgggtgccccggggcttcagtcacccccagccacgtgtgggggtgcgggatgggaaaggtaagagtgtgtggagcccagtcagcactcaacatgaggtcccgtgggggctgcctgagggcgtagcttccagaattcagcccctggccctcagaaggtgtcaccaaaggcttctttccatttgagtgaatccctcccagcccccagcaagccctcggaacgagcccactcccaggcgctctctcctagtgtgggagtggccacgcccctgctgggagtgactcacttgggttcagaggtcgtggcactgagatgggtctggcagatcccagcgtccaggcccagcccctatagtgtcagctccctcctctggggacccccttgcttgtgcccctctgggtcccagcacatcccaggcctgcagggagggggagaggaagagactgactcactggccaggtcccccaggggctggagaggctggagaggcaggagctggatcagatctgaatccagaggctctcggaggaagagctcagggtgagctgcgcccccatcccctgcccctcctctcctgctccttctcccttccatggtcccagccagcaagcacctggggtagaggggacaaacccaggtggctgtgttccagccctggctgcaggtctgaatggctttctggggtggctg

SEQ ID NO: 19127 - DNA, 2300 bp, Homo sapien
aaacgctgctcaggagctattataactgatggatcatcacacaatcctataaggtagccactgttattgtcccatttcacagataaggaaaccgagaccgagagggcttttgtcaattatgagggtcgcaaagcgagtaagcggtagagccaggatttgaagccaggtaggtgagccccaggctgctgaccccctccccaggccaggtcttcgggaaccatggaaaggctggagaagtatggggttcctgcagccaggacccagaaggtgcagctgcggtgcaggcagctcagcactgaggccttggcctccagctcctccctcagttgctctcccccagggagctggaggcagagccctgaactgccaggagaagattctacccgccagccagggaaagttgccagggctcttcccagggcttagagccaccccaggcctatcaaagcacattagcatcttagtttccataacttcccttgcaagaaagatgatggtaccagctactgggccgggctgggggtcccagattccaggggccctctcaggcctgcctatggctctcccaggacacagatgcttacttgagaaaccctagtgcaccaggggtcccacagccaaaataaagaggcagagctgccctggggcccctgccaaagctcccaggtagatctacccagcagacaccaaaatgtccatccctcatctgaaaactccacctccaggaggccgccccaggttgggctgacaaaatccacagagacctcaatgatgacttctcacttcaggtatgagtgagtgggtggagggagaagctattgttaactattaacagttcaggaaatgcaggtaaaggaaagagaatggtaaggcgacagggctggaaactagacacacgtgcagaggtgagcagacctcagagaaagaactgctctggaacaagatggtaaagaaactatagacaataatggtagacgatgatcctggggtcctagtggaccaggaccataacattgattcatttgacaagtatttattgagtgtctacttcacagtaacaaaaagatgacactacaggcttgagagtagtcagaatgaaaacagtggtggcacatgggaatttgaagttcatttatttaaatgtttattagccgagacttccggacagatttgaagcagtctttaacatgtaaggaattcacaatctgatacagtagtacaggacatgtgtgtgccacaaacctctggtgaaaagtaaagactctccctagaaaagtatacattgaagacagacagacagacacacacgtattttgaacggttcatcaaagaatccctaggcccgtggatcccagttaaaaaaataacttggcactctgggaggccgaggcgggaggatcgtttgagcccaggagttcaagaccagcctgggcaacgtagcgagaccccatccctataaaatgaaataaaataaaatgagaattaaaaaaaacaaacaaacttggtgtgatgagaacttacagaatttaatagggttatctcagcattacctgcagcactctctaaacttttgaccacacacacaaagttctgggttctacagctagagaagagggagagcaggttaaaaacaattattcaaggtggaagatgagtctgagaaacaaagaggtaagaggagaagactgaggccagctgctctccatccctgagctccggcaggaggaagctctcaagtgagaacaagttgctgtttgcggagtggactccagagcgggtggacagagacgataaggaatgtcatccctggggggctctgaaaacaggatattttcccatctcaactctgcttttcactgcattgtgttcctactgacctacccaagctactacaaacactccataaatgtcactggggacttcctgttctcttctaaagatggaaacactgaatataaatgaccaaattgtgcaaatgtgtgtgggtgggggatcaaggactgaatttttaaaatgcacacagctcatctaatttgttaactaactccaaatcaaattacacttcacactttgtatgggacaggaagcgtctcctcaaagcctggttaggacctgggatgccggaaatctgagactctgccttcccctcctgagacactctgaaaccctgcttagaaatcgagcacaatggctctggcctcccagagaaagacacggatttgcaaaggcaaagagctgcatttttctccgagctggagctctttccggtttccactatggggcttaaacaaaactgcagc

SEQ ID NO: 19128 - DNA, 2300 bp, Homo sapien
ttcctcctgccggagctcagggatggagagcagctggcctcagtcttctcctcttacctctttgtttctcagactcatcttccaccttgaataattgtttttaacctgctctccctcttctctagctgtagaacccagaactttgtgtgtgtggtcaaaagtttagagagtgctgcaggtaatgctgagataaccctattaaattctgtaagttctcatcacaccaagtttgtttgttttttttaattctcattttattttatttcattttatagggatggggtctcgctacgttgcccaggctggtcttgaactcctgggctcaaacgatcctcccgcctcggcctcccagagtgccaagttatttttttaactgggatccacgggcctagggattctttgatgaaccgttcaaaatacgtgtgtgtctgtctgtctgtcttcaatgtatacttttctagggagagtctttacttttcaccagaggtttgtggcacacacatgtcctgtactactgtatcagattgtgaattccttacatgttaaagactgcttcaaatctgtccggaagtctcggctaataaacatttaaataaatgaacttcaaattcccatgtgccaccactgttttcattctgactactctcaagcctgtagtgtcatctttttgttactgtgaagtagacactcaataaatacttgtcaaatgaatcaatgttatggtcctggtccactaggaccccaggatcatcgtctaccattattgtctatagtttctttaccatcttgttccagagcagttctttctctgaggtctgctcacctctgcacgtgtgtctagtttccagccctgtcgccttaccattctctttcctttacctgcatttcctgaactgttaatagttaacaatagcttctccctccacccactcactcatacctgaagtgagaagtcatcattgaggtctctgtggattttgtcagcccaacctggggcggcctcctggaggtggagttttcagatgagggatggacattttggtgtctgctgggtagatctacctgggagctttggcaggggccccagggcagctctgcctctttattttggctgtgggacccctggtgcactagggtttctcaagtaagcatctgtgtcctgggagagccataggcaggcctgagagggcccctggaatctgggacccccagcccggcccagtagctggtaccatcatctttcttgcaagggaagttatggaaactaagatgctaatgtgctttgataggcctggggtggctctaagccctgggaagagccctggcaactttccctggctggcgggtagaatcttctcctggcagttcagggctctgcctccagctccctgggggagagcaactgagggaggagctggaggccaaggcctcagtgctgagctgcctgcaccgcagctgcaccttctgggtcctggctgcaggaaccccatacttctccagcctttccatggttcccgaagacctggcctggggagggggtcagcagcctggggctcacctacctggcttcaaatcctggctctaccgcttactcgctttgcgaccctcataattgacaaaagccctctcggtctcggtttccttatctgtgaaatgggacaataacagtggctaccttataggattgtgtgatgatccatcagttataatagctcctgagcagcgtttagagtaacacctggggctcggtgcagtggcttatgtctataatcccagcactttgggaggccaaggtgggaggatcgcttgaggccaggagtttgaaaccagcctgaccaacattagtgagacccactctctaaaaaaaaaaattagagtaacgcctggcacagagagcccccagtaaacctcggctgctgtgatgagctttgtttcttcatttgttcattcattcaccagactttttgccggggcttgccgtgagccctacgctgctctgaagaaagccgggctggggtgagcgtgatggatgaggtgtctggcttcacaaaccctgtgtgggggggttgtggtgagaggaaaccgcacacatcattattcagttaccatcgtggggagactgtctggacgcagagagcaggctctgtgtgggagcggggagggcaagccctggttgcgaggcagggcttccccaggattcagcagggatctgaaggactttgcaggcacccagggagataggagaggaggagggagcagccctggccggacactgtcctcctagcattgcctgcatcagg

SEQ ID NO: 19129 - DNA, 2300 bp, Homo sapien
aagatccttttcaacccctgcgaagttggctggatgggaaggctgagctttgatccactgtggtctggcccgttagagctgcccggtggccactaagggcccagtgaggcctcatgtgcaggccctgccggcagcgtggggcgtctccagctccgatcccactggcctctgacccctacccctttcacctggctgaggcttctccttgtttcccttgagtccaggcaaggaggggaagccctgatggagagggtgctgggtgggtggtccctggagtgtgggccctggcctgggcaggttcttcctcagcaagcagctggcatggatgatgggaatgttatcaagaggaggggcctccaggttggcgggggcaggggtggggggattccgggagccgttctgccattgtggggatactgggctttccaacctccctccagattattcctcctgagctgcagaggaatgaaaatccgagcccaggacttttttttcctggggacaagggcaacccagccctttgccccaggccacctgcctgccacaggccatagtcctggaggccggtggtcacccactgcttccaccctgccagcaccctggacaccggcctggagcaacaatgctccagccctgtccctctgagtctatgcactgtccctgggccctggacccagggccatagggtggacccagagggagacacatgcactggaatatgtgtgttctgaccgagtctgggcttaccagggggactgacccttcccccaaaacgtgtaccagatctggtccaacatggtgggcctgggggaccccatggggagccaagcagtcgggatggggagtgggggtgggggcaggcgggcctgagtccgaggcaggccgagcagggcccctgccccgctgcccccaccccgctgcgcccacctcactgacccgcccgccccccacccccacaggacgcacatgcagaacatcaaggacatcaccagcagcatccacttcgaggcgtaccgtgtgaagcgcctcaacgagggcagcagcgccatggccaacggcatggaggagaaggagccagaagccccggagatgtagacgccaccctgcccacccccgggatcctgcccccaagtcatttccgtccccccccaggccctcccaccaccccattttattttatatgattttctccatttgtcatcgttccccaccccttcgacatgctgccaggaaacaagggaaggggcctccctccgagtgagtcagtgatgaggccgcggcctccccgaggttgtggggaggctgcactggagccacaggcaggggtgagagcacccactgaattgacatgaccctctgtccccaggcctggctccccgagggctcagaagagcagcttcggtgtgcagatcatccgtctgtgtggggttctcagtgccggaggccttggggtgggggccaggcctcgcacttgcagaggagcccagtgggctgcacgctcccctccatccccatcggccctgtcccctggagtgtgtcagagcccaggggagaatgcagcccaccaggagcacctggaccccctgcccgccacatggtgtggccatcactcagcccctacccctgccctgctcctaagggtagaaaactccagggtcccctgccaccgactgcccagccactccaagccccctggcagctgcccctcctggagcagaaagtgcctttatctcagccatccgcagactgcttggccagatgcggggacaggctggaatgagggaggcgtcttcatctccctgccatccccctctcacgccacccccgcccccaccgggctgcaggtgctgctgatgcgctgggatctgattgaggataaaaaggaaggagagatgacccctaccccctcatcccccagttttgaaaaggtctaagcaagtgagtctggtggaggagctgagggagggagccatggaaggtgccagaaggaaggttggcgggggcacgtgtgggccgtggcttgggctggtcagagtggcgtgagctgcccggcgcctgccctgcccaagtgaccagggaagtgtgtgtgtgtccatgtgtatgcgtgtccgtctgtctgtctagtgtctgggtttggcccaagactgggctgtagttacattaatgcccagccagccacccctgccactcacccttcctggcccaggccttgctgactctctgagctggggaggtgggaggccaggcgagcctgactctgttgatctacccgtgcctgggcccctcccctcagagcccat

SEQ ID NO: 19130 - DNA, 2300 bp, Homo sapien
gccgcgtcaggcgcctgcactcctcaacccttgggcggtcatgggactgggcgctgcccagcagggggcagcccccgtcgaggaagctcgggccaagcggaagcccaccaggagggggtggggggtggggctcgggcagggcgggctgcaggtcccaagccctgcctcatggggaggcagctgaggcccggcgagaattccagcatggctcgggcgggccggcagtgctgggggacccggcgcccccgacccccccagctgctggcccgggtgctaagaccctcactgcctggagccgctggcaatagccagcggatcagagtgtggggcccgccaagaaatcgccctggcccggggagccccctgggcagccccggttcccgcccgcgcctctccctccacaactctccctcaacacctccctctccactcctccccgcaagcagagggagccggctccaccctcggccagcccagagaggggctcccacagtgcagtggcgggctgaagggctcctcaagggcagccagagtgggtgccgaggccaaggagacaccgagagtgagcgagggctgccagcacactgtcacctctcagcagcatacaagggccacctgggaagtggccactgaatctgggctcaggctataggccccctctcttgatcttcaagttcagtctcccatttttccttgtcatttttgttttgccagctttcagtggcagcagcccctccccctggggctcagagctggagagggagttttaagtggtttctgcaaaatattttggaggagaatgatctgcctttagtagtcaaggactcttcttgcaacactcaggctctgttttatggacagaaagagtccaggaggctctctgagccacacaaggccctttgcaaccttcctgggctcgggctgcgagcagccattttggaacatgtgaaacggattttaaattccctctttgcagtttgagaagatggcggcctgaaccggagtccttcttcccctcctccctctccgctgctgcaatgcccaggccccccgcaacgttcctcgtctgtaatggtgccagaggctttaaatcttgcagaagccacatctgctgcctgcaggtaaacctccctggctgagcccactgcgcacgcctccacgttctggagccagaaacaatgagaagcacaattccggcagcatctctcctcccggtcatttgcatagcacaacctctccctccaccccctcctgtctcccacgtggatcttcatgtaattaattaatatcgcgttcatcagagcttaattcatgttcttgtaatatacaaggattaaaaaaaaatcctaccaagagagcagtaataggctccggcttttctggtctgggagcaaatataatgagcctccatgaaaatattgaatcgcttcccgcagtctccacacctcagagcactggcatgtttactgtggtaagccacccctgtgtttagaaacatcacggcctgctttcctacaggggtagccatgctgggggcctctctggagcctctcctaggagtgcattcagcagggcagaggctcggagctcttcccgggggtacattcagcagtggcagaagctcagcagatgatggggttctgtgtgggtgagagctgagggttgggtttcctgcacaatgccaagagtgccaagagtggcattgcaagttactccttccctcccagagcccatttatttttaagccaccctctcccctccactacagtgtgatggcttctccatgctaatcgccctatagaacaaggagaaaaggaaaggtgggcccttcacggtatatattttgctctttgattggaacgaaatgaactcagtgtaacgtccaggctgttgtgggggctgggttgtttctggacagaaagtcccatctgtgtccagggggccgcgtctgagttcggggcatccacactggcacgctgttttgctcggagctgggacataacacgtgggctgtgtgagcgctcttgggggctggaaacccaaggggccgatcaagggttcttgattcaaccaaacctcccccttgccatcctccatgcagaacgcgtccctggggccttcaccctgtcgtgaacaaagcacgactattttgtaaagggaagatcaaagagccagaagtcgcggatgagtgtgtggcaggtggggactcagagtgacagtggccatgcggtgtgtcccgtggtcgccccagaggcggatgggccaggccgctgcacataccctgggaggaggcaggtggg

SEQ ID NO: 19131 - DNA, 2300 bp, Homo sapien
gaggcagctgccctggctttagggtttcacgtgtgcgtgagcataagtgtgtccccaaactctggcccctaccgatccttagaggaagggtggctggaagcagatgaggaagttgttctgagggctctctcggcaggtctgagaggcatttttgttgagaggagaacctctcaaaatgtcctgtgagtttggtttggatgatgttacctggaaggtcagggactcaacagcagcttaacctcatccccggggaccagcagtccctgtgtcaaagtcactaacgcagaggcacagggatcttggcttgtcatggggagcccatcatatctgggtcagccagagccttcaacacagggcattttcaccacttccaaatgaaatttgattggcagttagaatgaaaggttcaagttactattttcacccaagccatggttccgtccaaggagttccagagctcagacatgatatggccttgggggagatcttacggggcctgggaaggctgggatggggagggaatagggaagacagaacgggtgggaagctccagcaccgtatttcctaacccggtgggcctgcaaagctctcttatggaggtgccaatggttatctaaacaaaaaggggttctggggccacatgtgtgcagccaaacttttgcaaaaggctgctcactataagcctgtcttgaaaattcaccatgcttattagcataatacaggctctgagcagtcctgccatgtgaaattgtgtttaaatttgcttaatggagtgactctcacatttgtacgatcactgagcccacctaccccatttttgtgtgttcatagaacactgtggtgggcagagtaagggttccacaaaggtgtccatattccaatccccagaacctgtgactgtgccccctgacatggcaaaagggactttgcagatgtgagatgtgacgaagttaaggatcttgagataggagatggttttggattatcctgctacctaacctactcatgaatccttagaagtagacatttcctgtctgtggttagagacgtggccacagaagaagggtcagagagaagcaatgttgctggctttgaagacagaggaaggggccatgagccagggaatgtgagtgacctccagaagctggaaacagcaaggaagtgaattctgccctagaccctccggaaggtgcacagccctgctgatgccttgacttgagtgcagtgagacccaagccagatttctggccaaaagaatttgtaagataataaatgtgttttagtttaagccactggatcggtggccatttgttacggcagcagtagaaaaggaatccacacacctgtttacatgttggcattgttgtgagaaaaactgaccaggaatccaaacaggcaattcagaatgactgactgaccatcagtcaatgcactgcacactgtggaccaaactgaactgtgtaagacatgcatcctgcccctgaagagtttgcatttcacttgggaagtcaagacacacacaaatagaagagaaatattaacaatttctagggcacaaaaacgtatttatttatttattttgagacatagtctcgctctttcacccaggctggaatgcagtggcaacatctcggctcacggcaacctctgcccccaggttcaagcaatcctcccacctcagcctccccgagtagctgggaccacagcgcccaccaccgtgcccggctaatttttgtatttttagtagagatggggtttcaccatgttgaccaggctggtctcaaactcctgacctcaagtgatcctcctgcctcggccttccaaagtgctgggattacaggcgtgagccacagcgtgcagcctaaggcatgaaaacttaatgacaaagctgaggagttcaactttaaacagtgcatgcacccaccaggggtgactcggagctttcactggaggaaggagtctgggccttaaacgcaggaatcctccagggagagctgggatttaatgagggtgggggagtttcccttgggcttatgcagtgcagtggggtggggctggaaacagcactgggaggggctgagcagaagccacagcggggcagaacaaaggcctggagactggagcgagctgcgttcttgggggtggggggtggggcggcagctggagagtgggggcttccccagcgggagagggaggacgattctggatggcttccctccttgtggacagagtgagtctctgctatgagaaaggtaggagctctttcagctccggctgagaatgctagtggagccggctgg

SEQ ID NO: 19132 - DNA, 2300 bp, Homo sapien
catgaacacccaaccacctgccggtgatatcgtccccttctgagatctgaggacgtggatatccaaccacctgccggtgacattgtctccttctgagatctgaggacatggacaccaaaccacctgccggtgacattgtctccttctgagatctgaggacatgaacaccaaaccacctgccagtgacatcgtccccttctgagatctgaggacatggatacccaaccacctgccggtgacatcgtctccttctgagatctgaggacatggacacccaaccacctgccggtgacatcgtctccttctgagatctgaggacatgaacacccaaccacctgccggtgatatcgtccccttctgagatctgaggacgtggatatccaaccacctgccggtgacattgtctccttctgagatctgaggacatggacaccaaaccacctgccggtgacattgtctccttctgagatctgaggacatgaacaccaaaccacctgccagtgacatcgtccccttctgagatctgaggacatggatacccaaccacctgccggtgacatcatcttcttctgagatctgaggacatggacacccaaccacctgccggtgacatcgtctccttctgagatctgaggacatggacaccaaaccacctgccggtgacatcgtctccttctgagatctgaggacatgaacacccaaccacctgccggtgatatcgtccccttctgagatctgaggacgtggatatccaaccacctgccggtgacattgtctccttctgagatctgaggacatggacaccaaaccacctgctggtgacattgtctccttctgagatctgaggacatgaacaccaaaccacctgccagtgacatcgtccccttctgagatctgaggacatggatacccaaccacctgccggtgacatcatcttcttctgagatctgaggacatggacacccaaccacctgccggtgacatcgtctccttctgagatctgaggacatggacaccaaaccacctgccggtgacatcgtctccttctgagatctgaggacatgaacacccaaccacctgccggtgacatcgtccccttctgagatctgaggacattgatacccagccacctgccggtgacatcgtctccttctgagatctgaggatatggacaccaaaccacctgccggtgacatcgtctccttctgagatctgaggacatgaacacccaaccacctgccggtgacatcgtccccttctgagatctgaggacatggatacccaaccacctgccggtgacatcgtctccttctgagatctgaggacatggacacccaacctgctgctggtgacatcgttcccttctgagatctgaggacatggacaccaaaccacctgccagtgacatcgtctccttctgagatctgaggacatggacaccaaacctgctgccggtgacatcgtccccttctgagatctgaggacatggacacccaaccacctgccggtgacatcgtctccttctgaggtctgaggacagacactcacatggacacctaaacacctgccgatgatattgtctccttctgaaatctgaggacatggacacccaaccagctgctggtgacatcatctccttctgagatctgaggacagacactcacatagacgcccaatcagctgctggtgacattgtctccttctgaaatctgagggttggaacacattggcctggctcagtgtttctccatgtggttttgagaccacctgagttggaaccgatatgggttcccagcctcacgcctggagagctggattttgcgagtgtgaggttaggtccagcatctgcatgtgtaacgagctcccaggtgtttcgtagatgcattagggcttgagaagctcctttctagcaccatcttcctttttgcgcatgagggagttcaggtccagagaaataaagcagcaaggttagtggcacagctggcgccccctgctttctaggaatttagaatattattgaagagagaggtattagaacctgtgaagtcaatacagagacctccaggcgagtggcatcctcactgaaaccactgacaagtatgctgaatagaaagtgtcatttctcctggaagaccctcagtgacccagctggagggtctctcctactcatcagctgtccctcactctgccatttcagcagctctgctcaccctgagcatgcagagagagcagcttttaaatgagttctaatccagaccagcttggctagcattgtctgtgtagaggtgtgctagtaagtc

SEQ ID NO: 19133 - DNA, 2300 bp, Homo sapien
gatgttgtcctgcacttcactaatgttttgtttattttttcaattatttttctccctaaagttccttttgaattgtttctattcttatgtcttcaatttaactattccttcttcttctgtgtctaatctgttgttgatcccatccacaatatttttcatctcagttttctttttacttttaaaagttttatttagatttaaaatatatatgttatcttctatttctctcatcatgtttatgtttacctctactttcttgaacatatacattatttttataatagttgctttaaggcccttgtgtactaaacttatgatctttgtcatttactggtttgtttctatgaactgcttttcttctggctgtagagcctagttcctgcttctttgcatgtctgctaatttttaattggatgccagacattgttaattcctctaattattcctttaaatatattcgtactctttttctagttcatagttaagttacttggaaacaatctgatttttcttcaagtattacttttaagctttgtttcacacgtttagaacaacctttagtctagggctaatttagtccctcttctgaagcaatgcctttctgaggactctgcttggtatttcctgggtgaggaggtctttccactggctgttgggcatgtaagatattctccagcctttgtgagctcctggggttcttctatctgctactttccttttccacagccttagtaattttctcatatgcatgcactgatcaatattcagccgaaggccttaagtgagtcgtctgcagatctctagagtcctctctttctgtgtgcagctctctcctctccagggctctgccctacaaatgttagctgccttggcctccccacaccctaaacactatctccttaattcagtgaagccactgaacactgtgtggtttccacttacctgtatggtggcgtggaaactctctccaggttgtcagctggggcacttgtgggtctcacctcatttgcttctcctctgtcagagattacacttctgtgacacctgcggtccaatgtctgaaaattgttgtatatagttggtctatttttagttatttagggtggaataataaatgcttactccatcatggccaaagtctctgttgtttacagttcaatggagagagataccaactacatacaaattgaaatgcaaagtgccataatatctttagagcagtaaaggcaagctgttagaattgctcacaggaagagaaaattatttctacctcttggttaaggcttttatcaccaagaaggcagcatccctaccacaccaactatatacccctaactctacatctccagcccagattctctctctcctgaattctggacccctacacataacaaaacatttgaatcatctccacccgggtatgtcaccagcaccccaaactccacatacccaaaaccgaatgcactcatgttctttccaaatcatatggcttcagatccttctctgacatgagctagtggctctttaaaacttagtaagttgtctccttcagcagaaaacagtccctaacttctccagcctttctccacctttaccactgcagccccagcctacgctggatcagtcaccatcgtccttgttgtaccctgtgcctgtgtttggctaccatcacttgggattttgtgagccccttgagggacgtcgtgttccttctatgtgtgttttgggttgttcgggtgcttaacacataacaggggttcaatcaactgtccttaaataaatggttcccttacaatagtgattgacagataggaattggatgaccatatgactctgttgcatgggaaagaaaaaaaatgaacctgagaacattcttgggattaatcccttaaacaaggggtcagcaaactttgtcttaaagggacagatagtaaatcttgtaggctttgtgagccacactgctgttgcagcttgcaagcagcagtgtactgtacacaaacaaatgggcatggctgtgctccaatgatgccatttacaaaacaggcagagggctgggtctgggcttcccctgccctaacctaagcccagctgggcttcattcagcacgctgtgtaccactcttgatgggtaggcccactctgcccgcaccttgaaacctgaccaggtcttctcccaccccatgaatgtaaacattttaacaactagcctgactgtgaaaagcctggagaatccttcctacaggggacagtggtgagtagaaagattatcgtcaggtggcgcctgtccttttgtgacatctg

SEQ ID NO: 19134 - DNA, 2300 bp, Homo sapien
agctcactctggagttaactgaagcccttgaaggaaaaccaccaggttttctaagagtttatggcattatttatttttattatcctcaccaaaaatttatgttcagccactttttttttcctctaaattttctggaacgtttctccttagtgttcttcattcatgaagcacataaaagtctctttgaccttatctctctctctctttttgtaaagctcttcttggtattattgaattttattcatagcaagacccatctgaggcaatcctggtgcaatcttcctcactttgtctgtcttccttccttccttctttcctttctcccttccttctctctctctttgtgtctttctttctttctttttctttctctctctctctttctctctccttccttccttctttccttccttcctctctccctccctccctcccttccttccttcctcccttccttctctctctctttcttttctttctctctctctttctgtctctctccttccttccttccttccttccttccttccttccttccttccttccttcccttctttctttcctccctccctccctccttccctccctccctccctttctctctctctctctctctttctttcctgtctccaatcatccacccacccacctatccatccacccacccgcccatccatccatccacccactcacccatccatccatccacctacccacccacccatccattcatccacccacccatccattcatccattctttcacctagtcatccaccgattcaaccacccatccacccatccagttatctacccacccacccattcaccacccacccacccacccatccatccacccatccatccaatcatccacccatccatccaaccacctatccacccaccctttcacccatccacccatctatctatctatccatccatcctccatccatccatccattcatttaacaaaagagacaatctcctgtcccctttgggaacactgccaagttttctctgccttgcagctgggtcgagttgacatttggcagaaggaggtgggtggtacattttgcatcagggcctaggcctgcctcagacacaggtgttcagctccatgccaggactaatgctgggcatggaaagctggagaggtggctttgtgcccagggccggttgtagcatcttggcatgtttctgttcccaaagtccccagtgggcacagggacattcagccatcttcagagatagctaccatttaaagcaacaaggagataggacaaccatcactttccctgactccagtgagacctggaggctgtcctgcaagtgagatgccaccttaagctcttcatgagcagagttgcccatagcccttagctcactgcaggaagcaaccaatgtggcccccacattagtagccctcagagccagaccaagttcaaaatttggttaacaaacctgtaggcttcttcttgttttcaaatgtcacagaaaatctttttgtgctattgtaggaatggaatctctccttccttcagcctcatctgagttgaggtggggagagttggacacaaagttcaaggggagagaacactcaaaacagcccccagaaagccaaggcaggggttggcacaccaaaatgacacagagacagctccatgccctaatgggtcgatcccatccttcaataacagtgggtggctgggatcttctgcatttcacgggaggctcagggagatgaagcaacttgcctgaggtgtcacaggtgtaggaaggagagtaggggcagatggggcccaactccaggtttgcctggatgcagagccacgcgttccccccgcctcctccttgatgggttctctctgcacgcttcagggtgcccccatgctctgctcggcccctgcagcaggagggcacagagctcactgctggctggtctccatggcaacagctgacgagtctgcatcagatgatggcagagctgccttggagcgcgagcttggctgtgacggcagggacttgggaggagaggagctggaggagtgggggatggggcatgagctggggtgccggatgggctgctctcccagcagccatttggaagatgcttccagtcaagtctcaatctcagtcggtcactggtccatgtatatttcatggacatctaccctgtgctgggcactgggcagacaacagtctactggacccagtctcactctcaaggggactgtagtccaagagagaggcaggtagattatcaggtaattccagctcaccacgattgatgggaaggta

SEQ ID NO: 19135 - DNA, 2300 bp, Homo sapien
ccaattctaaaatttatgcagaaatgcaaaaagacctggagagagggagggagggagggggaggggggagagagagagagagaaagaaagaaaaagaatggaggtaaaacagaacatgaaaagttaaaacaggctgaaggaaaatatttgcaaatcataaagctagtaagggacttgtattcagaatatataaagagctctcgtaacttaataataagacaaagtacccaattttaaaatgggcgaaggatttcaatacacatgtcaccaaaaaagatatacaaatagctgataaacagatgagatttcttgctatgtgtccattcaaattttccatttttcctgcattgattttgttaatttgtctattcctaggaatttgtactttcatctaaatcatcttttgttggcataaagttgtttatggtacctacctcaattcctgtaaaatcagcagtcatgtcccctctttcattaccacccccgccccgccccaaaaaaaaagtaagagggagagatggagtcttgctgtgttgcccaggctgcccttgaactcctgggcttgagagatcctcccaccttaacctcaagagtagctgggactgcaggcacgtgccactgcaccctacttgtgtatgtttttggttcatttcgttttgggtttatattaccattgttattcaatgttatgtgtagtcagggtgataatagattagcaacaacagtgctattaacaggtattatgtcttgtttctctgctatgtttccaagaacaaatcttaactcattgagtctgttcaaaattcacagttctgtagagttcaccgaggagaaaacagagacctaaagaggcagtgtgacttgcccaagatcaggtagtcctgggttcaaacccaggttttgcagaaaactaattccatgccttttgccataggtaaatgagcaagggaaaaaacaatttgcaaaacaaatttgtaaacaaacatctttaaaatgtatctttctagtaatcaaagaaagaaataagccagattaaaaaagaaacattcagttgagaaaacttaaatatgatactgaggaggatgagaaaagaaatttctttaagtctcatgtatggggggaaaaaaattcttccatgcatcttttgctggtggccatgaaaacaggtgtaaataccttcaggtggtgaaaataataatgtacatcaaaagaatcaaatacgttattaccttaggaggtttttttttagcatctgtattaaggtttttttctgatatacattaaactgcacatatttaaagtataacattcaataaatgttgatatacatatatatctgtgaaactacagccacagtcaagataatgagcatatccactgaggttgagtgttgaaatgtgctggtgggagggcagatgcagtgtgctggagggagaaagaagccaaattgttaaaactgggcaactggtggaaagatggtggtggagggaatggggagacctcccttataattttgcctataaaggcagctacacatagcagttttaaaaatatttgtcattcatgtaggaaggtaatcatttcttaaatatttaatcaaacatttttcttttttgggtaaaatctggtcttttgaaaatatgaaatagcattgtgattatgaggctttgggacatcatgtaagagtaaaggttcaacaacagaagtggaaactaatttacagttgccatcttttactcttgccacataagacttgaataaaaagtaccatgatatacttttatcattactttataaagtaaaggactttctcatgcaaagaagtggaaaggataccatcttataggagaatcctataaattgaataaatgcatctttatgaaaaatgtaggtcgtctttatttttctcattccatggtgttataaaactttctcaactgatcatggtctttagagtgagttgtcaactctgggctagatttctaggaatgccacttattagctaggtgactttgggtttaatttttattttctctgagcctttgtttgctcagctagaagaaatgaataataatatatactattacaggattattgtaagaattaaatgagatagtatgtaagtttctcacattgtaggctcatgttatcttccttatattcagccctgcgtagtctgtttctcactatcacacatttgctctttaattacatatttgtgtatacgtttctgtaatttcaaagaagtgagtcaaatttaaccctatcatagacatgactatagtaatcattttggtatg

SEQ ID NO: 19136 - DNA, 2300 bp, Homo sapien
ttagccaccagcttataatgctatccttctttcaaacgtgtcatataattgagtatgaacctgtcaaattgggggctgagcaatcctcaagtcctcaaagtagaccattaacaaagggcagatcattttacagtgtgactgttgtggaatggaaccaataatactgtgtattcgaatggcacctcacatatggaaaagaatgcattggtcagccaggttgttaaccccctgctttctcggtgtgggttgcagtgagtgctgtcttagtcaagaggcagcctgccttatggcacaacctgtccatgagggaacccaaactgatggtaaaatgaaatgtggtaatatttgctggcaacaagccataatctctgtgtgttaacttggtcttattttctgtgttaaatgaggaatggcttatttatctctttagttagttattatattagatagtttttagagtatgtgcaaaaccaaattgtcataaaccagggttatagagccaacccctaataattggcagtgaaaagaacctagtcattttatagcagtttcaacatttaaagttttctgttgcctgtcttcatttttcctttgtagttttcacctggaattacgtacctactttgaaatcacctagagcataattctaaaatcattacattactcttaaatcaggcaataaaaatctcttttaggttgatattagctttagtatggtctttctaatgctaattttttttgcacacttcctttttttcctttagctccatcaaactttaaaagagaatttatgtgggaaattcatgttttaattgtccatacgatttttcttgttaaaataaatttgaagagaacataattaaaaggatctaaaagagaagaaaatattttattgcagtttatttgtatattgtagtatttagagaaactcaccaaggatttctaaatcacatatgtgagtttgttgtatgtttgggttaaattatttttttaacatttcttttactttattttttagtgatacatacttggaataaagtctgccaaaaagttgatcgaaatataagtttgactgcaatgttggaaatactcaaataattgttaaagtcataggaaataaaatgtagatccaaacaggggattctttaaaaggacccgaagagttaaatactataagaagatggcatataaagttattctagggatctccaaagaaaaggctctaaagaaatagaaaacaaggattgagagaatctttagagatccaaaaagatagcacttgtggggctgagattcttcttccttctttttcttcttttagtgatgtccttgagctacagattttttttttttattatgaatgtgcaggagacagtgataaaccaaattgcagataagatcagataaagtagtatacagctaattaaacatttctaatccttagtatttttgataacataagatagcattgtctcatatgtcttttctctctttccttccgtcaccacttcccccaccccaaatattggttctgttatgattctgcaatgcaatttacaatttttttctactgaaagccatgtttcgcctctatataatactgtaacctaattagaggtcttaaagagaactacaagttttattcaaaactctacgtgaacttactgtcattgccagtgtttctcagtctctgtatttataggagttgcaaagtcacttatctttcaaagctgcctttactacagatgctttcagagatgctgatgtgctaacgtgcattgtgagtattctccagggggaataatagtacagtgtagtggtaagaattgatataattttaaaaacattaacgctctttaaaatgggatctattaagaagacaaatagcttttttctttaagtcatttttttagtgtttgtcattcagatttgaagacttgaaataaagagcttccccaaagactagttaacagttgattcattgacaaatgagtagaaaatctaattttgaattttgtttcatctttttcagatctcagtcatagtggattggcagatcattatgaaaattcccactggggacagcagcctacttacagaagcgaagccaactgcagctgggataaagtgataatagataggactgacaaggaggcgtggccttccatcacaggaacagagactgaatctgcctcagaatgtactacagacactgactctgcctccaactgtggctcagagaacagtagcatggctacagggagtgcccagggcaacttcactggacataccaagaagac

SEQ ID NO: 19137 - DNA, 2300 bp, Homo sapien
gcgtggccttccatcacaggaacagagactgaatctgcctcagaatgtactacagacactgactctgcctccaactgtggctcagagaacagtagcatggctacagggagtgcccagggcaacttcactggacataccaagaagacaaatggcaataatggcaccaatggcgcactcgtccaaagcccttctaatcagagtgcccttggagcagggggagcgaacagtaatggaagtgcggccagagtgtggggtgtagccacaggctccagctctggcctggctcactgctctgtcagtggtggggatggaaaaatggacactatgattggagatgggagaagtcagaattgctggggtgcttccaactccaatgctggcattaatcttaaccttaatcctaatgccaacccagctgcctggcctgtacttggacatgaaggaaccgtggcgacaggcaacccttccagtatttgcagtccagtcagtgccataggtcaaaatatgggcaaccagaacgggaacccaacaggcactttaggtgcttggggaaacttgctgccacaagagagcacagaaccacaaacgtccacttctcagaatgtgtctttcagcgcacaacctcagaaccttaacactgatggaccaaataacactaaccccatgaactcttcacccaaccctatcaatgcaatgcagacaaatggactgccaaactggggcatggctgttggtatgggggccatcatcccgccccacctgcaaggccttcctggtgctaatggatcatcagtttctcaagtcagtgggggcagtgctgaaggaataagcaattctgtgtggggactgtccccaggtaaccctgccacaggaaatagcaattctgggttcagtcaggggaatggagacactgtgaactcagcattaagtgctaaacaaaatggatccagcagtgctgtgcaaaaggaaggaagtggaggaaatgcttgggattcaggacctcctgctggtcctggaatactcgcctggggaaggggcagtggcaacaatggcgttggtaatatccattcaggagcttggggccaccccagccgaagcacctctaacggtgtgaatggggaatggggaaagcccccaaaccagcattccaacagtgacatcaatgggaaaggatcaacagggtgggagagtcctagtgtcaccagccagaaccctaccgtacagcctggtggtgaacacatgaactcctgggccaaagcggcatcttctggaactacagcaagtgaaggaagtagtgatggttctggcaaccacaatgaaggaagcactgggagggaaggaacgggagaaggccgaaggcgagataaagggattatagaccaagggcacatccagttgccaaggaatgatcttgacccaagagttctgtctaatactggttggggacagactcctgtaaagcaaaacactgcctgggaatttgaagaatcccctaggtctgaaaggaaaaatgacaatgggacagaggcctggggttgtgcagctactcaggcttcaaactcaggggggaagaacgatgggtccatcatgaacagtacaaatacctcttcagtatctgggtgggtcaacgcgccacctgccgctgtgccagcaaacacaggttggggagacagcaacaacaaagcgccaagtggcccgggggtttggggggactcgataagctctactgctgttagtactgctgctgctgccaagagtggccatgcttggagtggggccgcaaatcaggaggacaagtcacccacctggggtgagcctccaaagcccaaatcccaacactggggagatggacaaagatcaaatccagcctggagtgcaggagggggagattgggcagattcatcgtctgtccttggacacttgggggatgggaaaaaaaatggatctggatgggatgctgacagtaataggtcagggtctggttggaatgacaccacgagatctgggaacagtggctggggcaacagcacaaatacaaaggccaatccaggtacaaactggggggagactttaaaacctggcccccaacagaactgggctagcaaaccccaagacaacaatgtgagtaactggggaggagctgcttctgtgaaacagacaggaacagggtggatcggggggccggtaccggtcaaacagaaggacagcagtgaagcaactggctgggaagaaccctctccaccgtccattcgccgcaaaatggaaattgatgatggtacctcagcttggggggacccaag

SEQ ID NO: 19138 - DNA, 2300 bp, Homo sapien
gtattgcttgcagttctggaggctgagaagtccaagatcaaggtgccagaagattcagtgtctggtgagggcccgtttctcatagatggcaacttttatgcatcctcatgtggtggaaggggcaaacaggcttcctcaggcctctgtcattagggtgctgatccaattcatgggggctcctgatcacctcccaaaggcctccgctcttaacaccaccacaattagggtttgggtttcaacataggaattctcgggggacgcagacattcagaccatagcatatgggaaggcaatgctagcatacgaaaaagagcaggatgcactgggcactgcattgagggtaattctcgctctgtaattgttcaaacccaggtttgtgcactgagttgatagtgcacaattatcaatataactaatacatgtaactattatcaggcaataataaaagttattagataatagttaaatgtattcattaggatataggataagccaccataacaaagaggcctcaaaaaacagtagcttaaactaggtagacattgatctctctcaggttacagtgcagaaagaagcagtgcagggatcgggggtgactctgccatagccacttcccaggaacaggggaaaaggcagcactactgtgccggtggccttgaaattgtacacaccacttccagtcacatcccactgcccagacctaggccacagctgcacccagtctgagaggcagtagcagaagaagcagttagtcttccccacacaaagcaaaccagcatgtcccaaatggcaaggcatctgtgtgccgtctcactgtttcttctgtatctccctgttacctgtgagtactgataggaaggacacagaaccttggaaagttcatttataattaaaatatttggaggatgagatctctgaagactttccttcttccttccctcctttctttttcctttctttcttattctttacgtgctaactactaatgttaaaatgtccatacattttttaatggcctttgacatttcacccatgagacaaatataattattattgcaggatctggccagcagcctgcggtgcaacagggctctttctttgttcccaggcagattggcaggtcgagaaataaaagacacacacgagatagtgaaagctgggtccggggggtcaccgccttctgatcctgtgatgccaccaatgcactggatataccggcatttattactaagtttagtgagggcaggggtaggttagtgagggatttagggtcgtttgattatgaggtgagatgatcacatggggatgaagtaattctttaacataacatcggtatgcagaagtacagtatacagggataagaatttacaatatagtgtgtgcatcagcagtttctaacagagccttaaaacagaaacacagtctgtccataacctgtgtttagtaagatactaatcagtagtaataattgcagcaaaagctggttgcaaacaatcaatagaaacaggacatgaaactagataactgtttagaccacaaattctcagaagggagtatgccttaaccctaaagagacctagaagagctgtggcaagataagggcgtttgtaaccctatcttatccatatgaacaggcgcccctcatgcatccatttataggctctccccaagggtcgcattccattcccagagctatgaacatctgcttttctgggataggaatcttggtgatgtgaaacctccctgactgcacatccatttataggctctctgcagggggaagcacatcacgcgctgttggctcattctggcagcccaaccttgcattgtctttacacagtcctgcatgcaattttgtatttacaataatcaggagcatttcatcttttattccatagcagtagtttcagggggtctccctacaaattatcatttaatcatttttgaattttgaaaaactacaggtacaagtaactattttaacagagatacaacggctaatagtatattttatgttaaacaggttcaagcacagcttttgcagtttgcagcaaaaaacattggtctcaaccctgcactattaacctcgccaattaatcctcaacatatgacgatgttgaaccagctctatcagctgcagctggtgagtggatagacccatgcaagttagagcacgcaggccgagtgcagatgcacggcacctgctgagagcagcagttgtgataatgtttgtcttcacgtcagggatgtcattgagactctcatgaagtatttaaactcttcatgagttagggagttct

SEQ ID NO: 19139 - DNA, 2300 bp, Homo sapien
acgcctcccccagtggacgcaccccaactccatggataacttgcccagtgccgcttcccccctggagcagaaccctagcaagcatggtacgtctgagctaggatgcctgtggtgggatcactgctggcttattaatcgatcgtcctgttgtatagcatggccattctatacttttctaagaattgagcactgaaagttggatttaaaataacccattccattatagtgcatataagatctcagctagtcactgatcaaacttcttaaaacccaaccattagatcttagctacaaacttagaaataatttgaaaaccccagagcagcaaagaatctaggtcatagcctgtgtactttttttatgtatctatattcatcaacaaaaacttgagtctgctgaaatgttttcaataaaatggtaaaacataaatagaaaatcaaatatacagtatgtatgggaactgcagctgtaaatactagggtgcatttctgttggttattcccctccatccaagcagtctgtcttactccaaactggtgtccccatcgggaactctttactgatggacacacgagtaaggtggaagcaaaaatgataaccataggaggtaatctcactctcaagcattaaatttaactctgaacttcctggtagaataaacagcaaaggaaattcagtaggttacgtagttctctcttgataggaagcattctaaaaagaaaaaggaaactatgtctcatggttaacttacggaaaatcatcacacactgctggcacctttcttagcaggagggctctgctgcctgtagctggttggtttggttctgtatgaatttttaacatccactgtgttcttccgtagtgagggtttcagactaaaaggagggaagagataacagcaaatttgatagctaatcacaaagactcataagttgtccccaaaaagatttattaagggcagcttcccatggtatggatatgtattttgtaaagacttcttactggacaaactgaaattgttcttcaagggtttcaatctttcagggctgaaattgtagctaactgaaacagtcactggccaggcatggtggctcacacctgtagttccagctacttgggaggccaaggtgggaggatcgcttgagcccaggaggttgagccctgatcacatcactacactccagcctgggccacagagtgagaagttgtctcaaaaaaataaataaataaataaataaagtcattgattcttacagaatcctagacagaccaagtcttacaattcatgtaactgaatagggcaaggcattggacctagaacagaaggtacatagggaggcttagggtatcttctggtgtctctcaactggagagtattcactcgcttctttgtttcctattgtccccataggtgctatccctggaggtctaagcattgggcctccaggtaagtcctccattgatgactcctatggccggtacgatttaatccagaacagtgagtcaccagccagtcctcccgtagctgttccccatagctggtcacgtgccaaatctgacagtgataaaatctcaaatggctctagcatcaactggcccccaggtaagaccatgcaacacttctgtgcaacagcagcaggtcagaatgtgctccaagcctgcagagagtgattaggctgagaggacccagaatctgagctaaggatctggaagcgttaagcccagagctttggcattttccttggaaatccatttgtcagatcaattttgggtatggttagcatcaggcatttttctgtaaacccttagttcagcatgaggagtggaaggggtggcagggaggaagcacactgcacactatccggtaaaactattccaaccctgtgtgaaaactagcttaatatgatagctgtgatacctggttctagtttgttccaaaggattgattgctttaatgaaagagagtataaggtgtacctctaatttaattagcagattataaaaatttctacaaacaggacaaaacatcttttaaaatttcgtgaatcaatgtgccggtgttctgatctgtggcttctcattttggtttcttaaacagaattccatccgggagttccatggaaaggactgcagaatattgaccctgagaatgaccctgacgtcactcctggcagtgtccccactgggcctaccatcaacaccaccatccaggatgtcaaccgctacctcctcaagagtggaggtgagggtgctgctcttcctgcctctgcatggacggtctctctagacccatttggaga

SEQ ID NO: 19140 - DNA, 2300 bp, Homo sapien
gattcgcttgctgcctttgaccagcctgaactcgcgcccaggaggggcttacacctgcacaagtgagccgagcaggcacggattgtgaccagagcgatgcgtcaaccattgggtgatgctgtagcatctactggagcaggagacaaatttagagagggacttggaggggagacatatcagttgcaaatgagttgtggggacagttgcctcccaggcataggtaaccagcacctgtgcttggaggcgaacagggcttggtgaggtggggctggccccctgcttctggctgccagcagctggctggggggtggtgatcctgggtctgactgggctgagtttgaggagcccgtgggataccgaaaaccgtaggctgtggggggtgggcacagggattcggggaccagcccgtcatgaccccgtgctccaggtctgcagggaccagcccatgacagcccagggctccaggtctgcggggaccagcccatcacagcccagggctccaggcctgcggggaccagcccgtcagcctcagttctccaggcctgcggggaccagcccgtcatgaccccagtgctccaggtctgtggggaccagcccgtcagcctgtgctccaggcctgcaggaaccagcccgtcagcctcagtgctccaggcctgcggggaccagcccgtcagcctgtgctccaggcctgcggggaccagcccgtcatgaccccagtgctccaggtctgtggggaccagcccgtcagcctgtgctccaggcctgcgggaaccagcccgtcatgaccccagtgctccaggcctgcggggaccagcccgtcatgaccccagtgctccaggtctgtggggaccagcccgtcacggcgcagggttccaggcttgtggggaccagcctgtcacagcccagggctccaggcctgcaggagctgcgcttgggattgggggaatgaacccaggtggggaaatggtcaaagagcgatgggcccagaaaagggtcagacccagatggagatgccactggctgctagcagacccccacgctgggtctagcccacccaatcccatggggatgctcctgtgctctgcagacatctgggtgctgccacaggggcccgacagagttggcatctgggtggatctgagccaagtggtgcttctgggcctcagcaagtagctggtgctgattctgggcagccaactgtggcagcatcttcaggtgcgagtgctgctgggtgaagctgcgtgggcagtccagaaagtgacgtgacagtccacagggaccgacgtagggtttccagcccctatctgtgcagatgctgtcctccaaaccatcacggtccctctctggctggggacgtgcgcctgccactgctggcttgccagcatgatcattggttgtgacctgttgagcccatcttgccagcctcacaaaggacagtactagctgcttatgacaggaaagtggaagaacttggcctggatatttctggagaattaccgtgtgtgctagtcagtctttcgtgtcaaccaggccaggctgtggggcccagtgatctcatcgagaggggccgaggtgttgctgtgatcgtgtgctgctggaatgtggtgaacacctacagtcgatttcacctaaagatcatccttgagaatgtgggtgggcctcatcctatcagctgaaagctttaagagcaaaacccgaggtgtcccagagagggaattctgccttgagacggcggcttcccactcccactggatgtccagcccgcggccccacggctgggtgagcccgtcctctcctcgtttctgtctccggacccaccgtgtggccccagaccctccagtgaggacctcccgtatttcttcagagcagcccttgcgtgctggaggcctgggcttcagtgtgtccctgggtgccctggggcatgttctgtgacctcccagctcctcgcctcatggggccgctgtatcaagtgacacagtttgtgtgctgcgtaccatgcctggcacccatttgaggtgttgcaaggaggccatgtttgctcgatgagagcagcctaagatctacaaactgttgttcgagtggatgggaacttgatgctattttcaggctgaatgacaagactccgcgatgcttctcggcctgggctgcacaacggaatctaccagggaggttttaaaaacactggtacttgctggaggtggtggcgcctgtctgtaattgcagctgctccagaggctgaggcggaggattgcttgagcccaagagtttcggtttatttgctttttcagagtcttgctctt

SEQ ID NO: 19141 - DNA, 2300 bp, Homo sapien
cattttgacagggacctaaaatacatctcaggagaaaggctgtggggcgtctggcctgtccctcgccgggccttggctgcgcccagccaggttgcagggatgttgatgtttatggggtcccctcagtgatgtctctttctggcagggttgggacaaccgaggaggctgcggcaccccctgccctgctcacagatgaacaggatgcctagggggacggcgatgggcctcacgggcccgcccagcaccctgagaccacactgttgcctcccagtgaccctgctgggacaccaggacaaggaagacagtttcgcctctcgaaagccgcagctgcgcctaggctggagctggaagggtgggtgaatccggcttgggcatccccaatgaactctgccctgcctgggactctatttattctgattaaaggggttttgcaaatgggcttgtcccttggggctctgtgtctgtgaccacacccggggcctgcttcccgctgccctggggccacctccaggcgcaggtctgggtcctgggaacctcagctggagtgggggcgccctctgctggccaagccccagatggcaggggctggaccgcgccagggcttgattcgcttgctgcctttgaccagcctgaactcgcgcccaggaggggcttacacctgcacaagtgagccgagcaggcacggattgtgaccagagcgatgcgtcaaccattgggtgatgctgtagcatctactggagcaggagacaaatttagagagggacttggaggggagacatatcagttgcaaatgagttgtggggacagttgcctcccaggcataggtaaccagcacctgtgcttggaggcgaacagggcttggtgaggtggggctggccccctgcttctggctgccagcagctggctggggggtggtgatcctgggtctgactgggctgagtttgaggagcccgtgggataccgaaaaccgtaggctgtggggggtgggcacagggattcggggaccagcccgtcatgaccccgtgctccaggtctgcagggaccagcccatgacagcccagggctccaggtctgcggggaccagcccatcacagcccagggctccaggcctgcggggaccagcccgtcagcctcagttctccaggcctgcggggaccagcccgtcatgaccccagtgctccaggtctgtggggaccagcccgtcagcctgtgctccaggcctgcaggaaccagcccgtcagcctcagtgctccaggcctgcggggaccagcccgtcagcctgtgctccaggcctgcggggaccagcccgtcatgaccccagtgctccaggtctgtggggaccagcccgtcagcctgtgctccaggcctgcgggaaccagcccgtcatgaccccagtgctccaggcctgcggggaccagcccgtcatgaccccagtgctccaggtctgtggggaccagcccgtcacggcgcagggttccaggcttgtggggaccagcctgtcacagcccagggctccaggcctgcaggagctgcgcttgggattgggggaatgaacccaggtggggaaatggtcaaagagcgatgggcccagaaaagggtcagacccagatggagatgccactggctgctagcagacccccacgctgggtctagcccacccaatcccatggggatgctcctgtgctctgcagacatctgggtgctgccacaggggcccgacagagttggcatctgggtggatctgagccaagtggtgcttctgggcctcagcaagtagctggtgctgattctgggcagccaactgtggcagcatcttcaggtgcgagtgctgctgggtgaagctgcgtgggcagtccagaaagtgacgtgacagtccacagggaccgacgtagggtttccagcccctatctgtgcagatgctgtcctccaaaccatcacggtccctctctggctggggacgtgcgcctgccactgctggcttgccagcatgatcattggttgtgacctgttgagcccatcttgccagcctcacaaaggacagtactagctgcttatgacaggaaagtggaagaacttggcctggatatttctggagaattaccgtgtgtgctagtcagtctttcgtgtcaaccaggccaggctgtggggcccagtgatctcatcgagaggggccgaggtgttgctgtgatcgtgtgctgctggaatgtggtgaacacctacagtcgatttcacctaaagatcatccttgagaatgtgggtgggcctcatcctatcagctgaaagctttaagagcaaaaccc

SEQ ID NO: 19142 - DNA, 2300 bp, Homo sapien
actgaaagttgagaaaccggtggtgttttaagccacgaagttgatgacagttcgttacgacagcagcaggaaactaatgtaaaccctgtgccttgtgttattatccccctttacagatgctgccactgaggtcacagagttagtaacccaaggcagagccagtacgtggcagggctggttttaaattgagtcaggctggctctgggctgctgattacatttcccttttcactttggccactaggaagcttagatccacacatacgcccacttcctggctcttggtttttccttgtccttgtttggtggccctttcaccttttcttttatgtttttgctgcttgcgatgttgaatacacctcgtgagttttccctcaaatgcagtttggaacaggatggctctggatgggctgatggatgatttctcctcccctttgtgttctggcctttctaggagggtgaggacaaaatcttcttaatcaacaagcttcactccatctacgagaggaaggagagggaggagaggagcaggtgagggtccgtggagggattggggacactctgagcctggaggggagaggggccagggctggacagtagggctgccactggggctacaccacgacattgctgacacttgaccgcttttgacctacaaaaatctcccccccggcgcccaccttcactctctctagagccttctctggcctccggagcctggccattttgacagggacctaaaatacatctcaggagaaaggctgtggggcgtctggcctgtccctcgccgggccttggctgcgcccagccaggttgcagggatgttgatgtttatggggtcccctcagtgatgtctctttctggcagggttgggacaaccgaggaggctgcggcaccccctgccctgctcacagatgaacaggatgcctagggggacggcgatgggcctcacgggcccgcccagcaccctgagaccacactgttgcctcccagtgaccctgctgggacaccaggacaaggaagacagtttcgcctctcgaaagccgcagctgcgcctaggctggagctggaagggtgggtgaatccggcttgggcatccccaatgaactctgccctgcctgggactctatttattctgattaaaggggttttgcaaatgggcttgtcccttggggctctgtgtctgtgaccacacccggggcctgcttcccgctgccctggggccacctccaggcgcaggtctgggtcctgggaacctcagctggagtgggggcgccctctgctggccaagccccagatggcaggggctggaccgcgccagggcttgattcgcttgctgcctttgaccagcctgaactcgcgcccaggaggggcttacacctgcacaagtgagccgagcaggcacggattgtgaccagagcgatgcgtcaaccattgggtgatgctgtagcatctactggagcaggagacaaatttagagagggacttggaggggagacatatcagttgcaaatgagttgtggggacagttgcctcccaggcataggtaaccagcacctgtgcttggaggcgaacagggcttggtgaggtggggctggccccctgcttctggctgccagcagctggctggggggtggtgatcctgggtctgactgggctgagtttgaggagcccgtgggataccgaaaaccgtaggctgtggggggtgggcacagggattcggggaccagcccgtcatgaccccgtgctccaggtctgcagggaccagcccatgacagcccagggctccaggtctgcggggaccagcccatcacagcccagggctccaggcctgcggggaccagcccgtcagcctcagttctccaggcctgcggggaccagcccgtcatgaccccagtgctccaggtctgtggggaccagcccgtcagcctgtgctccaggcctgcaggaaccagcccgtcagcctcagtgctccaggcctgcggggaccagcccgtcagcctgtgctccaggcctgcggggaccagcccgtcatgaccccagtgctccaggtctgtggggaccagcccgtcagcctgtgctccaggcctgcgggaaccagcccgtcatgaccccagtgctccaggcctgcggggaccagcccgtcatgaccccagtgctccaggtctgtggggaccagcccgtcacggcgcagggttccaggcttgtggggaccagcctgtcacagcccagggctccaggcctgcaggagctgcgcttgggattgggggaatgaacccaggtggggaaatggtcaaagag

SEQ ID NO: 19143 - DNA, 2300 bp, Homo sapien
gctggagcctgacccccccgccaaccccctctgcagccagggccccagcccctatgatgaaagcgaagtgcacgactccttccagcagctcatccaggagcagagccagtgcacggcccaggaggggctggagctgcagcagagagagcgggaggtgacaggtgagctcaggcctggatgctgggtggtgtggaccaagacttgggtgccccagcccctcaggacgggcctcccagctctgcaggcctgggatggggtgggagatactgtggccaatggcatctccaggacccctggtgagtctttcttgctttgtaggaagtagccagcagacactctggcggcccgagggcacccagagcacggccacactccgcatcctggccagcatgcccagccgcaccattggtgagtgggaccctcagcctcggcctcggccccggccccgagttgaccccagtccctggggctgggctgggcttcctgccaggcatctccctgggtagtggctgctcccgtagctcagagccaggcccagggcgggctcctagcccatcccatctgctgcctgggggcccagcacagccccatgtggccctcgctgggctccaaaaatgactccagagtcatcacggggtaaaaataggctttcggaatgcagtggtgcctgaagtctttgttgaaaggattttcctgggtcctgggaaggggtgagggacgcagaggcctgtggtgagcccatcctgaggggagggaggcctggccctgcccggcccggccctgcccagctgcctccataggccgcagccgaggtgccatcatctcccagtactacaaccgcacggtgcagcttcggtgcaggagcagccggcccctgctcgggaactttgtccgctccgcctggcccagcctccgcctgtacgacctggagctggaccccacggccctggaggaggagggtgagtgagtgggcactggagccccagtggcggacaccggcctggggtggggtgcaagaggccagcctggcctgggcggtggctggggtgctgcagagccagaggcccctctcctatcccttagcaggctgcctgaaggcccccccgtccctctgcagggacccacggggacagggaagtgggggtcttacctcacaagcgccttggagtgcttggagggctgtggccctgggccccgagtcggggaccgtgcgtgggaaacaggcccctgtgctctgtgagcttcctgcttgtcgctgactgaagcaaacacacggctgattggcgactgaagctcaaataagggcaccgaggtgtctcgggacggtgccgcagggacacacaggcctgaccagggtcccggcttcgggctgcagggaggggcacttggggatgggcaggacctccctctccctctcgcagagaagcagagcctcctggtgaaggagctccagagcctggcagtggcacagcgggaccacatgcttcgcgggatgcccttaagcctggctgagaaacgcagcctgcggtgagcagccccgaccctgaccatgccgccgctgctgcgcccccagacccacttcctcagctgggctaggtggtgggggagaaggggctgagcccgtgggtggccggtctccaggaaggagagagtcaggcccctcattggtccaggcacctatggctgcctctgtccccagagagaagagcaggaccccgagggggaagtggaggggccagccgggcagcggcggggtctgctcctgctgtggccggctcagatatgcctgcgtgctggtatgggcccctggtctgccctggggctggggcggctgggcagggctggggtggcctcagtgcctcctccggcctcaccctcagggcctctctgcctgtgcccgcaggccttgcacagcctgggcctggcgctgctctccgccctgcaggccctgatgccgtggcgctacgccctgaagcgcatcgggggccagttcggctccagcgtgctctcctacttcctctttctcaagaccctgctggctttcaatgccctcctgctgctgctgctggtggccttcatcatgggccctcaggtcgccttcccacccgccctgccgggccctgcccccgtctgcacaggcctggagctcctcacaggcgcggtgaggaagccctaggactgggggacggggggtgcctgtcttctgctaccctggtaccgtgttcccttcttgtcccagctcccctggggcccccaacccttgccccgctgtgactccaggtggccacagccagctcccc

SEQ ID NO: 19144 - DNA, 2300 bp, Homo sapien
gcattctccctccactggacatccagctcacctggggacctagggaccaagtccctggaggagtccccttctcagacgactcctgccaagccaggcagggtggtgagggagcccagaggaggggtcatatgacaggaaacccagcttccctctccactacctccctcctcccctctcaccccatggtttcctctgctttaaactgaggccaagcaggcacttcctgtgggcccctgagatgcagaggtgaaggtgacaggcgtaggccacttggcctcccagggagctctgtgcatgctgggctgcgggtggcccacccttcccctctgcacaggagtcagggcctggtctcctgcagccctagggtccactggtccgggtctgccgcctggctgcctccagggatgtccagcctgcagctgaggccctctctgttcaactccttccagcctggataggcaggacttgacctcgaggcctgagctgggagcctgacatgggtggggatgggaacggtgggggcacaggggccaaactctttatctgccggcctcaccctggagggtgtgataatgacaggatggtgggctccccagaacctggctgctgggtttccagatactcttggtgttactgctgtacttccagcccctgtcattggcgttatggttgtgccaagacccaggcctagcacctggccggtagtaagtgctcaggaattggctccattcatgctctcccaggctagatgtttaagacatatctttgccaattctctgtccttgggcccctgggaagcccgcagcccttcctctctgctccctctctacctgctatagggcccagtcatctcaggtctgaatgttcatagcttttctgcctctctgcccacctccttcctggtttccagagtcctttctgtgtgtcaggcgcaagctatgtgctggtgctgggcacacagtgggctggggtaggagggggcacagaaccacagatgtacatgtcaataggaagtggtaggtgctccaccagggttcaatctggggaggctccccagaggaggtggcattcatgcaaattcagtgtgggtatgcagggagggggaagcagtgggaggagaggcaggggctgggtctccatgccagggtgccacttgccaagaaccagcttggggtagccatctgaggaccacactggcagctccaaaaggccccagccttgacccctgcctggtcctcgcttttgcttgcctgctctcccctgcagcagtgccctctcctgccctcctgggccccagctcacattcaccctgcctgcttcatggcttctccccgccaggaatgaccctcccttccaaatgggcttggggtggggggtacaatctcaaaggcagtttcctccatagagttcccaggtggaccactaagtctcctgctttggctgggggcaccctaaagggtgattaacttctctcagcctcagtttcctcatctgtgaaatgggaatatcagtgcataccttcctggctcatggggaataacagaaaacagggcaacgggtacagcacctggggacagtcacctaagtgtcagcgtgtcctccttttcatcccctcctctccacacagcacacaggaagtgagccagaactcttgctagataaacaatgaaccccgcccaggtgtcaggagtgggagataaccaggctccccccgccggggtcggggagagtcagcaggaggcttgcgggggcggcgggggggggggcgctgcccaatctggagtgagatactctgtgtccctggggctttcggcggcatcttacttggacgatccctaaccatgggaagcagatgagtctggaaatattgcccctttttggaacttggggaaactgagcgtcagaaaaattggggacttcaaccaggggctggaatgaatccagcccagctcagacctcaggaggaggggtcggaagttggcaggggaggaaggcatagtcgccgcggggcgcccggaggagggcgggggcgccgcgggccgggccgggtcacgtgatagccgaggcccgccccccccccccccgcccacgtgggccgggaggtgcggctactcccccggccccggcagacctgcgactggcccagtcgcccctggggccctttgccactcccttggcaaggagagccgagacctcagttcccggcggctcttgcggggcacaggtgagccctggctgcgcgcgcggcccctcctccccggcgcctcccaggtgagcggccgcgatcccggtcccgggtc

SEQ ID NO: 19145 - DNA, 2300 bp, Homo sapien
aggtctcggctctccttgccaagggagtggcaaagggccccaggggcgactgggccagtcgcaggtctgccggggccgggggagtagccgcacctcccggcccacgtgggcggggggggggggggcgggcctcggctatcacgtgacccggcccggcccgcggcgcccccgccctcctccgggcgccccgcggcgactatgccttcctcccctgccaacttccgacccctcctcctgaggtctgagctgggctggattcattccagcccctggttgaagtccccaatttttctgacgctcagtttccccaagttccaaaaaggggcaatatttccagactcatctgcttcccatggttagggatcgtccaagtaagatgccgccgaaagccccagggacacagagtatctcactccagattgggcagcgcccccccccccgccgcccccgcaagcctcctgctgactctccccgaccccggcggggggagcctggttatctcccactcctgacacctgggcggggttcattgtttatctagcaagagttctggctcacttcctgtgtgctgtgtggagaggaggggatgaaaaggaggacacgctgacacttaggtgactgtccccaggtgctgtacccgttgccctgttttctgttattccccatgagccaggaaggtatgcactgatattcccatttcacagatgaggaaactgaggctgagagaagttaatcaccctttagggtgcccccagccaaagcaggagacttagtggtccacctgggaactctatggaggaaactgcctttgagattgtaccccccaccccaagcccatttggaagggagggtcattcctggcggggagaagccatgaagcaggcagggtgaatgtgagctggggcccaggagggcaggagagggcactgctgcaggggagagcaggcaagcaaaagcgaggaccaggcaggggtcaaggctggggccttttggagctgccagtgtggtcctcagatggctaccccaagctggttcttggcaagtggcaccctggcatggagacccagcccctgcctctcctcccactgcttccccctccctgcatacccacactgaatttgcatgaatgccacctcctctggggagcctccccagattgaaccctggtggagcacctaccacttcctattgacatgtacatctgtggttctgtgccccctcctaccccagcccactgtgtgcccagcaccagcacatagcttgcgcctgacacacagaaaggactctggaaaccaggaaggaggtgggcagagaggcagaaaagctatgaacattcagacctgagatgactgggccctatagcaggtagagagggagcagagaggaagggctgcgggcttcccaggggcccaaggacagagaattggcaaagatatgtcttaaacatctagcctgggagagcatgaatggagccaattcctgagcacttactaccggccaggtgctaggcctgggtcttggcacaaccataacgccaatgacaggggctggaagtacagcagtaacaccaagagtatctggaaacccagcagccaggttctggggagcccaccatcctgtcattatcacaccctccagggtgaggccggcagataaagagtttggcccctgtgcccccaccgttcccatccccacccatgtcaggctcccagctcaggcctcgaggtcaagtcctgcctatccaggctggaaggagttgaacagagagggcctcagctgcaggctggacatccctggaggcagccaggcggcagacccggaccagtggaccctagggctgcaggagaccaggccctgactcctgtgcagaggggaagggtgggccacccgcagcccagcatgcacagagctccctgggaggccaagtggcctacgcctgtcaccttcacctctgcatctcaggggcccacaggaagtgcctgcttggcctcagtttaaagcagaggaaaccatggggtgagaggggaggagggaggtagtggagagggaagctgggtttcctgtcatatgacccctcctctgggctccctcaccaccctgcctggcttggcaggagtcgtctgagaaggggactcctccagggacttggtccctaggtccccaggtgagctggatgtccagtggagggagaatgcagagggtgaggggctgtgggggccagctagagccctgcaagggtagcagtgggtccctgctcctgtccccacggctggggctgtagccacaggtcctcatcaggg

SEQ ID NO: 19146 - DNA, 2300 bp, Homo sapien
caccaggagcccgttgagtacgttgacccgcaggtaggagagcaggcggcaggccgtctgggcccgggtctgctgctgcatcagctggaagcgacggccctcctccagctccacctgcccggaagggtggggacagaggcagctgcaggcggggtgggcatgggaggaaagggtgcaggaaacgctctcacacacagtcacaaccattcacgctcacatacacagtcacaaactctcacactgtcatgctcccatagacactcagattcacacattcacaggcgtgctcgccatcacccattcagtcacatgtgccctcacactcggccacacatgcacacacattcacacgctctccatcacgctcccacaggctccctcccacacacgctcacacacactggcacggtcgcacttgctcgcacacacctggaacacgtggctctcacgcactcgctcccatatacctggagcttgtggatctcaggcactcactcgtgcacacaccttgaactcgttgctgatctcatgcttcttgatggtggctgcttcctgcacccggatgcagaagtcccatgaggagaagaccttggcgctgagaggcgcctgatagccctgacccagcagagtcttctgcggcagccccttcaccatcctgcggggcaggagaccaggggctgctggaggaggggcacctctaccatccagcctcagccttggctcggctctgggtctgggaaggcccctgcagccccaggtgcaggtcctggtgagtgaggagtcggggtagggggcggtggccctgttcctaaggtttgcggccagagcctgggctgaggaagcacccaggagcctgctgtgccgggccatgggccttcctgccaatgggagggtaccctgccaaggaaggggtgatcagggaagattccctggggaaggggtgaaggtgtggacctcgctctcaccgccgcagagtcccacagaagcagaggagcaggcaggccagcgggctgaggaggtaggccaggcggatgctgtacacggagctgctctccggccccactcggtacgcaccgtagaagagataggtgttggtgaaggcctggggacagcgacgaagatacccagcccgggtgagcaccaggctctgctcaagtgctttccatatatgatcttgttagcccccgtgcaatccccccatcaggtagggagtgtcccgtcttacaagggcccacagaggttcggcaacgtgcccacggtcacagggctttgagaaatagagccacgactggaacccaggaaccccattggtgaccactcgatggcttcccaggatgagggtggggaagtgcttctcccagaggccggggcacttttccccctttgtccctggcaccgcctacaccagctgggctctgaggaccacgggcatgtgtccatgagtctatgttgggcacagtggcctcagcctctctctaaccccaccaccggccaggccagtctgtctaggtaagaccatcccctgaggagccgaaatgtccctggaggagcagaggtcctcttagacttgtgtcccctgaagccagttccctgggtctcccagactctggaccatagccgggacagacctcactcaccctgccagtcaaaacatgccaaagttgattgtggaacctcaaaacgccaggcggggactggcggctaccagggcactggagggctgttgaggaggaagggggtcaatagagagggatccccaaggcataggtgaggctctgcggctactgctctataacccccaaccctggggaggcctgggcagggggctgaggatgtgccaaaggcgtgccccacacaaggcgaggtcagggagagagagccccggggcctgcacggcaggaccacgcccagcgttgtcgccacgctctgggccctgggccagcccccccatggcgcaggtgggcaccggagcacttcccctggtgggcctcacactcactcaagttcagggtggggcctgggtcaggggggcggagccagaccaggggcagcagcacgaagcttgcggtgagcagcaggctcagcaggttgagtagcagcaggaagcggaggaaggtgaagtaggaccgaattcctgtgccgaagaggcctgcagtgggagagcagggtgggtcagggaggccggggccggggctggggccgcgctgagagtccaagggcgggcccaccggacggcgtggggtgcccgccaggctcccacccgcccgagtccggaggtaccgctgacagtcacctggggg

SEQ ID NO: 19147 - DNA, 2300 bp, Homo sapien
ggcatgttttgactggcagggtgagtgaggtctgtcccggctatggtccagagtctgggagacccagggaactggcttcaggggacacaagtctaagaggacctctgctcctccagggacatttcggctcctcaggggatggtcttacctagacagactggcctggccggtggtggggttagagagaggctgaggccactgtgcccaacatagactcatggacacatgcccgtggtcctcagagcccagctggtgtaggcggtgccagggacaaagggggaaaagtgccccggcctctgggagaagcacttccccaccctcatcctgggaagccatcgagtggtcaccaatggggttcctgggttccagtcgtggctctatttctcaaagccctgtgaccgtgggcacgttgccgaacctctgtgggcccttgtaagacgggacactccctacctgatggggggattgcacgggggctaacaagatcatatatggaaagcacttgagcagagcctggtgctcacccgggctgggtatcttcgtcgctgtccccaggccttcaccaacacctatctcttctacggtgcgtaccgagtggggccggagagcagctccgtgtacagcatccgcctggcctacctcctcagcccgctggcctgcctgctcctctgcttctgtgggactctgcggcggtgagagcgaggtccacaccttcaccccttccccagggaatcttccctgatcaccccttccttggcagggtaccctcccattggcaggaaggcccatggcccggcacagcaggctcctgggtgcttcctcagcccaggctctggccgcaaaccttaggaacagggccaccgccccctaccccgactcctcactcaccaggacctgcacctggggctgcaggggccttcccagacccagagccgagccaaggctgaggctggatggtagaggtgcccctcctccagcagcccctggtctcctgccccgcaggatggtgaaggggctgccgcagaagactctgctgggtcagggctatcaggcgcctctcagcgccaaggtcttctcctcatgggacttctgcatccgggtgcaggaagcagccaccatcaagaagcatgagatcagcaacgagttcaaggtgtgtgcacgagtgagtgcctgagatccacaagctccaggtatatgggagcgagtgcgtgagagccacgtgttccaggtgtgtgcgagcaagtgcgaccgtgccagtgtgtgtgagcgtgtgtgggagggagcctgtgggagcgtgatggagagcgtgtgaatgtgtgtgcatgtgtggccgagtgtgagggcacatgtgactgaatgggtgatggcgagcacgcctgtgaatgtgtgaatctgagtgtctatgggagcatgacagtgtgagagtttgtgactgtgtatgtgagcgtgaatggttgtgactgtgtgtgagagcgtttcctgcaccctttcctcccatgcccaccccgcctgcagctgcctctgtccccacccttccgggcaggtggagctggaggagggccgtcgcttccagctgatgcagcagcagacccgggcccagacggcctgccgcctgctctcctacctgcgggtcaacgtactcaacgggctcctggtggttggggccatcagcgccatcttctgggctaccaagtactcacaggacaacaaggaggtgtcaggcaactgcattcatttaatcctggccagaactgcgggggtgagacaggatgatcccattttacagatgaggaaaccgaggctcagagaggttcaatcggtcgtggccacaggtcacggccaaggcaggcgggctcccactggatattcccgccaactgccaggctgctgcagggaatagcttacaggcgaccctattctgggcctgccccagagttacactttagggcactgtggggggcggggagcagacaggggccccccagcacgcgggctcccctgacctgccttttcccgcaggagtccctgtttctgctgctccagtacctgccccctggggtcatcgccctggtcaacttcctgggtcccctgctgttcacatttctggtccagctggagaactaccctcccaacacggaggtcaacctcactctgatctggtgagtgccacccttggtggggacaagtgggcatgtaacaagtctgcatcctgctgctctcttttggttgtcacctggcacctggggtccccagctgagaggcttcccccttcactagtggcccaagggaaggcaggtaca

SEQ ID NO: 19148 - DNA, 2300 bp, Homo sapien
gggggcggaggggtgcaggagagatgtttgggtcccccaaggcctggggaaaatggcccatgagtctgccttcgctctctgaccccagcttccccacagactgggaagaggaagagctcctcatgagctgccttaactcaaggttcccctgaacaccaccacgtggagaaaaagagtgagtttccctggcctccaggcaagaggctgccagcagcccagggcctgggcagccagccagctccccagtgacctctggctcccttcagtcttcagttcccttccccacccgccttcagcagaagtgagaacagactttgggaagggaagggagttttactaagaaactaagagaaaatgctcttgctccccagctgggagaaaccgaaaacagagaggccggtgggtgcacaggaggcagcctccatccccgggaccatgggtagcaaggtgcagaaacggactcatgccagctgggagagggggccaccgaggggtcaacagagccagtctgcagtgacctccaggacacctgcacctgcctccccaccatccttctggccactccctggtcagcagggccactccctcagaccagcttcccaacacacccaggcctccggtgcagcaagtgcctgggaaaggctgagaggagagctgggccggggctgtgagtggcctcccttggtcaggtgttcactcctggacggtgcccaggggcagagagtgtgattgaccggtcaggagccacaggtggcagcagctcccacaggaggcaatggtcacctggtggcaggggacatattcctgaaggaggcagccagaaaaggcattccccacacaaagtgtgggaaactgagccgggccagaaagtgacaggctggtccagcagccccaggctgagcttgggcacaaagccgggtgcagtggcccacagcggagctggcagggccccagcctcaatcccttgcgcccttacatctctctgtgttccggggaatgcctggccccagccctggcctcggggctctgggaggccctgctcacccccaccctccctgcatgtgcaggaggctctgtggctgaactctgcacacacactgcctgcgatgcagctgggtctgctgctggccaaggccagcactggggccagttccctggggaatgaccatccatgtgacctcccaccaccctcagtggggcctgagggacttctgaagggcggtgcttgggcacaccacgctccgggacccaggactccaggacccatcacactccaggaccaggggcctcgtcggtctggggtttcattctggggctgggtgcagccttggcctcccggctgtgaaccatcatgggtggggctgccttttctcagcccagcaggtccccagctgcttggaaaggccccagtgattacatgagggtcacctgggtcatgtaggacgggctcctcctctcaaaatgagaagactcacagccttcattccccttgccgcgtagcatggtgctcacgggctccagaagttacagcgtggacatctttttttttttttttttttttgagatggaatctcactctgttgcccaggctggagtgcagtagcgtgatcttggctcactgcaacctccgcctcctgggttcaagcaattctcctgcctcagtctcccgagtagctgggattacaggcgcacgccaccacgcccggctgatttttagtagagatggagtttcgccatgttggccaggctggtctcgaactcctgacctcaggtgatccgcccatccaggcctcccaaagtgctgggattacaggtgtgagccactgtgccccgcggagcatggacaccttctgcccaccacgtgagcccgggatcctgcggctcagaggtgactgctgagtctaagccctggtctggcttcaaggtccaaactccttccacttctctggggattgagggggagtttgctgtaccgggcctgccggggctctctgggccccgccctggtagctgaggccctggggtgctgcggcctccaggttatctccccactgcaggcacccacccagggagcatcccaggggcctcagggtgggggaggccaggaactaggaggttctcactgcccgagcagaggccctacacccaccgaggcatggggctccctgggctgttctgcttggccgtgctgggtgagtccaccagggacgtgatggtggggctgctgctggggccttgaggtcttgggctcaggtgggggtactgggagcacaggagagatgaggcctgaaggaagggca

SEQ ID NO: 19149 - DNA, 2300 bp, Homo sapien
gaacccacccaggctcataagcaacccctcccccatcccactgaaaaacccaggccacaccctggagcccctccctgcctggcctgccactctttcctcctctctggggctaagcctggggtagggtcaaagaccccctccccattcctcctggtctgggcagagccccaaggctgtgaagggcagtgtggcgtcacacttaagatggtgtgcaaggccgggagcggtggctcacacctgtaatcccagcactttgggaggccgaggcggttggatcacctgaggtcaggagttcgagaccagcctgaccaacatggagaaaccccgtctctactaaaaatacaaaaattagcctggtgtggtggtgcatgcctgtaatcccagctactcgggaggctgaggcaggagaatcgcttgaacctgggaggtggaggttgcggtgagccgagattgtgccattgcactccagcctgggcaacaagagcaaaactctgtgtcaaaaaaaaaaaaaaaaaaaaaaaaaaagatggtgtgcaaggccgggcgcagtggctcacacctgtaatcccagcactttgggaggccgaggcggttggatcacctgaggtcaggagtttgagaccagcctggccaacatggtgaaaccccgtctctactaaaaatacaacaacaacaaaaaaattagctgggcgttgtggtaagcgcctgtaatcccagctacttgggaggctgaggcaggataattgcttgaaaccggtaggcagaggtggccgtgtgctgagatcgagccactacaccccagcctgggcaacagagcaagagtccatctcaaaacaaacaaaacaaacaaacaaacaaacaaacaaacaaaaccaaaaacgaaagttagcgaggcgtggtggcagctactagcagtcccagctattccagaggctgaggtgggagaattgtctgagcccaggaggcggagtttgcagtgaaccaagatcacgcctttgcaccccagcctgggtgacagagtaagaccacatatcggccgggcgtggtggctcacgcctgtaattccagcactttgggaggctgaagcaggcggatcacgaggtcaggagatcgagaacaccctggccaacatggtgaaaccccgtctccactaaaaatacaaaaattagctgggcatggtggcgcgtgcctgtagtcccagctacttggcaggctgaggcaggagaatcgcttgaacccgggaggcggaggttgcagtgagccgagattgcaccattgcgacagagcgagactccatctcaaaaaaaaaaaaaaagaaaagaccacatataaaaaaatatatatatggcatgcaaacagaaatgaagttttcagggcgacaggcagatggcaaagtttaatccagttccagttcagccccctctcgcctccgtccctctctacctccatcccaagaaaaaccggtacagagggtctggtgcagggtaggctggggcaggctctgtgtgtgttggagtggggagcggaggttgtacagacagaggtgtgggatcacaggctgactgaacccggaagaattccagacccccctttgctagttgcaggtgcagattaacaacagcaggtgtgccaggtggggctcacagtcaacccaggtgagctggaccacgtgagagttgaaccataggactgggccaccaggaggtggggtgcctctccagggaagaggggagcaggtgggggggaggggctgggccttttcgcagtgtgcccccctccctctccctacacccagagagatgtgacagcacctgagaggcgaggacagggccacacagacccccttatttctgtgaccctcctgaagccctcacaccaacagtgtctgtgtttgctgaaggccaccagcactccaagaatcccagctggcaggcttttttcttttttttaaataaatgtttttgtgtatatttaaggtagacaacctgatatgatgggattcatatagataatatagatagcacaaaggttcctatagcgaagcaagttaacatatccaccatctctcatagttacccttttttttttttttttttttttgtggcaagagcagctaaaacacactcattttgcatgaactccaaatacgaacagtgcacgctgatggcctgcagtcctctgccgtgcttggctctctggacggttcattctacatggctgctgctttgcgtcctctgacctccccattccctatcctgaaccccccaaactcctcttcactcagacggcgggtgctcctg

SEQ ID NO: 19150 - DNA, 2300 bp, Homo sapien
tctctgggtgtagggagagggaggggggcacactgcgaaaaggcccagcccctcccccccacctgctcccctcttccctggagaggcaccccacctcctggtggcccagtcctatggttcaactctcacgtggtccagctcacctgggttgactgtgagccccacctggcacacctgctgttgttaatctgcacctgcaactagcaaaggggggtctggaattcttccgggttcagtcagcctgtgatcccacacctctgtctgtacaacctccgctccccactccaacacacacagagcctgccccagcctaccctgcaccagaccctctgtaccggtttttcttgggatggaggtagagagggacggaggcgagagggggctgaactggaactggattaaactttgccatctgcctgtcgccctgaaaacttcatttctgtttgcatgccatatatatatttttttatatgtggtcttttctttttttttttttttgagatggagtctcgctctgtcgcaatggtgcaatctcggctcactgcaacctccgcctcccgggttcaagcgattctcctgcctcagcctgccaagtagctgggactacaggcacgcgccaccatgcccagctaatttttgtatttttagtggagacggggtttcaccatgttggccagggtgttctcgatctcctgacctcgtgatccgcctgcttcagcctcccaaagtgctggaattacaggcgtgagccaccacgcccggccgatatgtggtcttactctgtcacccaggctggggtgcaaaggcgtgatcttggttcactgcaaactccgcctcctgggctcagacaattctcccacctcagcctctggaatagctgggactgctagtagctgccaccacgcctcgctaactttcgtttttggttttgtttgtttgtttgtttgtttgtttgttttgtttgttttgagatggactcttgctctgttgcccaggctggggtgtagtggctcgatctcagcacacggccacctctgcctaccggtttcaagcaattatcctgcctcagcctcccaagtagctgggattacaggcgcttaccacaacgcccagctaatttttttgttgttgttgtatttttagtagagacggggtttcaccatgttggccaggctggtctcaaactcctgacctcaggtgatccaaccgcctcggcctcccaaagtgctgggattacaggtgtgagccactgcgcccggccttgcacaccatctttttttttttttttttttttttttttgacacagagttttgctcttgttgcccaggctggagtgcaatggcacaatctcggctcaccgcaacctccacctcccaggttcaagcgattctcctgcctcagcctcccgagtagctgggattacaggcatgcaccaccacaccaggctaatttttgtatttttagtagagacggggtttctccatgttggtcaggctggtctcgaactcctgacctcaggtgatccaaccgcctcggcctcccaaagtgctgggattacaggtgtgagccaccgctcccggccttgcacaccatcttaagtgtgacgccacactgcccttcacagccttggggctctgcccagaccaggaggaatggggagggggtctttgaccctaccccaggcttagccccagagaggaggaaagagtggcaggccaggcagggaggggctccagggtgtggcctgggtttttcagtgggatgggggaggggttgcttatgagcctgggtgggttcttggtaggtggtgggcttcctagaggaggcggtgggagggcaggggcaaagagggtgagcggtcctcagttcgtccgtcttcccgggggactctctgaccctttctggtccgtgctgcggccggcgtggcccggagactagcccctcaaccccgaggtggggtggacccgggtgctccgcggccacagcccctccccgcctctagaagcgcagtcccgcggctcgcccgccgctcgcgagggccgcactttgccctcggtccctagcggcgcctggccacgcccccggcgggtggagtcgggcggggcgccgggcaggttcctctgcgttccgcggcggcggcagcggcggcgacggcgacatggagagcggggcctacggcgcggccaaggcgggcggctccttcgacctgcggcgcttcctgacgcagccgcaggtggtggcgcgcgccgtgtgcttggtgagcccggggagggcgggccgagggcaccctggggacccc

SEQ ID NO: 19151 - DNA, 2300 bp, Homo sapien
gtatgcagactgagcccaccacagccagaaaagagcagggcagagcaggcagggtataatatccctacaaagagggttggaagtcagaattctctatggggaagaggtccaggaatggtactcaggtggtcccaggaagtgtgggaggagtaaccttctccaagatgtagtggggaaggcagaagcaaaggctacatgtagagggaacctgcgactgcattccaaagtaacctcatcccagagttgttcccagagttcagagtttttctttctttctttttggggtggagtctcgctctgttgcctaggttagagtgcagtggagcgatctcagctcactgcaacccctgccttccgggttcaagagattctcctgcctcaacctcccgagtagctgggattacaggaggctgccaccatgcccagataatttttggttttttttttcagtagagatggggttttaccacgttgaccagggtggtctcaaactcctaacctcaagtgatcaacgcacctcagccttccaaagcgctgggattaaaggcgtgggccaccacacctggcatacagcttttctaaattaatttcagaaagtctttgtgtgcagcgtcaaaagcacttgcttctgggtccaagaagtccaactctgagccacatcttcctgagcaaggggtttgagctgaagtgatccccagggccataaaagaatgttggggcagggcatggtggctaacatctgtaatcccagcactttgggatgctgaagtaggaggattgcttgagaccaggagttcaagaccagcttgggcaacatagcaagaccccagctctataaaaataaaataaaattagctgggtggaggcgggggggtgcacgcctgtagtcccagctacttgggaggctgaggtgagagaattgcttgagcccaggagtttgagaccagcctgggcaacatagcaagatcctacctctagaagaacaaaaacaaaacaaaaagaatggtgcgtgggtagtttactcaagaaactcactagccccacccgggtcagggaatggttctatcacctcaggagagcagaggctccacggcttcagactccttggtttagaaagcgactacgtttccttggccttagaaggaaacagccacattgaataggggtgtacaaaaaggcctggcctacaggggacacaactggttgccaccttctcagaggacttggtggggaagacagctaagctgtaagcagctgtcaccagctccaggagggagtggcgtccacacaggacgaggggcttggcctgggcagaagagggcagagacttcctcctggactgaattcaagggaggagcaccccaggcgggagctgtaggaggctgtgctggtccttctaggggaagggaaggggagggaagggaaggggaggggaggggaggggagggaaggggaggggagggacgggacaaggggtccccggagaagaggaaggagctccaccccagccccgcgaagccattacctttttcctgagaacatcggcccgagaatcacctaggagagaaggtgaggtcatttgagggcccgccctgcgcggatgcctggacacaggctatcaccacgaccacctcatccccagccacgcgcagggctggcccccgcacctggatctgcccccgggtcttgctgggggagccaggcagcacagtgggcaggttaatgcagctcattgcgcctccgggaagttcacgaacccgagtactctccaaggccgtcccgcagtaagcccctggttcccgcgccgaccgctttaaaccacggcgtgctggccaatcacgagccggccccgccgccatggggccaatcagcgcccggccgctgacctggcgggagatttggccgcagcccgccccctcgtgggaggaatccgggacgtgcgcccagggactgggagggcctggaaatcagggcgatggacgtggctgatcggggtggggcctggtctgagccccgcctcggtccgcccaccaagtttaaaggggcggagcgaggcggggctctggccatataaacagagggacgcacgcccatgcggctgtagacgccatgatggatgtgtctggtgtgggtttcccaagcaaggttccttggaagaagatgtctgcagaggtaggtggattgcagggagggactaaggggctggggcggagttagctcatttattagattggaattccaagaaggaagcttagaagccgtctagagcactcctgtgggcatgcagagcgcctagtgcg

SEQ ID NO: 19152 - DNA, 2300 bp, Homo sapien
gtcagggcagcctcatggcaaggcctgaggtcaaatgccatctgacctccctcacttacttactgttttatcctcaacaagttacttagtctctgagattcagtttcctgactggtagaaggtatctatccaggcccggcacagtggctcacacctgtaatctcagcactttgggaggccgaggcgggtggatcacttgaggccaggagttcaagaccagtctgtccaacatggcgaaaccccatctctattaaaaatacaaaaattggccaggcgcagtggctcatgcctgtaaacccagcactttgggaggccaaggggggcggatcatgaggtcaggagttggagaccatcctggctaacacagtgaaaccccatctctactaaaaatacaaaaaaattagccgggcatggttgcgggcgcatgtagtcccagctactcaggaggctgaggccggagaatggcgtgaaccctggaagaagaggttgcagtgagcccagatcgcgccactgcactccagcctgggcgatagagcgagactctgtctcaaaagaaaaaaaaaaaaaattagccaggcatgtagtaccagctacagtgtgcctgtaatcccagccactcgggaggctgaggcaggagaatcacttgaacccgggaggtagaggttgcagtgagccgagatcatgccactgcactccagcctgggtgactgagcgagactgtgtctcaaaaaaagaaggcatgtatccaaatcacaaggttaaaagagataaagcatgcgagtaaaataaagcaagccagtcagtgtgggttgcttcttcctcccagtgaaggagctctttgtcagaggtccttggatctgtccaatctgtacctggaaaggttattacctgtaggatccttacagccacacctggcacactctgtgatcactaccaccatctttgttgctattatttatgatcatgattatacaatgggtttcttttctttctttctttttttttttgagccaccgcacccggcctgtatgtttctaaccttcacaaccccaatgtaaataccagctgttctgaatccttcagcctgtgccacataagcacagacccaaaaacattgtgtaacctcagatcaaggtccagaactttgtcccctaacctcctgcgggtctatggatttttttttttttttttttttttttttttgagactaagtcttggtctatcgcccagccttccaggctggagtacaaatggcatgatctcggctcactgcaacctccacctcctgggttcaagcgattctcctgtctcagcctccccagtagctgggattacagaggtacatcaccacgcccggctaatttttgtatttttagtagaaacggggtttcaccatgttggccaggctggtctcgaactcctgacctcgtgatccgccaaaagtgctaggattacaggtgtgagccgccacgcctggcagggtctacggatattattagcatagtcaggacttcaattttctttatcctgaaaaccaggttaacaaaaatccttaggagaaggtaaaatacaccatggtgctcaagcactggggacctggcacgcactaggcgctctgcatgcccacaggagtgctctagacggcttctaagcttccttcttggaattccaatctaataaatgagctaactccgccccagccccttagtccctccctgcaatccacctacctctgcagacatcttcttccaaggaaccttgcttgggaaacccacaccagacacatccatcatggcgtctacagccgcatgggcgtgcgtccctctgtttatatggccagagccccgcctcgctccgcccctttaaacttggtgggcggaccgaggcggggctcagaccaggccccaccccgatcagccacgtccatcgccctgatttccaggccctcccagtccctgggcgcacgtcccggattcctcccacgagggggcgggctgcggccaaatctcccgccaggtcagcggccgggcgctgattggccccatggcggcggggccggctcgtgattggccagcacgccgtggtttaaagcggtcggcgcgggaaccaggggcttactgcgggacggccttggagagtactcgggttcgtgaacttcccggaggcgcaatgagctgcattaacctgcccactgtgctgcctggctcccccagcaagacccgggggcagatccaggtgcgggggccagccctgcgcgtggctggggatgaggtggtcgtggtgatagcctgtgtccaggc

SEQ ID NO: 19153 - DNA, 2300 bp, Homo sapien
atcccagctactgggggggctgaggcagagaattgctggaacccaggagatggaggttgcagtgagccaagattgtgccactgcactgcactccagcctggcgacagagcaagactctgtctcaaaaaaaaaaaaaaaaagtgaaaaggagttgttcctttcctccctcctgagggcaggcaactgctgcggttgccagtggaggtggtgcgtccttggtctgtgcctgggggccaccccagcagaggccatggtggtgccagggcccggttagcgagccaatcagcaggacccaggggcgacctgccaaagtcaactggatttgataactgcagcgaagttaagtttcctgattttgatgattgtgttgtggttgtgtaagagaatgaagtatttcggggtagtatggtaatgccttcaacttacaaacggttcaggtaaaccacccatatacatacatatacatgcatgtgatatatacacatacagggatgtgtgtgtgttcacatatatgaggggagagagactaggggagagaaagtaggttggggagagggagagagaaaggaaaacaggagacagagagagagcggggagtagagagagggaaggggtaagagagggagaggaggagagaaagggaggaagaagcagagagtgaatgttaaaggaaacaggcaaaacataaacagaaaatctgggtgaagggtatatgagtattctttgtactattcttgcaattatcttttatttaaattgacatcgggccgggcgcagtggctcacatctgtaatcccagcactttgggaggccgaggcaggcagatcacttgaggtcaggagtttgagaccagcctggcaaacatggtgaaaccccatctctactaaaaatacaaaaattagcctggtgtggtggtgcatgcctttaatctcagctactcgggaggctgaggcaggagaatcgcttgaacccgtggcggggaggaggttgcagtgagctgagatcatgccactgcactccagcctgggcgatagagcgagactcagtttcaaataaataaataaacatcaaaataaaaagttactgtattaaagaatgggggcggggtgggaggggtggggagaggttgcaaaaataaataaataaataaataaaccccaaaatgaaaaagacagtggaggcaccaggcctgcgtggggctggagggctaataaggccaggcctcttatctctggccatagaaccagagaagtgagtggatgtgatgcccagctccagaagtgactccagaacaccctgttccaaagcagaggacacactgattttttttttaataggctgcaggacttactgttggtgggacgccctgctttgcgaagggaaaggaggagtttgccctgagcacaggcccccaccctccactgggctttccccagctcccttgtcttcttatcacggtagtggcccagtccctggcccctgactccagaaggtggccctcctggaaacccaggtcgtgcagtcaacgatgtactcgccgggacagcgatgtctgctgcactccatccctcccctgttcatttgtccttcatgcccgtctggagtagatgctttttgcagaggtggcaccctgtaaagctctcctgtctgactttttttttttttttagactgagttttgctcttgttgcctaggctggagtgcaatggcacaatctcagctcactgcaccctctgcctcccgggttcaagcgattctcctgcctcagcctcccgagtagttgggattacaggcatgcaccaccacgcccagctaatttttgtatttttagtagagacaaggtttcaccgtgatggccaggctggtcttgaactccaggactcaagtgatgctcctgcctaggcctctcaaagtgttgggattacaggcgtgagccactgcacccggcctgcacgcgttctttgaaagcagtcgagggggcgctaggtgtgggcagggacgagctggcgcggcgtcgctgggtgcaccgcgaccacgggcagagccacgcggcgggaggactacaactcccggcacaccccgcgccgccccgcctctactcccagaaggccgcggggggtggaccgcctaagagggcgtgcgctcccgacatgccccgcggcgcgccattaaccgccagatttgaatcgcgggacccgttggcagaggtggcggcggcggcatgggtgccccgacgttgccccctgcctggcagccctttctcaaggaccaccgcatctctacattcaagaactggccct

SEQ ID NO: 19154 - DNA, 2300 bp, Homo sapien
gtcttctcggtactcctgcagacaccagccacacatgtgcagacgtgcatggctatttgctgacctgtcttcccaccgttcagaaaacaaaaacccggggagctcactgcaagagttgttcctgggcttcaattcctggatctggcacctggcgcacagtaggtgcacaagcaaatacctgagtgaatgaatggatgtctcctctttggggatcacgtggaaaccccagaagtcaaggccccagtttggtcccatccagctgaaaacaggtgtaaataatgtaggctaagcccagcggagagaaaatctgcagcttagttagtcctttgctttgttgagctagattcagctgagtcaggaaatccttcgtgatggcaagacgggcttggggcaagctgggccgcacaactcaccctctcaacacagaccttggatgttgaaagtgaatacagtgcactgtcctcacaacggggaaaaggaggagaacggtatgcgggatcccctgtactagccttacaacttcctgtgaattttcatttcaaaataaaaggttacaatgtacagagaggatctatgaaagccttggggaggcaggtgtcagctccatatgacagcctttctgacaaagctgtctgaaaatggaatggggtgctttaaagacagccctcactccctagaatcagacagccgaccatagccaccctcccaagctgacagtgtccttcagcagtgagggcccagctctggagccagattgcctgggttcaaatcccagctctaaaagttacttattcgactatcctggacaagttatttcatttctacaagtcttcatttctgcattaaaaaatggtagctaggtcaggcccagtggctcacgcctataataccaacaagtcggacgctgaagcaggatgatcacttgagcccaggagtttgagaccagcctgggcaacaaagtgagattccatctaaacaaaaaaaaaaatttttcaattagccgggtgtgatggcgtgcgcctgtagtcccagctacttgggaggctaaagtgggaggttcacttgaacgcaagaatttgaggttgcggtgagctgtggtcattccactgcactccagcctgggagggcaaggccttgtctcaaaaaaaaagaaaaagaaaaaaaaagtagataaaaccacatgagactttattggcaattgtgagttactctttccacatggcgacagcctgcaatgggggctccagtttggcttgctggtctcttctgggcagcgggcactgctgtctctactttccaggatggcagttggcccgaggggctctaacctgccattggaacctcacccatagcccagaagcctcattcacaacccttcccagactccactccaacttagagaacctgaaaaatggacatgtggacatgtatctgaaagaaagtctaggcggttgcacttagacaagggcctacggctttattaacagatgtcgaggaagctttcaggtgctggtagccatgagggtctggttttaaggatggcctttaaggaaaggccgtggcaggcgggctgagaggggcggctccagctcagccctgcccacagcacaggctcacagaagccgagatccacatcaccgcctggcatgcaaaggagttgaagacaaaaccatttttttccagcttctctacaaagccaattactaagcaacagttattaaagtgaagtatccatttacagactgacacaaatatcaaaaataagcagcttagatgagtacagaggctggagtgcattttctgctaacaaaaaccactgtgatattctcccagtttagagggaaaagtctatctcaggccgactcagatgtggcagaaataagtgggtctgaagtgcattttcagttgtttctgcccggaaggagcccggatgatacaaacaggtctggggttcgtggctctggcaagcgcccagagacaactgcgtctctgccaggacgctcatcctcactgcggctgtctgggcagatggctgttggcaggctagggacgacgatgaaaaactgacaatattttaaaaacccagtagggtccacagcagtgtttgaaatgacaggctttttatttctcaggaacagccgagatgacctccagaggtttccagcgaagctgtaacaatccaccctgcagctctatgacagggaggagggcgaatcaaatccatcatcttacgccagacttcagccctgcgggagctgctgcctccaaagaaagcggggacctgggcggactgcgtctct

SEQ ID NO: 19155 - DNA, 2300 bp, Homo sapien
gcgtgagccactgcaccccgctgaaacctccttctagataacagcggcgttaagcatttttttttttttttgagatagagtgttgctctgttgcccaggctggagtgcagtgatgcgatctcggctcactgcaacctccacctcccaggttcaagcaattcttctgcctcagcctcccgagtagctgggactacaggcacacgccaccaggcccagctaatttttgtatttttagtagagacggggtttcagtatattggccaggctggtctcgaactcctgacctcatgatccacccgtctcagcctcccaaagtgctgggattacaggcgtgagccactgcacctggccaaaacctcctcctagataacagtggcgttaagcattttttttttttttgagatggagtcttgctctgttgcccaggctggagtgcagtggtgtgatctcagttcactgcaacctctgcctcccgggttcaagtgattcttctgcctcaggctcctgagtagctgggataacaggcatgagccaccactcccagctaatttttgtatttttagtagagacagggttttgccatgttggccaggctggtctggaactcctgacctcaagtgatcctcccacctcggcctcccaaagtgctgagattacaggcgtgagccactgcacctggcctttttttgttttttaagacagggtctcactctgttgatcacagccacagctcactgcagcctcaacctcctgcctgggttcaagcaatcctcccaccttggcctcccaggtagctgagaccacaggcacaagccaccatatctggccctacgtaagctttatgtgggtgcaataacagatctcaaaccagctctcagctcaagagaaggggaagctgggcacagtggctcacgcctataatcccagcactttgggaagccgaggcaggaggatcacttgaacccaggagttcgagaccagcctgggcaacatagggagacccctgccctccctgtctctgaaaaaaaaaaaaaaaaaaaaagaaaggagaggctgggcttggtggctcacacctgtaatcccagcactttgggaagcccaggcaggaggatcacttgaaccctggagtttgagtccagcctgggcaacatagggagaccttgtctctaaaaaaataaatagagtgagagagagaaggggaagtcaccgggaggacacacatggagcacgcagcccaaatggggctcctctgttctccctgcagagtcagttcgtacctttcacatgcacaaaggtgttgatccaaccgaagcaatattgattcttgttatattgctttattgtggggtcagtgtcagagtaccacgagttttcatcacgcaccgttctttccccagctgcagtgtgtttagggggggaacgaggccccaccccctatccctatcgcctctgcctttataacggctgctactctctgagcacctgttgagttctttcaccttccagatctaatgtgctatccccacccctagagaacagggctgctggatgccacatggctcccagagaggggctgtggtcagggaagccccagctccaagggggctggaaaaccccagagctgcccacgtgcggcaacacagtctggtgctgcaggtgtgaggacggctacaaaatacctgagccattctgtcactctgtctgaactctgtttgaaatattgtttcaataactgctaggctggtttttccttcctgactatattcctcaaaccaacaagagcctagcagaggaaagcatggccaaaacgccccaagaagagagccttggcttcacctccaagggccaccatccgggaggatgtcctcagacctctgatcccctctctgcaggctctgcccagccctgtgtggcaacccagaggaagcctccccttcgtttgagatttaaccccagaccttaggcgatggctgcccagcctgtcccttccgcctgtgtggctgcccacgcgggcgttgctcatggggctagtcctgggtggatgggtgggggcctctcgccggctcctctgcctcccacccccactggcaccccacgcctgtcctagaaggttctttctgcctgttttctccgtgagtgactggacaggcagaggccggccttgctggagggggcatttgtaattatgagtgaatccaaaacaaggttttttccttccgcagccccccgcccggctgtggggcccagccactgcacttcaccggatgccgtctggttggtcctcaggactgatacagacc

SEQ ID NO: 19156 - DNA, 2300 bp, Homo sapien
tcacagccacagctcactgcagcctcaacctcctgcctgggttcaagcaatcctcccaccttggcctcccaggtagctgagaccacaggcacaagccaccatatctggccctacgtaagctttatgtgggtgcaataacagatctcaaaccagctctcagctcaagagaaggggaagctgggcacagtggctcacgcctataatcccagcactttgggaagccgaggcaggaggatcacttgaacccaggagttcgagaccagcctgggcaacatagggagacccctgccctccctgtctctgaaaaaaaaaaaaaaaaaaaaagaaaggagaggctgggcttggtggctcacacctgtaatcccagcactttgggaagcccaggcaggaggatcacttgaaccctggagtttgagtccagcctgggcaacatagggagaccttgtctctaaaaaaataaatagagtgagagagagaaggggaagtcaccgggaggacacacatggagcacgcagcccaaatggggctcctctgttctccctgcagagtcagttcgtacctttcacatgcacaaaggtgttgatccaaccgaagcaatattgattcttgttatattgctttattgtggggtcagtgtcagagtaccacgagttttcatcacgcaccgttctttccccagctgcagtgtgtttagggggggaacgaggccccaccccctatccctatcgcctctgcctttataacggctgctactctctgagcacctgttgagttctttcaccttccagatctaatgtgctatccccacccctagagaacagggctgctggatgccacatggctcccagagaggggctgtggtcagggaagccccagctccaagggggctggaaaaccccagagctgcccacgtgcggcaacacagtctggtgctgcaggtgtgaggacggctacaaaatacctgagccattctgtcactctgtctgaactctgtttgaaatattgtttcaataactgctaggctggtttttccttcctgactatattcctcaaaccaacaagagcctagcagaggaaagcatggccaaaacgccccaagaagagagccttggcttcacctccaagggccaccatccgggaggatgtcctcagacctctgatcccctctctgcaggctctgcccagccctgtgtggcaacccagaggaagcctccccttcgtttgagatttaaccccagaccttaggcgatggctgcccagcctgtcccttccgcctgtgtggctgcccacgcgggcgttgctcatggggctagtcctgggtggatgggtgggggcctctcgccggctcctctgcctcccacccccactggcaccccacgcctgtcctagaaggttctttctgcctgttttctccgtgagtgactggacaggcagaggccggccttgctggagggggcatttgtaattatgagtgaatccaaaacaaggttttttccttccgcagccccccgcccggctgtggggcccagccactgcacttcaccggatgccgtctggttggtcctcaggactgatacagaccaggaccccagggccagcccgtgccaggctcctatgcttccaggagcacgggtgggtggtcctgctgcctggccggccatcctcctggggtcggtctctggccgatcctccctcctcctctcaagccctgcacagcccggccaggcaggtgcatcttgtttggctgctgaggagccgggggttcagggaaattaaggaacgtgcccagggacccggggccagcccgtggggacgctgggattggagcccaagccccaggttcgccgcgcggctctcgacttcctctcctttcccccaggggcgagctcagcgaccgcagagaggtggggtcgatctccctgcgaccccagggggcccgcgaggccagtgcgcgggcaggagcggggacgtgctcagaagagccgggcgccgccgcgcccgcccgccccccgtcccccggctcccggctccgcgcgccccccgccgcccccggggccctgctacccccgacccgtcccctcccgccggccgcccccatggcccggctgggcgcgctgctcctggccgccgccctgggtgcactgctcagcttcgcgctcctggccgccgcggtcgccagcgactactggtacatcctggaggtggcggacgccggcaatggcagcgcctggcccgggcgcgcagagctgctctcctcgcactcggggctctggcgcatctgcgaaggtaaccggccaccg

SEQ ID NO: 19157 - DNA, 2300 bp, Homo sapien
ttctttggtcctatttgattcccaaagagaattattcactaaccattgtctgagcaaggggcccattcatttcatttccccccaaaaatcattgactttgcctcaaagaggtggtttcccaccacctcttctcccatgaggaagggcatggcaggttctggacccctctggattactgggtaatcacgtccggggagtcctgtgctatgcagttacagtaaattttgtgagccttttctcctatgaatctgccttttgtccgctgatttttcggcgaagcttcagagggcaaagggcagctttctcttcctaacccagaatccgaccacttctcagcccttccactgccacccctggccgcagcccctggcatctcctgcccggggaacttggttccctccgtgctctgcctgtttccaccacaacctccccagggcacctgggttgatgttgcagggccccctcccactacatggcccctgcacagaccatactcttcccaaggcccagggctccctgtgcctggctccagcctccttatggtttctggaacatacaccggtgtgtcctccttgctcatcctgacttgtcacctgtatctttctctccctactggagccctgcaaagcaggcattttcatctgctgggatatccccagcccctggaacagcccaggctcataatagacaccgagtttgcagaataagtgaatgaatgggagactgaaggagtgagcttgcttgtacacaaccacctctcagaacacacatgcatctgtctgcaccggtctgtcattttgaattctggggcagggaggagtgccattgatttgcttcattcattcgcctggtggtgtgtgtccctcccttttgactatagcttacctggcatgcaccttcttcctcactgccccaaggcctgacctggagtccggcctgccataggcgcccctgcattcctgctgatgaccagagggcttcagtggtcttgcctggagagagtgaccagttgtggttgggtctcatttgcatgtgctttgcataatgctttgcataacctcctacaagccacattgagcagggaaggtggggtgcagagaggactggccctggggccccctgagagctgacccctgcagcagatgttctggggtttggggctccttggggaccagctccacctggtgccagtctccccaggccaggttaggggtgcagatctggacacagtgagggtgagggtacaggcttccctcgccagacgcggcttctcccttcctctccctgggaaaggggaggcctcactgcaagccccaggaacctgccccaaggccctccgaagttcaggccctgcctccctgcactgaagaggctggggttggggggcaagtgtcacccacgcctcagagtgagccctagatctgaggagagacaagatggggaggaggggaagggggtcagctcagagggcagccctgcccactctgccatgtcccagctttcagacgtggctgagaggacatgagatgccccgctccccggagcgggtcacagaactcggggtaagtttctggtctgcctacctggcagatgcccctagagagtggcctccccaacagcaccgaccaccccagggcaggtggggagcagcgtcccccaccccatgaccccggccagcctggccaccctgctgggccacatggtgccacaggtcagcaggggtcttcaggccatgtgaggaaggtgtctgggctggtggccaggctgggtgggaggggtgggggcaggtggagctgggtgggtgattgggtgacctcgacccctcagcaggctgcaccaaccctggctggagctgccactggcctcagcttcccttctcagcaactgtgacctcaagcagctgctgcacctgttgggtgtgggtgagcccggctcttctttcccttccaggggaggagtcagcccaggagtcaactacgaggtcggggaggggattaaggagctgagaacaggagacagcagaggggacaggctgtcttcaagcacagctggcacctggggaaagccgcctcctccctcccactgcccccacccccgcttgttactggaaatgaggagagcctcccaggtcccagcagagctgctgctggtaagtcccttccccagcggcccctccacccctcacaggcccagctgtgccagcccagcctgggccctactcccggctcctgctttaggtggtctcctgtggcctgaggccctgggggtgggcaggggtaggcacccaggcccagaggctc

SEQ ID NO: 19158 - DNA, 2300 bp, Homo sapien
cagatgaaattgaacaggattgaaaatcgagtccagcaatcaggttacccagatgtctcaggactggggggccttcgaggaggacagaaaggcagggaaaggggtctgaggctcagagccgtgggagcagctgatggaacccaggttatttacaggagagagagaagctatgacgaggttcaccagctagttgacgatcaagtgactgtcagctagtcagggagatggcttccctcacccagatcaaagaacacagggaaataactttccaggaggccgatttcaactcagtacagtgacggaaaagaaaaacatcattcaccaagagccctccaagtaccggattctcagaggggcatcttttccagcctccaaagagcctctcccctggggtgttcactgcctcatcacacagaccaggtgaggaagagtcactctgaacccccggggccgtccactcaaaaacaccagacttcgggaggtaccactagggacgctggatgggacaaccccaggatccccaccagctcattggaagcacagaggaaatgggaagtgacccagcaaagtggtgaccctcgtcctgcaggtgccgtcagtaggggtggacccagcactggcacacaggagggggaccacattggactcgtaacagcagcctgatgacaacacagaggaggaaggggatcgagggaaggccaagggggagcagaaagggaactcgaaagagagaaagagggccgggtgcggtaatcccagcatctgcggtccctccttaggctgctgaggccaagatgagagagtcaagatgaggatcacttgagcctcgcaggcggaggttgcagtgagccaagatcatgccactgcactccagcctgggtgacaaagcaaatccgtttcaaacaacaaaaacatttttttttttttttgagacggagtctcgctctgtcacccagactggagtgcagtggcgcgatctcagctcactgcaagctctgccttccgggttcacgccattctcctgcctctgcctcccgagtagctgggacaacaggcgcccaccaccacgcccagctaattattttgtatttttagtagagatgagctttcactgtgttggccagagatggtctcgatctcctgacctcgtgatccgcccgcctcagcctcccaaagtgctgggattacaggcgtgagccaccgtgcccggccaaacaacaaaaacattagtcaggtatgctggcgggtgcctgtaatcccaggtactcaggaggctgaggcaggagaattgcttgaacctgggaggcggaggttgcagtaagcggagatcacgccactgctctccagcctgggcaacagagcgagactgtctcaaaaccaaacaaacaaaaacaggctgggtgcagtggttcacgcctgtaatcctagcactttgggaggcctaggtgggcggatcacttgaggtcaggagttcaagtttagcctggccaacatggcgaaactccatctctacaaaaatacaaaaaaaaaaaaaaaaaaattaactgggcatggtgacgtgcacctgtaatctcagctagctactcagggaactgaggcaggagaatcgcttgaatccgggaggcagaggttgcagtgagtcgagatggcaccactgcactccagcctgggcaacagagcaagactcggtctcaaaaacagaacaaaacaaaaacaaaaacaaaaagaaaaaaagaaaagaaagagagagaggagcaaagggaaacacacaggaggaggaaagttatgaacagatcaggaaaagggaggccagagagagacggcgaggcctgcaagggagaatccgggagacaggagccggcacgtggtagtggaggaagggatctgcccagtgtttgttgacaaggagccgtgggggtaagagggaggggcaggaggctccactgggatggggcagggtttgctgcagaggctggtgctttgcccagagccacctgcagaggatttgaacccatcgggcactcagtccacttgtgagtcatgcctgaacactcctgatatgtcaggggctgccaggacggctttagaaagtgaggaggccgcagtcctggccagcctgccagatttgccatccagcgaggtgaacgcccattaactgtcaaaatgcacagcacagccatcctgaggtgggatatgggcaggaccaacgtgggagtcaggaaggcctgagttcaaatcccgacttcaccacttcatgctgtgtgacctcaggcaagttcctgaacctctctgagccttag

SEQ ID NO: 19159 - DNA, 2300 bp, Homo sapien
cactcagctaatttttgtatttttagtagagacgaggtttcaccatgttggccaggatggtctcgatctcctgacctcgtgatccacccgcctcagcctcccaaagtgctgggattacaggcatgagccaccatgcccggccctttttatttcattttattattattttttttaacagggtctcactctgttgcccagactaaagtgcagtggcacgatcatggctcaccgcagccttgacctccctgactcaagcgatccttccaccttggcctcccaagcagctgggactacaggcacaggccaccactcctggctaacttttttctattttttgcagagatgggggtgctcactttgctgcccaggctggtcttgaatgtccatgctcaagtgatcctctcgcctccgcctgccaaagggaaggaaaaggttctggctccagttttacaggtggcaaaacggaagcccagagaaactgtgtgtcttgtccaaatctcactgagtccccagcacatgctggggagaggtgatggcacggactgaggatacagtggcaaaggcagtgcgcacctatcaattccagggccggcaaaagggccagttctgggttctggcatcccaagctccctgtccctggcggcagtctcttccttccctttcagcacctcattatcctggtatctaggaagagcgcagggccccaggcccacagcgtctgcatcccgagaggtgaaaatctaaatgccactgaggcagctctcgggtgtccccagcaccacacagcccatttggggacaagatgacaaaacttgccatccttcataaggctggccccgggtctccaagcccaaactatctacgtcagtgccaacgtgaccagcagcaaaccaatctttcacctcaatcacttcctctcctcccctctaccccctccccgccagtgatcaagtcctcccccaccccaagagaggcagggggtcacattccagggggtgtgggccatctggcagtagcctgaaccccggaaaactgctttccggaaattctctcctgctagaattttattcccaggtctgaccccagcctggggtgtgaatgcccccttctcggccacctttccagctccggagacagccattcccgcagatccctggcgtgcctattccaaggcctgggccgcgcagcaccaaactgccctcccctaggagaccccagggcgccctctggcggacgcgggccgtaggttggggccatcgttccacctcgagctctccagcccggccgagagcacctggcccaacccacaccggaccaaccaggtttgcagaccccagtgcatgaaagcgttttcataggggaggggaggggggctccacactcgcgtcagggttggcaaagaacctggcagtgggccgaggctgggtagctgccacgaaggggcgtcccctgcagccctgggtctcccctctggaatctgcccgcaggtgactgtcgcacgtctccaacctccggctcccgggtctgaccccagccccgctgcctggctgtggggtagccccacttccctttcggctggcccgggccgcctgacccgcagttgggccctcggggaggcccgggtggcggcgagggggtgtccccgcggggtccgggaaaaggggaaggggaaccgggaggctctccaggtcggcctcctagaactgcccgctctcccgaagcggcgcccccgcctctgccagaaatcagccttcttagaagggaggggggtggggggaaagtgtgaatgagaagttgggggcggagcgcgcggcggggaggggccgctgccaggaacgcgccgccggggctggcgccgcgcccaccggccgcctcggccgcctctcgtcgcgctttgtctccgcgcgcgtccctcccggtccctgcccctgctcgcggcccgccctcggcgcccgcggcccctccctcaccctccgcgctcagcctttctctgctgcgagtagtgactaaacattacaagaaggccggccgcgcagttccaggaatcggggggcggggcgcggcggccgcctatatacccgcgagcgcggcctccgcggcggctccgacttggactccctgctccgctgctgccgcttcggccccgcacgcagccagccgccagccgcccgcccggcccagctcccgccgcggccccttgccgcggtccctctcctggtcccctcccggttggtccgggggtgcgcagggggcagggcgggcgcccaggggaagctcgagggacgcgcgcgcgaaggctc

SEQ ID NO: 19160 - DNA, 2300 bp, Homo sapien
caggctggagtgcaatggcgcgatctcgactcactgcaacctccgcctcccgggttcaagcgattctcctgcctcagccttcctgagtagctaggattacaggcatgtgccaccatgcccgtctaattttgtatttttagtagagacagggtttctccatgttggtgaggctggtctcgaactcccgacctcagatgatccgcccgcctcggcctcccaaagtgctgggattacaggtgtgagccactgcgcccggcccacgtgtccatatcattttaacctcacaacacggcagactatgattatgtcctacagcttttccagtttccaggtcccagcctatgtgggtcagccagggagctgcatattacagatcagagatcacctctcctgcctttcagaatgccacaaagttttccattttaaaattagctgcaaaaagtgttcttgggccgggcgcggtggctcacgcctgtaatcccagcactttggaaggccgagttgggtggatcacttgaggtcaggagtttgagaccagcctggccaacacggtgaaaccctgtctctactaaaaatacaaaaattagccaggcgtggtggcgcacgcctgtaatcccagctattccggaggctgagacaggaaaatctcttgatcccaggaggcagaggttgcagtgagccaagattgcgccattgcactccagcctgggtgacaagagtgaaaccctgcctcaaaaaaaaaaaaaaaaaaaaagtgttcttggtgtatgaggatgtgctccgtcagctttttgggcatagaactgtgtgttgccaggggccagtgatatctgtgtacttgggcatatcaggagggtggaagactgttcatctcacacagatttgcttaggctgttctgtgccatggagctgcagcctctggggctaacagggtgaaaaatgattcctctctcagtctggtggggattttccgtggttctgtgcaccttagtgagtcagcgttaaccaggttacaagactttgtacaagaacagactttgttcaagtttaacaccttaggggtgttgtacaagtctaaagaacaccctatcaattagagcctcaaacagtaattccctcacttatcagtgagaagtcctttttttttttttttttttttttttttgacggagttttgctcttgttgcccaggctggagtacagtggttcgatcttggctcactgcaacctccacctcctgggttcaagcgattatcctgcctcagcctcctgagtagtttgggattacaggcatgggccactgcgcccagctaattttttgcatttttagtagagacggggtttcatcaggttggccaggctggtctcgaactcctgacttcaggtgatccacccgcctctgcctcccagagtgcagggattacaggcgtgagccactgcgccggccgaggagtcaatcttgacagccagtggtcaggctcggtggctcatgtctgtaatggcaacactttgggaggctgaggctggatgatctcttgagcccaggagctcgagaccggcctgggcaacgtagtgagacccccatctcgacaaaaaagtaaagaattagccgggcatggtggcacacgcactttggtggtcccagcactttgggagtggtcccagcactttgagaggatcccctgaggccgggaggtcgaggctgcaatgcgccaagatcgcgccactgcactccagcctgggacacagaccgagactctgtctcaaaacaaacaaacaaaagcttttttgacagctggtgagttggagccaagcgtgacggtgctagagcccctgcgccgcatcctttcctccgcgacctgtgacgagtgactgcaggaatgcaggccacctggcgcccttacggatttaacgggccggcttccgaccccctcctgcggcgcgaccactgttcctcgcctgtgtcccccagaggggaaactgaggcttgggggcggtgcagcgccgccctccccgagccaggggttccgcgcctgcgcgcctgagccgtgtccgcgctcgcctttgtcaataaagttcgcgcccgccgggagcggaagcggaagcggcgagtctccatggcggtggcggcggcagctgcggcgggacccgtgttctggaggcgactgctgggcctcctgcctggccgcccagggctggccgcgctcctgggacgcctgtccgaccgcctcggcaggaaccgggaccgccagcgcaggaggtgagaggggcggccgggatgagagtgcagccctcgcggc

SEQ ID NO: 19161 - DNA, 2300 bp, Homo sapien
cctcttgatggcagaatcattttccacgtgtggccgggcgcattgtgtttgtccactcatcagctgatgcgtggagcttgcattattcattttacaattttaaaaaattaaatctactttaaaaatgtaaatgtcagagctgacaggagccacctttaaatgcagagatgcatgcagaaacccagaacccaggaggtggcaaatcaatatgcagaggtcctagactctgggaggggcctggtgtgagtgctgaggggtgaagctagccagaggcccctcaaagtgagcccagctacaaagaggggacagcagggtgtagagccggagagaagcgccccccacagtggatgagcagacccagggttgcagtcctgggagcttccagaatggacgaatgttgtaaatgagtctgggtggaggccaagcagaaggtttcggtcagggctcccaggggaggacagagtatcgccagaggggtgtaaaccctgctgcaaagatgagcctgatcacccaaggaaagagcaggtgcatctcccagaagggcccacgtcacaggccagggaggaggaacagacaaggagaggtgcagtgctcttccagggaccagaagggagggttcaaggtggcggcctggcctggggctggggtgaaaggtggtctgtacttgtgttcctctcccctggtcactgggaggcccactaaccctttcctccaccaaccgccaggtacattaagatcggtgacaaggaggtggagtaccaccccaagttccgcctgatcctacacaccaagtacttcaacccacactacaagccagagatgcaggctcagtgcaccctcatcaacttcctggtcaccagggatggactcgaggaccaactcttggccgctgtggtggccaaagagcgcccagatctggaacagctgaaggtaatggcctgaagtttggtcacacgggaggaggtgccgtcccacacagagggggccaggtcactgtgagggtccccgaccagggctgccagtccagtgtgtgtcgttgcttctctctgaaggtgcctcagtgtgtcccacggcatcacagcttctcatacgacaggatggctcatttccttccccagctgtcccctcttcctgctcccaaatttaattctaagtcacatgacctctttgcttaaagaacatgagtcacagcggtcctcgggggctctaagctccaaagcgctgccctgcaagaatggcctggctgccagcccttgcacctgccacatttctggctgttatagccacttgcatgggctcaggaggcccaggcccgcctgtccccgttctgccccctacagtctccgtgacaggaagcctcaaggctgggagcagggccagggcctctctgaggttccaggggctctgcttctgcagccccttccaggacctgagctcgttcctcccgctcaaagcctgggccttggctcagctacatggccacctgagggaggcccgggtgcccggtggacagagccaggcaatgcagtgactcctgcacctccccttgcaggcaaacctcaccaagtctcaaaacgaatttaagattgttctgaaagagctggaagattcgctcctggcccgtctgtcggctgcgtcggggaactttctgggagacacggccttggtggagaatctggagaccaccaagcacacagccagcgagatcgaggagaaggtcagagctgcctcggtgacgtgccctggcagccagggcttgggaggctgggccacgggcgatcggcgcctccctaccatgagaaaggagaaaagcagcttcggtcatacgtgcccgagtgggcccagggcaggagaaggggtctgggctcccatcctgcacccagctgctgctgagagcccttgggtggcttcccagggagcgaggctggtggctgggaatgagcccacctgctcatggcactgcccatctgctgtgtcattcacaccccttttgtttgtgtcgaggtggtggaggcaaaaatcacagaagttaaaatcaacgaagcgagagagaactaccgcccggctgcggagagggcatctctgctctacttcatactgaacgatctcaacaaaatcaaccccgtctaccagttctccctcaaggtgcgccctgcagctggggctgggtgcctccctcaaggtggggctgcatctgggctccacagccaggcctgttgcccacacagccatcgggcagtgccagggccaccctcagagggcagacctggtccagcctgcagatggagctggaagagggg

SEQ ID NO: 19162 - DNA, 2300 bp, Homo sapien
ccagattgacctcgctgctcagtacataaaggctgccgtgaagaacgttccctcggtgttcctgatgacagactcccaggtggccgaggagcagtttctggtgctgatcaatgacctgctggcctcaggagagatccctgggctgtttatggaggacgaggtggagaacatcatctcctccatgcgaccccaagtcaagtcccttggcatgaatgacactcgggaaacatgttggaagttcttcatcgaaaaagtgcgcagacagctcaaggtggggctcccgtcttcggcagggcctcaagagcccagcttggtgcccgtggcctacagggtatgggtttttgctctgcatagagcaggaggactgatccttcatgggatgtgaaatcctgttaggagagtgtgaggggtggggctgtctgatgaaccggagcctggagactttttcacgtgggtcgttagaggtatcttggggccaaaagaaatgttttacagtcgtcctttggtatctgaggaggttggattccaggaccgccatggataccagaatccacggagggatggatgctcaagggcccgatataaaacagtgtcgtatttttgaagatgctcccctctactttaaatcatctctagattacttataatacctaatataatgtagaatgctatgtaaatagttgttatactatatttttatttgtattattttttattatttttttttaacaattttcagtccatggttggttaaatccacagatgtggacagacaaccgactctatgtggaccccctccccacacacagctagtttaagtagataaatgcaccttgatactctctctctctctctttttttttttttttttgagatggagtttcacttgtcgcccaggctggagtgcaatggcgtgatcttagctcactgcaacctctgcctcctgggttaaaatgattctccagcctcagcttcctgagtagctgggattacaggtgcccaccaccacacctggctaaattttttatttttagtagagacagcatttcaccatggtggccaggctggtcttgaactcctgacctcaggtgatacacctgcctcggcctcccaaagtgctgcctggccacaccttgattttcgacatcacctctagggtaagcaggctaaactcccctagtaggacagagaaccccttggacctattggccccgtcctctccagagttcagtggtgctgccctttgcggggtgccaatcccatagctctcctggacacctgccggccatcgttttcccctgcttgactcaaacagagcagggtcctccctcccctctgcgggctgcatagcccaattagtgaatgttatctgtgagccaaaggcatcccctgataggtgctgcctgctcctggatcctctttggtgccctgccagtgccggctctgtcctgcaccctcacgtcatcacgcagtgaggggtgcaaagtcagctaagcagtgagccaccccattcaatggcagcgtccgtgcaacacctatgccacgaaaggggactagagagcaagagcagctgggaggctgagacccattacaagggaggtccttatctagccagagagccccccaggcctgtctccacagcaccttctccagctgggatcccagggactccctgccctttctgggaattagccactatccctcagggcccagcggggacccttcctgctgaaccgaagggcttgggagcccggcccgttctggggcctcatctgcccaatgtggatgcccactccccattccttcctttgcccggccttttttagagaggcaagggccccttccagagggattgggactgctagcgagaggcatgaagccagatgagcatttatccacggcaatgcagcggccgcccttcaaacccagaaccaggactgtgctgcccaggccctgggcggctgagcccggcagggcgcgttgctttctggcagagctttctgcagagtgatggattaggccccagcactgcagtcccagtaggcagcgcatctgtgtctcccacacccaggtgatcctgtgtttctcccctgtgggctccgtgctgcgggtacgagccagaaagttcccagctgtggtcaactgcacggccatcgactggttccacgagtggccggaagatgcgctggtgtccgtcagcgcccgcttcctggaggagactgaggggattccggtgagtcactgaggccacctctgcctgagtgtagagcccagaggacaaggacaggcccaagggctgg

SEQ ID NO: 19163 - DNA, 2300 bp, Homo sapien
tgtgaaatcttccggcccgcatgactgaggtgaagagagtgaaaccttccggccagtgtgtgtgcccgggtgactgaggtgaagagtgtgaaaccctccagcccgcgtgactgaggtaaagggtgtgaaatctggccagtgtgactgaggtgaagggtgtgaaaccttccagccagtgtgcgtgtccgtgtgactgaggtgaagagtgtgtctgtcaactactcgatggacacaagtccacagaatcaacccagatcacagaggcagagaggttggatccctgcccttggtcactgagtgttccaaattgttacctattctctccagactacagaattcagagccatgactgggtgtctaactgcatgcctgagatgctgaatggctgcttttggaatgaatgaaataaacattagactaaacataaggtctcccatgcccaacacacactgctgagggtttttattgatttcttgttcctgaaaatctgctctcccaggcaactgcgtgccattagttcagaaggaatcatcgtgcttgagattagacctgaaatcgattgggccgtcctacacggccatgccttctctgtgtgctggggccgctgttgtggggccaggacgatgccagacccaagggggaacctaaggggaccctcccgcagtacgtggccctcagacagtcgctgggctggtggctttagcaggcagacctggagccagtgatgctgggagcagtgggaggtgtctgcaggcagagaccctggaggggcagtgcaggctgtgccagggacggccaacctctgggagagcctccagtttctggctggctgttctctgccttcccagcagattctactccatgtataaaggggccggcctgctcttttttgaactcctcagatgggcactcctgaacacagccctgtcctctggacccatgagcggtagtgtgtcatgggttctcagcgcatctgatggagttagttcacattggtatctgcggccactcaagtgtcatttgaacctggagccgtatggttttactgagctttctccattgaagtctctagtctattaactaaatcacgttggtttacgttcatgacggcatcgtttccttgctctgcgtccctgcggggattttctccctgatccttcctgttggggctgattgtgggtgctcagcctcagcctcagcctcagcggtactattttattcatcagctgctgtggctctgtgatctgggctgtggaatttcactgtccctgcacccatcacaaatcagctttgctatcactgtcatttcttttttttttttttttttttttgagacagagtctcactctgtcgcccaggctggagtgcagtggcgcgatctcagctcactgcaagctccgcttcccgggttcacaccattctcctgcctcagcctcctgagtagctgggactacacgcgcccgccaccacgcccgtctaattttttgtatttttagtagagacggggtttcaccgtgttagcctggatggtctcaatctcctgacctcgtgatctgcccgcctcagcctcccagagtgctgggattacaggcgtgagccactgcgcccggccatcactgtcatttcttaagccgcttctgtggattcagaactaagggcagaggtaaacagggctataagttcctgaattgtattgggggagctagactcctgagccattcgacatgattatcgttctaatggtgctgccatagtaataggctcacccctatgggggtaacatatatgtttgtgattatgtaatattataaagtaggtcccggaagctgtggcacctgctggaggctaggggtgcacaggaaaggggtggagggtggaccctggaggacagtgtgccgtgtgaaaagccctgggcttggtcccaagaaaacgagactacatcaagatgtctgatcaggggatagagcgggcaggatgtggtagtgttctaggacacaggaaggatagtttgaaagcacagaaactgctgaagggtgacctgggtggagctggggcacaagctctgtgaccccacaaaggctgaaagtgggcaggtgcgacgagaagggagaacggagggggaggggaaaccagggccagcgagggctgtgcctgccgagacagcgtgcgtgacctcggggactcggctggggtccaggatccgaaaccttcaggtgctaccccagctcccctccccacaccccacacacagcccccggggccaggcggtggggagtttttatttctgtgaaaccttcacc

SEQ ID NO: 19164 - DNA, 2300 bp, Homo sapien
caggcttctccggacagacctgagacccaggagtcccgaccttttcaaaattcaggtcccgtttccgaggcacgtccagagccgggaagaggtccccgatcagtcccatgaatacgggcaggtcgtctgtcacaatcttggggatgttgaagtctctcagcgcccgcatgagcacctggtcctctgcccggctggggtcgcccctcttcagggagccggccaccaccagcacagacttgatggctctcaggccccagtcgtaatgatcctgcgggcagtgggcacaggtgggcagacgtgagctcaccttcctgtggccagcaggcaggtctggaagccaaccctggctgctgcccgcatctcaaactcccacccacacccgccgtgagctccaggacacacacacctgcttcgagagcagctccttgcacaaggtgtacagggtgatgaacttcctggccagaaggcgggcttccagaaagccctcggccatgagcatgatctcacatatcagttcgaagtcggggacgaccatggcacagggcctggggaggtcagcggtgcctgtgggcttctgcccactccctccccaacctacacccctgcctgtccctcttcacctaggagagcacacctcgactgccaggtagaccacagcagagtgttgaaccttcggtcctggagccgggctcccagcccgcctgctccctacttccctcctcctcccacatcatccactgggtgcaccttcagggcccctcctctgagagccaccccaaccccccaaccctgctttccatcactgtgtcccaggtgcggtcctcccacccaggggaagacagagtgctttctaaggaggccctcgcctgcctcatcctgggagtgtttttttttttttttttgagacagagttttgttcttgttgcccaggctggagtgcaatggtgccatcccggctcactgcaacctccgcctcccaggttcaagcgattctcctgcctcagcctcctgagtagctgtgattacaggcatgcaccaccacaccgagctaatttttgtatttttagtagggacggggtttcaccatcttgaccgggctggtcttgaactcctgacctcaggtgatccaccctcctcagccgcccaaagtgctgacattacagaagtgagttactgtgcccggccatcttgggagcttttgatgacttcttccctccccagcttgccctctgcccctcccctctgcccactccttggcactgggacgttgctgtggccggcctggctcactgcagccactcactttcacctgggccacgtacctgaataaggcttttaggttctcaggcagctccgcgcgtccggcgtacccagggttcatggtgatgaagataccgacggtgggaatgaggcctatgatctctcccaggaaattgaatgcttttttcttggcccgaattgcatcctggacacattttacctgcacggttggtgacacagacatgttagcatggaaatggccagcttccacacaccagagaggccttcacatatgttaaagcatgaggctgcgaatttgcgcctgcaaattcaaacctcctagtttattttttaaattaagccttttatttttgagaaagttgtagatttgcatgccatgtaggaaataatacagagggccaggcacagtggctcacacctgtaatcccagcactttgggaggctgaggctggaggatgatttgagcccagcctaggcaacatagcaagaccctgtctcaataaaaaatacaaaagacagtgattggggggaagaaaaaaaaatacaaaggcaattctgtgtactctctgccccatgtagcctgatgggaacatcttgcctaataacagtaccagtcacagcgggggtggtgggcggggggagggtgggcgcgacactgaggccagcattgctgtcaccatggggtgacagccctcttatagccacaccccttccctcttgcccccttccctccgtttgacccctggcaaccatgtcctttttttctgtgatttggtcatttcatggatgttatataagtggaattgtatcatacacgatcttcccagatggactttttttttttttttttttttttaagactgagtgtcactctgttgcccaggctggagtgcagtggtgtggtctcggctcactacaacctccacctcctgggttcgccccattctcctgcctcagcctcccgagtagctgggactacaggcgcccgccaccacgcccggctaattttttgtattttt

SEQ ID NO: 19165 - DNA, 2300 bp, Homo sapien
agacagggtttcaccttggccaagctggtctcaaactcctgacctcaggtgatccaccagccttggcctcccaaagtgctgggattacaggtgtgagccaccgcacctggcctccattgattaacttctatcattcttggtagagggggcggtgggactccttggcaaatttatttcctgcttgtaggcaaatagggggaggacagagagcttctcttgtatctgcttcttctcaagtgccttcagctcaaaataaaccttaagccaaagtggcgtattttggtggcaaattctgccaacctccataatcaggtttgaatgccaagtgcaggagatatttagtgatgatcctgagacctagaggagggtgccaccttcaagcggtgggaagggaaggaaaagctctgagtgagtgtgaaatttggcttgggccttgggagtgagaactgtgaagacaagcagaaaggctgggacaggtcttggcatgaaagaatgcaagaacaacggtgagaacataccccaaggaccaagggcagcatggcccaaagcctgcacagcggcaatgcttagcccacggcttcccaagagatccgtacctatgcaggaagtaggagaatggggacaaatggttccctccatctctcattaagtcccagccagcccaggagggtgcccacctaggaggagtgttagaggctcctgctccgcccccaccacactgtccagggcccttctgctccctaggcccaaggaaggaaaagcaaacccagctatgcaggccaccctgagggcacaggggcacccacttgctccccagggatctgggtgtctgggagccagcccctgggggtgcctttcgagtgttgagacaaaaaatttcccggatgcctggtaacaggttcatgtgccccttccgggtgccctgggagagacgcttgggcggtgataaacaaccagctaaatatctccatgaaaggagctgggcacagctgaggtcttggtgagcctcgggcacatatgtccccaaatgtgattagagatgcaaggttccatctgttggttaaaattccacagtgggctcagaatcaatgctcagaaacatctgactatgtgacaccaaaaagaatattagacaagggacgtggaagcgatttgggaagtgggtggcactaggcaagtacctggtatgttcgtactagactaacggtgatctggtactagagtaacagtacctgtgattcggccactgccacagagcgctttgcctattgtgaatgcggcagctgccaaaggtggtggattcacttcctggggctgccatgacaaaggaccacaaaccaggaggcttaaaacagcagatctagccgggggtgcggtggctcatgcctgtaatcccagcactttgggaggctgaggcaggcggatcatctgagttcaggagtttgagaccagcctgtctgacttggtgaaaccccgtctctactaaaaatacaaaaattagctgcacgtggtggtacgtgcctgtagtcccagctacttgggaggctgaggcaggagaatcgcttgaacccgggaggtggaggttccagtgagccaagatgcactccagcccaggtgacaaagcgagactctgtctcaaaagaaagaaagaaaacagacctgtgttttctcacagtgctggaggccaggactctgaaatcagggtgtcagcaggctgcactccttctagaggctccgggggagggtccttcctgcctcctccagcttctgggggctccaggcattccttggcctgtggccgcatcatgcctgtctctgccttggtctccacaaggccctctttcctgtgtgcctcagatgtccctctccttcctgtcacgaggacacttggccctggatttatgtctcaccggaaaatccaggatgaactcacctcaagatccttagtatctgcaaagaccctatttccaaataaggtgacacgtgaaggttctgggcggatgtgaattttgcgggggggccgcaattccgcccagtgcaggtgcgttctgctcttatgcggttttacagggaaggaaggtgaggcttggagaagtcacttcctcaagtctcagagctgaaaatggcagagcagagctcgcctccctccctccagcagcccgggatcgtgccccggcaatggctctccatgaaggatcatgacgtctgcccactgcagagtgcacatgacctgaaatgaatcctgcctggatttttttcccttaggtgaaatttaaaatgtcagaagagacgaccctggc

SEQ ID NO: 19166 - DNA, 2300 bp, Homo sapien
ttcaccatgttggccaggctggtctcaaactcttgacctcaggtgatgtacctgcctcggcctccctaagtcctaggatttacaggtatgagctaccgcccccagcccttactcacctctttaaagaccctatctccaaatagtcacattctaaggtgctgggagttagggcttcagcagatggatttgggggacacagtttgacccatcacagtcctcctaggcttttagcaaggagtgtgtgctatgggtgcaagagcttggggatggctttggtaccaccaggacagggcagctggtataaactccatgaccggccacacctccttctggaagaaggatccagttttcccagggctccagacaccaggtctttggaatccccctggggacctggctctgtgcgggacccagttttcccagggctccagacaccgggtctttggaaccccccggggacctggctctgtgcggttgccgagctggtgaaggcacagggggcggaaccacagaagtgtttccttttaggtcctctcttctctgttaaaccaaagtgagaacatggctggatggccccaggtggtctcggaagacatcgtgaagcaggtccacaggctgaagaatgaaatgtttgtgatgagtggcaagatcaaaggcaaaaccttgctgcctattccggagcacctgggcagcctggatggcacgctggagtccatggagaggtgtgtgggcccagctgcttccggctgccgctgggtggggaagaggcacatgcttgacccccaccccccaccccactccaccccactccgacccgttgtttccctgcagagtggcttcacatgttaaagccggggaaatgcagggcaaggtggtgcgttaggtggtgctgagactgaggaagttgaaaccagggcagggagggagcaggctctgcagcccctggggctctggcacctgcaccccacaccccccgctgggtcacacatgtgtgccgatccagtcaccacccagcaagcagaaggtgtcccacctgtcagcatggccaggaaacaggaggcacagctttaagatgtgggacagggtcagtgagtgggagtgggagggactctcagcaggtacatgcaagtctgtgtagaggctgcggtgcccccagaggccctgggaagcccaagggactccaaggtgtcccctcgcacctgccttgccacaatttgcaaccgccctgatatgtgagacccccgtgacaattagttccgtattttgcctcacgtgggcaagtcctccactgatcattcacaaagccccaagcaccatgtccggtggtgacaccaggggagccatcttgaatagggtttaaatagggtttacttaattctctcccgcttccttggaggtgagcgcctccaggccctggtatctctgaccacgcccattatttccctgggctctcttcctagctgggagtcttgggaacttctttagcgtccccgaggtggctggaggcaccagggacatgagaccagacggtgctgctgctggtggtttgggattggtgggcagaaggattcatgggagagcttggtgggacccacgtgtgtgtcgccatgagagcaatgccccaaccttccactgggcaggatcccctcttcactggacaacttgctcctgcacgccattgaaaccaccatcatcgactggtcccaccagatccgggatgtgctgagcaaagactcagcccaggcgctgctggatgggctgcaccccctgccccaagtggagttcgagttctgggacactcggctgctgaacctcaagtgcatccatgaacaggtacggcctcctctctcctgtggggctgcagcctcgtcccagctgggcgaccgggccgagctctccgcctcccagtgccaacctcccaggagtcctgagggctctgatgacctgcgtaaattctgcagctccagccagccacaaggtcaggttggcctcgccttagggtcttccaggtcaatgaaaggtggatcttcactccccttctcagctaaacagacccaaagtgaacaagattgttgagatcctagagaaagccaaaagctgctactggccagccctgcaaaacgtttacaccaacgtcactgaaggtgagcctgtgaccctgtcatgagttctgcacgaagctgtttgtgcctcctgggagggctgggtcagacttgtcaccaaccctaggatgttggcctccctctgcgagcagctttctcagccccctccacttgagaaaggccccatttcctgaagga

SEQ ID NO: 19167 - DNA, 2300 bp, Homo sapien
aatagttgcagagtctcactatgttgcgcaggctggtctaaaaccatcctcccgccttggcctctgaaagtgttgggttgagtcactgtgccaggcctaattaaactttttctttcttttttttttttttttttttttttgagatggagtctcactgtgttgcccaggctggaatgcagtgacgcaatcttggttcactgcaacctctgcctgctgggttcaagtgattcttctgcctcagcctcccaagtagctgggattacaggcacctgccaccacacccggctgatttttgtgtttttagtagaaatggggtttcaccatattggccaggctggtcttaaactcctgacctcaagtgatccacctgccttggcctcccaaagtgctgggattacaggcgtgagccaccacgcccggccctaaataaactttttaaaccttaattttttttccctttttttttttttttttttttttgagacagtcttgttctgtcacccaggctggagtgtggtggcacagtcttagctccctgcagcttccacctcctgggttcatgcgattctccctcagctttctgagtaggggttactacaggcacatgctatcatgtctggctaatttttgtatttttagtaaagatggggtttccccatgttggccaggctggtcttgaactcctgacctcaattgatctgcctgcttcagcctctcaaagtgctaggattacaggcctgagccaccaagcccagcctaaaccttaatatttgattttcagaataatgagaaacatttcttgtggtgttaactttgtgtgtgcgctgttttcaacagtgcttcctctgtccctgtccctgtccctgctgcgtaagttggtaacgttttgtgaatcagcctaggacaggtaccactgtttttagaattctttctttttttttttttttgtatttttaatagagatggggtttcaccatgttagctaggatggtctcgatctcctgacctcgtgatctgcccgcctcagcctcccaaagtgctgggattacaggtgtgagccaccgcgcccggctttagaattctttctggagggaaatgcattgtaatttcctggctaccttttagtattaaaaaacttttggaacatagctcattgataatatgctatagaaagagagtcttagagtttctctgtccaattaaagacaatttcaaaaaccaacaaaaaggctttctcagttccagtactcttttgtattcattagatagggacagtttggttcagactacacctgtgtgggatatatctttactggtttgtttatttatttaatttatttatttttatttatttatttttgagacggagtcttgctctgttgcccaggctagagtgcagtggcgcaatctcggctcactgccagctctgcctcctgggttcacaccatctcctgcctcagcctcctgagtagctgggactacaggcacccgccaccacacccggctaaatttttgtatttttagtagagacggcgtttcaccatgttagccaggatggtctcgatctcctgacctcgtgatccatccgcctcccaaagtgctgggattacaggcgtgagccaccgcgcccggccttatttttttttttttgtgagacagagtttcactcttgttgcccaggctagagtgcaatggggcgatctcggctcaccgcaacctccgcctcccagattcaagcaattctcctgcctcagcctcccaagtagctgggattacaggcatgcgtcaccacgcctggctaattttgtatttttactggagacagggtttctccatgttggtcaggctggtctcgaactcccgacctcaggtgatccccctgcctaggcctcccaaagtgctgggattacaggtgtgagccactgcacctggcctattggtttctttttttaaaaaaaaaaaaactgtttatggcactgtggagtcccaccagacaaaccattaacttaagaaaatactattctgctcaggaaaaagaaaaaaatcgtaaaaattaaattttgcatacattttctttataacatgcatactgtgtgtacttttttttttttttttttttgagacagagtctcgctctgttgtccagcctggagtccagtggcacgatcttggcttactgcaccctctgcctcccgggttcaagcgattctcgtgcctcagcctcctgagtagctgggacaacaggcgtgtgctaccacgctcagctaattgttttgtatttttagtagagatggggtttc

SEQ ID NO: 19168 - DNA, 2300 bp, Homo sapien
ctggggttataggcatgaaccacttcacccagctgaaaaacaccagtctaatggaacaatataagggaacagaatttgtaaacagtcatgttctctgctaatctgtgattagcagtaataccagtatccctccctctccaaatctattcagttggtgagttcagctaagaggtctagagtgctgatagtaagaattaacatgccatctgaatcgcttttcttctggagttctggtctttgagcaagagctgaggtggtctgggacttgcatactgataagggaagaaagccagctcgaagataccttgaaccttctggtgagtctggggttagaagtgaagtagggagtgaaacagaggatggcaaatactgggggagaggctcagtgctccattagcccatgtgacagatggtttgagaagatttgccaggtcaatgtggggtcaattctaaaagtgtcctaagtctaggccaagaggaacaaaatgcagctgggtctctgacctcacacgccgaagcccaaggacacgttagggccaaaatgtgactctctaaggtcacctgtaaaactggacaatctggtaaagtcagtgaaggttaagatcatgaatccagccaggcgtggtggctcacgcctgtaattccagtactttgggaggccaaggaaggagaccaaagagaaaggatcacttgagcctaggagttcgagaccagcctgggcaacctagcaacctccgtctctacaaaaaatacaaaaattaaccaggtatggtggccggtgcctgcagtctcagctactcaggaggctgaggtgggagaactgcttgagcctgggaagcagaggttgcagggagtcatgatggtgccaccgtactctagcctgagcaacacagcgagtgagactctgtctcaaaatgaataaataaataaaagaaaaagaaaaatagtaaaactcaggacaggtgggcccacaaggaaagagttctgtggcttttactcccgttttttggttggtccaaaaaattcccagcagtccagggatctctgtggagttctcagtgagtgttctgtgtagggtgcaggagccacaagtgactgcagggggaaaggggggttctggtgctggcattctgcagcagtgggattgtcctctgtcataaagaaagagaaggccgagcgcggtggctcatacctgtaatcccagcactttgggaggccgaggcaggcggattatttgaggtcaggagttcgagaccagcctggccaacatggcgaaaccccgtctctactaaaaatacaattagtcgggcctggtggcacatgcctgtaatcacagctactcaggaggctgaggcaggacaatcgcttgaacccgggaggcggaggtttcagtgagccgagatcgggccactgcactccagcctgggcaacaagagcgaaactcgtctccaataaataaataaaatccaaaacgctgggacttgaagtgccctcctttcaatcttgacccaggtaaaactcaggacaaataaaaagaagtagaagcagtaaacttaggacatacagcatgtaaaggttctgaacgcaggagtaaatgacttcaaatagcttttgtggcctttcgccaaggaccgggccctccctggcaagctggggccgggtctgaccttccaggttggcgtcagcaaggaccaccctgcccttcagtggccggacacgaccttgggctttcgtgcagtagcctggctgcaggccaggtcgagtccgccaccccggggacttgcaccgcccttcagaaaccgaaacctgctcggccccaggaggcggaccgggagaaggggggggggtgtgtgtgtctcgggacgggggcgtggtctagaggcgggggcaggggaggagcctcgggtggacgcgcgtgcgcaggccggagcctcgggaggaggccgggtacccggggtgcggcgcgcgcgggaggaaggcggggcctcgggcgaggggcggggcctcgggccgggggcagggggcgggcgcaggcgcaggcgcgggcgggcggggcgcggggcgcggggcgccgggggcggggctccgagccgggctgaggcgagcgggggcgcgggtggcgcggcgggacgcgagcggcgagccggagcgcggagcccggctcccgcaccatggaggaggacgacagctacggtcagtgcgccccggcggcggacgcttccccctcgctgtcccccagtcccctccgggcccggccgtccggcagcgcttgcggcggctggcgtttcccggggacactg

SEQ ID NO: 19169 - DNA, 2300 bp, Homo sapien
gaatggtgtgaacccaggaggcggagcttgcagtgagccgagattgcgccactgcactccagcctgggtgacagagtgagactccgtctcaaaaaaaaaaaaaaaaaaaaaaaaatactgccctaacatggcaccagagctgtgctccgtgccaccctcggagcgaagtggagttggcttgttagtgcaagggacatcacttgagcacttgcggtgcgccagggtccatgccaggtgctggttgtgtctactgaagtgcgccctgggccctcggggctccctggcagagccagaaccacacagtaagggctcatgctcagcaaggaggcgctgggggccgcatgggctcttgcagtcctgtgcacctgaggagagtggctaaatgggcagggcaccagacccaagggcaggaggcgcagcacgttgggagcaggcaggctgctctgcatggccgggtccctgggctgtgtggatgagatgggaaccatggaagccactgtgtgggggcaggggacacttagcctggagctcactgaggaattggaggcagggagaaatgaggtcagatttgtgtgaagggaggtgagtatattccaggggctatgtggctagctgggcagaggacgagttcagaaagggtttctagaacccgatgagggtggtgagtgctgtcctggtcccgaggtgctgggtggacctgtgcggtgttgctgatggggaccaggttccccctggacagggcttaggaggtcgggcccctgatggcagcagccaagcttggccgttccctccacccctgtggccatccaggtgtcaggctggtcctggggcatgggcctctcccgtaggtgaggtggattccatttagatctagttctcttctctccttctgtcagactgaggacttaacactactggttaaaggggttttggagggtttttttttttttggtttttagctttttgttattttccatgttttctttctcatgaattgacttggacaacagccttctctattgtgtcaggtcattagtaaattaagcatgtaagcattagtaaataagcatttaggctgggcgccatggctcatgcctgtaatcccagcaccttgggaggccagtgggagtcccaaggagtttgagaccaacctaggaaacatagtgagaccctgtctttaaaaaaaaaaaaaaaaaaaaaaaaaaaaggcaagcatccacttactgtaagttgttttataatttaaggtgtgcgattgcttccccagtgggttattttaaacgtctgtaaatgtttcttggctgctccgattgcagggctgagccaggcccctcctgtgtcttggaatggagagcgggagtctgatgtggtccaggaactgctcaaatactcatctgataaagcttacgggagaaaaggtactgatttggagacaggacttctgtttgcctttcattggttggttttgtaggagggaagggtgtggaatggatcctggtgcactgtgagtgtggcgggcgggcatcgctcggctttgagaatgggaagaggaatctcaacactggctggagtcctctttaaaccctcagccgtggcacgaaggtggcttctgtccgtggcaggatccagaacagctgcttctgagggttggggcagggtgaggagccccacacatgctgtgtcttgggtagggaaggggcagagtgacgaagctcttccaacctgggtaatgtcacttcttgctcagagcatgtttttattcagacttcgagaccaaacatgacatctttgttcctcagacgagggcatgggtttagaaagaactgaactctttggctgtggtttagggtttagctaagagggcatcgctgggggttccatgctgaccgaccacacatgggcgtcgagccgtcctcctcttgtccttctcttcaccacaaggtggcactcaaaattgttgactaattatgagtagactagttggtaaatgacactcttgaagtgaagccacaggggacctgggaacctgcactcgtgctgacccccgtgtctgcctggtagttctgacctgggatggcaagatgtcggcggtcagtcaggatgctattgaagacagcagacaggcccggactgagaccgtggttgatgactgggacgaagagtttgaccgagggaaggtatgatgtgtgatgctgaccacaggcttgagggagcagggcggcgtggctcagctcagagccggggcagttggaggtggcggcagtggcatgaagcggccgagcatgagaagagccaggctg

SEQ ID NO: 19170 - DNA, 2300 bp, Homo sapien
gcggggactgtactggtggcctcggcgctgggttctagttctagaatctccagtgctacatgagggcgaggtatgactgtgcgtcgcccacagcctctgccttactctcctctcacatatacacacacaagcacacctctgccctatacctagcataagatttgtgtacgtgggagggccttaagtgtttgggtgtttttcgtttcttgccttataagcttttttggaaaagattccagaagacacttagagtaatcaaacatcgtgcagctggcatggcccttatagtttgtttagatgatgacgggggtcctgttttctgcaggaaccctgggaggtgggctttgtggtcccagctcattgacaaatgagaacatggtggttcagagtgggaagttaattttcctagagacacatagctggcaagagggagcctcactgggttcggcactagatcctgtcccggacacgccttgctcatgattctgctctacgcatctgtgtcccggtttcagcgtcctaatgacggtaatgtggaggtgtcattaggccagctcaacacttgctttccttatgaggctcatttcctgcccgggaacaccctgagactttcggaggttggaaaataaatcctcacgggatcttttttttccttaccatttattgtttcgtgaaggtttcctcccttaacacatttgtattaaagatgtttttacattagagctcgcaaaaatacttgaattgcttggtgacaagaaactaaggcatggaacaattcttattaactttgccttttaaaaaaaaaaaaattttttttttgacttttaaaatcacgtgttggcttgcttttttttttttttttttttttttttttaaatctcagggatcagttattttaagttccagggtacatgtgcaggatgtaaaggtttgttacagaggtgccatggtggtttgctgcacctatcaacccaccacctaggtaactttgtttttttttttttgtttttgtttttgtttttttggttttttttttttttgagacggagtcttgctttgtcgcccaggctggagtgcagtggcgcgattcggctcactgcaacctccacctcccaggttcaagcgattctcctgcctcagtctcctgactagctgagattacaggcgtgtgccaccacgcccggctaattttgtatttttagtagagatggggtttcaccatgttggctaggctggtctcaaacttctgacctcaggtgatccagccaccttggcttcccaaagtgctggaattataggcatgagccactgtacctggccaactttgcatttaaatagatgttgaattaattgttagctttctttcaaacatacatgtaacttaatgtgtatctgaaaactacagggtaaaagccttttcagatttttaggtgaaagggaggggagtgagggtagacagaaggaacagctctgctgggtctttcagaacatcctctccctgtttcctggctgtccccacagggctgtgtcacctgctccccaatcatccagccgcctgcaaccccccttcagcccccaccccacattgctgtccagtacccccaagcccccagggacgtcagaaccacggagctgctcctccatctcgacggcgctgcctcaggtcaacgaggaccttgtgtctcttccacaccagttgccagaggccagtgagcccccccagagcccctctgagaagaggaaaaagacctttgtgggagagccgcagaggctgggctcagagacgcgcctcccacagcacatcagggaggccactgcggctccccacgggaagaggaagaggaagaagaagaagcgcccggaggacacagctgccagcgccctgcaggaggggcagacacagagacagcctgggagccccatgtacaggagggagggccaggcacagctgcccgctgtcagacggcaggaagatggcacacagccacaggtgaatggccagcaggtgggatgtgttacggacggccaccacgcgagcagcaggaagcggaggaggaaaggagcagaaggtcttggtgaagaaggcggcctgcaccaggacccacttcggcacaggtaagggcaggagcaaagtggcatctgtctacctctgacgagaaacaaagcaaaaccacagaatctacccccaagtaggtatggtctggaaacgtagtctgcttgcgtggttttctaaaatgtggatttgtgatcagatgtctcctctggctgggtgtggtggctcacacctgtaatcctagcac

SEQ ID NO: 19171 - DNA, 2300 bp, Homo sapien
ggggcctttttgtcttttgcttctgtagatgacttttgatgttacttgcattatgatcagagcgtgttgataatatttctacttcatggaacttcctgatgttttctccgtgattataggtgaccagcgtttgtgaatgtttcctgcatgcttggcggtggctgctgagactgccagggtgttggtttgctcctctgtccatggatgggtctactgatgatgcagttttcattttctatatccatgtgctcttgtccccttcatctgtttggaatagtgtgttaagtccatgattactggaattctggtgggtgcctgtctccttgcatctcctctagttttgctctatacaggtggttgtggttagatattcgtaactgtcatgtcttcattgaggatcgttgcttttagcattctgagtgtcttcacttgtcacgtggagtggcttttgttctgaattctgccatggccagtgtcagtgctgcagcccctgcttttgcagggtttccgccggccccttgctgtcactttctgaaccctttcttagaggcgttcttaagatctgtcttgttttgtaagccaaaatgaccatcttttaataggcaggttaagccccttcacatttcctgttatgactgaaaagtttggtctcaattctgtcatatttatgtattttatagtaattataggtagcatatttactgtgcttatttctgatttttctttatttctcaaatttctttggatattaggaagatgtgtgtttttgttttaatggctacctttgtacataaaccattctttttgagacagggccttgctctgtctcccaggctagagtgcagtggtgcaatctccgctcacggcaggctccacctcctggactcaagcaatcctcctgcccagtaactggaactgcaggcacgctccatgctgcctgctggtttcatacgcccttttgaaatgcacctggtcctgttttcctcgctcctcactgtctgatttggcagtccaccgtggtaccctttacttcctagctcttttcctctcctctctctcttgccattttagcgtgcatgatttcattttttttgttggcacctgtaaggtggtatctttttcttgcccagccttgggttatggttacatcttcccattgctcattgcccaccctccagttggcacctctggtgcgctcctggctgggtgaagcccggcctctcataagttcctccaggagggcagctgtgtgtggcactctagttccagaaatgaggccactctcactgtgttgaggacgttcggcttggagttttggtggctgtgtccttggcatcatgtctgttttctggagctagtttgcatcccatgaggtgttttgattcttgttcattgctgctttgtgcttgaagcactttgcatagactgggcctgctttcatttatcttgtgggtcggctggttttcaagattcgtatccagagcgcctcctctgtctgccccgtgcagtgcactttcatggttggcttttcctctggcagcagaagggtcgatagtctaggatagttttgagtttttttcaggaccctgatgtttccccttttgcctctcttgcccttcactgcccttctaaggctgcctgcctgcctctttgccttctccccctgagagcccatgcctgtggagactgctactccagctgcgtgcctgtgagaccccatattcagcacttcacttcagggtgccctttgcagctgtgattccgggtggctctcgggccacctcctgccccctcctccattcttgcccagctgttctctactgccctttgtccccaggctcagtgggatgcctgtgggagctcgctgtcactcagcttgcctttcctcctcctggggaaggtgacagttgtgcttcctctgctttgggttatgcaagaggggattccttgtggccctgcgggcgctggtgcttgcgggcttctggatgacagaggggttgtgggggtggtctggattttggtagccgccatcacacgcagctacccacagttctcagtccatgcagagattacgtccttgctagtatttgcagttaaaaggtcacttttgaagaatggtgggacagtagatggtggcagttgatttttcattttctaactttgcagaataaaaattgaatgatcctgtattggtcccccaagtatttcagagctcccggagtctgggaagtgccatggtaaatagtcacacaggccagatgagagactgaggtgtgcatgttctgtgggaggggaagtgt

SEQ ID NO: 19172 - DNA, 2300 bp, Homo sapien
gttgcatttctttcttttttttttttttagaccaagtattgctctgttgtccaggctgctggagtgcaatggcacgatctcagctcattgcaacctccacctcccaggtacaagcgattctcctgtctcagcctccctagtagctcggattacaggcgtgcgccaccatacccagctaatttttgtatttttagtagagacaggttttcaccatgttggccaggctggtctggaattcctgacctcaagcgatctgcctgcctcggcctcccaaagtgctaggattacaggcgtgagccactgtgccctgcctttttttcttttcttttcttttcttttgagacggagtctcgctctgtcgcccaggctggagtgcagtggcgacatctcagctcgctgcaacctccgcctcctaggttcaagggattctcgtgcctcagcctcctgagtagctgggattacaggcgcccaccaccacacccagctaatttttgtatgtttagtagagacggggtttcaccatgttggccatgctggtctcgaactcctgacctcaggtgatccgcccaccttggcctccaagtgttgggattacaagggtgagccaccgcgcccagcccaaggattcttacagatagggcatagtctcagcatcagactaatatggttatcttgtttgcttttttcaaaaaacaccagcgcccaggtaataaatacaaggtgaattttgttccaagtacatctagcctctctccccatctccagtccctgctttaggatccgtggggagggcatggaaattcgttttgggttgtttacctgtgacttcaccctactcatcattcctacttacatcaaaaaagacacagcagatacgactgtgtttgcaaagttctgccttttggataaagtagtttatgcccatcctgtgcttctctgagtttctgaggtcaggccaggaaccaacactctcaacctgcccaagggaatggggaggaagccagcgaagttgcctcagatcaagaggatttttaaaaatactgcaaaagaaatacgtgctcacaaatactcagctaaaaccttcgcagagctgtcagaggacaaagcttttggagggagtgggtggagctagagattgcacagccgccaccagcctacaaaggtcaaatctcacactctcagatccctaattccgaagagccatttcctcggcagccccaggctttggccgatcgctcccagatccctccctccccaaactgcaggtgctccgcgtgtgggagtcacggatggccccagagcccgggacgttaaggccgagcgcccgcgcctccgcttctccacagccacctgacggccaggggcaggtgggggagcccagccttctccctgcccgggagacagcgcgggagggctgttgcaggggtgggcaaagtccctcgagtccccgttctggggcgggggcgcgcgccactgtcacacttcaggcgtccgccacgccgccaggtgtgctcggccgacccggaagtagcggcacctctagtgcgctgcggagacgtcaccctgccgcggcacaggggcgggagcgcctgtggctctgcgcacttgcgtcatcacgtaggctggcggggtcccgtgatggggaggtgacgtaggcgacacggaagcggcggtgggcggggacagggagttagcggaatctagccccgcctcttaaagcctcccaaccctttcggagttagcgcagcgcgaacgctgggtgcggcgcctttaagcgtcgcggtgacacgtgtgtgaggcgccggaggcccggatggtgcgcgtgctgggccgcgggccgaaggagtcgccagggctgcgtaggcttgtggcgcgcccgcggagaggccggggtaggctggggtcgggtcggggcggtgcgcaggcctggggacgagaccggggcggggggttccgcgaggcctggggcgcgggaagggctggcgggcgcagccgggacgctcagggagaacgtgggcgcgggtccgcgcagggcttcggccgtccccgaggaggacccgggatgctccgcccgctcgcgagctcgcttctccagagcccgggtattcccgaggagggtccggggccgggctgtcctcgccggtctccgccgtcccccgggctccgggccggtgatgggggtcgccggggcccgctgtctgtgcaggattcaggtcaacttcggagaggttgaagtcggaatcagggcgagggcgtcgcgtgcggccgcagagctcagcggggcgggtgcggccccgggg

SEQ ID NO: 19173 - DNA, 2300 bp, Homo sapien
gcaactgtcagccacacccaaagaatgcagggcaggctcactgtggataaatgtttatgaaagaaccacatggaaattgaaatatttgagatgagactgaatgatctctaaatcctaaaagagaaaactagagaaacattaaagatgaaagaataaaatattctgttatagaaagctgtaaccaaaacggatcacattagaacttacctcaagaaaaaggtgcattaacagaatagttgtattgtcacccaaaaattacctggtccgctccctgcctgggaggtcaaggtaagatggactcaattcctctcctggtttcacagcctgtagaagatggctgaagatttgggctaatttcgtgagagacctacgttgcatttctttcttttttttttttttagaccaagtattgctctgttgtccaggctgctggagtgcaatggcacgatctcagctcattgcaacctccacctcccaggtacaagcgattctcctgtctcagcctccctagtagctcggattacaggcgtgcgccaccatacccagctaatttttgtatttttagtagagacaggttttcaccatgttggccaggctggtctggaattcctgacctcaagcgatctgcctgcctcggcctcccaaagtgctaggattacaggcgtgagccactgtgccctgcctttttttcttttcttttcttttcttttgagacggagtctcgctctgtcgcccaggctggagtgcagtggcgacatctcagctcgctgcaacctccgcctcctaggttcaagggattctcgtgcctcagcctcctgagtagctgggattacaggcgcccaccaccacacccagctaatttttgtatgtttagtagagacggggtttcaccatgttggccatgctggtctcgaactcctgacctcaggtgatccgcccaccttggcctccaagtgttgggattacaagggtgagccaccgcgcccagcccaaggattcttacagatagggcatagtctcagcatcagactaatatggttatcttgtttgcttttttcaaaaaacaccagcgcccaggtaataaatacaaggtgaattttgttccaagtacatctagcctctctccccatctccagtccctgctttaggatccgtggggagggcatggaaattcgttttgggttgtttacctgtgacttcaccctactcatcattcctacttacatcaaaaaagacacagcagatacgactgtgtttgcaaagttctgccttttggataaagtagtttatgcccatcctgtgcttctctgagtttctgaggtcaggccaggaaccaacactctcaacctgcccaagggaatggggaggaagccagcgaagttgcctcagatcaagaggatttttaaaaatactgcaaaagaaatacgtgctcacaaatactcagctaaaaccttcgcagagctgtcagaggacaaagcttttggagggagtgggtggagctagagattgcacagccgccaccagcctacaaaggtcaaatctcacactctcagatccctaattccgaagagccatttcctcggcagccccaggctttggccgatcgctcccagatccctccctccccaaactgcaggtgctccgcgtgtgggagtcacggatggccccagagcccgggacgttaaggccgagcgcccgcgcctccgcttctccacagccacctgacggccaggggcaggtgggggagcccagccttctccctgcccgggagacagcgcgggagggctgttgcaggggtgggcaaagtccctcgagtccccgttctggggcgggggcgcgcgccactgtcacacttcaggcgtccgccacgccgccaggtgtgctcggccgacccggaagtagcggcacctctagtgcgctgcggagacgtcaccctgccgcggcacaggggcgggagcgcctgtggctctgcgcacttgcgtcatcacgtaggctggcggggtcccgtgatggggaggtgacgtaggcgacacggaagcggcggtgggcggggacagggagttagcggaatctagccccgcctcttaaagcctcccaaccctttcggagttagcgcagcgcgaacgctgggtgcggcgcctttaagcgtcgcggtgacacgtgtgtgaggcgccggaggcccggatggtgcgcgtgctgggccgcgggccgaaggagtcgccagggctgcgtaggcttgtggcgcgcccgcggagaggccggggtaggctggggtcgggtcggggcggtgcgcaggcctg

SEQ ID NO: 19174 - DNA, 2300 bp, Homo sapien
gggcagggggcagccaaggatgatgtttgagcagaaacgaacgtgaataaaaaaagacagctggttgcggtggatgagaggatggttaggagggcactggaaatagggggccgtcagggcaaagccgtctgttctggagtggcctgccgggagacatttcctagatgtggcttttcaggatgaggcatggattagcctgggaaacaggaacctgtggccttggccagtcatgactcagctccaacagaagaagaaagaagaaaggggtttgtgcccaggcgaggcagtggggctgtggtgtgggactctgatgccagcctgggatccagagagcattggtggggcccagggggatggacacagatggagcacccacacgcctgagcctccttgcccctgtgggaagagacagccctgcctaaggggttctaagagatttgagccgaccacgtggggtggggctggggctggggctaggaggctgcctggagcctggcgtggtctgctccttacctctctgttttgctcatatccaccgtaacataacacttacccagagtgaccctgaagagctgagtttgggagggcaaagcttttaaagccattaaaacagaccatgtcaccaactaatggccttgaaattaagaaagggagggctctacccaaccctgcccaagtgacagcatgaactactgatctgcttgtcctcaggttaccaggagtggaacagaatcctggcttaattgctaggagaaagccctgtgttgcatggcctgtcagcaacctcaggctccagaatattctggaattgccccagcccagcctcttccccaactcctttctgtttggttggggcttagttgggatcctctttccttctgtttgtccttcctcagcatctgtcccttgggtctgccagctgtgcctgccgatgtctcctttgggtgaaacttcctgcccctgcccctgttgtgcccctgatagactctgtgttactgtaaagaatcacccaggctgggcgcagtggctcacgcctgtaatctcagcactttgggaggccgaagcaggtggatcatttgaagtcaggagttcgagaacagcctggccaacatgatgaaaccctgtctctactaaaaatacaaaaattaaggttgggcactgtagctcatgcctataatcccagcactttgggaggctgaggcaggtggatcacctgaggtcaggagctcaagaccagcctggccaacatggcgaaacgctttctctactaaaaatacaaaaattagctgggtgtggtggcagctgcctataatcagagctacttgagaagctgaggcaggagaatttcttgaacccaggaggcagaagttgcagtgagccaagatcatgccactgcactctagcctggacgacagagtgagactccgtctgaaaaaaaaaaaaaattaaccgggcgtggtgacagacgcctgtaatcccagctacttgagaggctgaggcaggagaatcacttgaacctgggagatagaggttgcagtgagccaaaacggtgccactgcactccagcctgggcaacagcgcgagactccatctcaataacaacaacaacaaaaattactcatagaacattttccaggtcaggaaagatgagaagagctggatagacctttccagatgtaagacccccaaagctaaatatgccgggtacgtttaaggcccctttaaggtggataactccccctctgccctcagcccagaaaagcttgtttccaataggccgtggctggagggtggggaaatgtcccatccttcgcggaatgtgtgggattgtgggtcagttccatggggtacctgcttgccccagccaccagtgagtacccactggagagaaggaaaaaaaaagccaaaagcactcaagcatgatatcaacagatgagcttcagtcaaatcaatgactgcctcccactgttacagaaactgccttggtcacaagggactctgggcttctggcttgggcccctgtcaacaaagaagggattcttgttgaagaatcgtggaaggaggaggaggaggctgggcatcatctctcagcctggaggaggagacgccatgccgggggctgggatcaccatgccccttgcccgtctcgcaccttgctgctgtctgtaaccccccagcacctcccgcaggcctggacgtcttatccctctccttagccccaggagcgtgtttcaggaactctcctcacctctgtgtcttgtgttttgcagtgatcagggccaaagcggtcagtgagaagg

SEQ ID NO: 19175 - DNA, 2300 bp, Homo sapien
gcagcagggtcactggtgcagtaatgcagcctgagtctcaaagcctgagaagcggggtggccactggggtaagtcctggagcccaaaggcctgaggcccaggagctctgaggtccaaggcagaaagaaggtggatgtcccagctctctctctttttttttttgagatggagtctcactttgttgctcaggttggagttcagtggtgcgatttcggctcactgcaaccttcacttccctggttcaagcgattctcctgccttagcctcctgagtagctgggactgtaggtgtgcgccaccacgcccgggtcatttttgtatttttagtagagatggggtttcaccatgttggcctggtctcaaactcttgagctcaggtgatccacctgcctcggcctcccaaagtgctgggattacaggcgtgagccaccgcgcccagcctggatgtcccagctcttgcagagggagggtttgcctgcctctgcctctgtctctttgttctgtccgggctttcaacagattgagtgatggtgccccacctggcgaggagggatcttcttactcagtcccccggttcagatgccagtctcttcccagagccacccagaaatcacgttttcccagctatctgagcatcccttagcccgtcaagctgacataaaatgaatcatcaagggctgcgaagatggactccaaaagtgggcgggggtaggggggtggtggtggactgtgatcgagaacattcctgcagggagaatgcctcccttccctgagtcagggaccagataacctttccagggtccttccagcccaggacaaagggctttgtctcaggttcagctctcctgagaattcatcctccccgagatttggacacctcagccgaattcctgctgtttaccttcttctctcaagaaacaacaacctgaggattgttgctttcacttcttcggacccaaatcatgatttcccagccacatttctcagttgtcaaatttgtggaggatgctggaagcttctagtgagttgcttacagatgatccaactggcggcttactaaaacatatcttgggctgggggcggtggctcgtgcctataatcctagcactttgggaggtcgaggcaggggaatcgcttgaggtcaggagttcaagacccgcctagccaacatggtaaaaccccgtctctgctaaaacacacacacacacacataaattagctgggcatggtggcatgcacctgtagtcccagctactcagaaagctgaggcactagaatccctgaacccgggaggcagaggttgcagtgagccgagattgcgccaccgtactccagcctgggcaacagagcaagactgtctaaaaaacaaacaaaaaacatatcttgacaatgccagtcatcactttaccacagaccttaagatgccaaccacccagactaggtcaggggcccccatttccagcagctactcctgcttcctggaaaccccctgcaccggccagactcccccagtgtcccatgttcatccccagcctcgccctgccagcttccctcgcccatccttctgatcaaactgtctgtggggaactagccctcaaacgaggccaagtacgtgtggcttctcctcctgtgtgggcaggtggttgacgggattctttcttcccccgcctccagtgggtttcagtttaacgatggctttctggagctgtttagaagcgtgaacagatgctgtccctacaggagaagggatggcaggcgttgtcaggaaccctgaccttgaagtgtacctccttaatggcctgacagctcagagagaatgacaccctgggaggtctccatgcagccagctggggacaaaaagatgtcctctgcctggtatggccacgagcatttgtacattgcactgtccttgttcacccacacctccttaaacagtgccttcaggtgcccccatggctcccggctgcttgagccaaatctttatgattgatcccctaacctacacgcttgccccctggctggctcacagctgtccctgacctcacccctgccatgatgtcacagctcaacagctctgctgttcccatggcaacagcctgctatgagtagccagccagggcagaggccgggctgcaggtggaggcggggaagcgattccggccacctttggtcagtgggcccctgagaccactgcggggctgaggctctctgtgtctgttcccatctgtggtgagggtggggttctttccatgcccagctgtttagcgaggctcccaagagggccccggagagtgggccaag

SEQ ID NO: 19176 - DNA, 2300 bp, Homo sapien
taacatgtacctgatcacttatatgtagagcttgtctaaaagaccgagagcccctatgctacctgtttctatcatgaactgacaaattgaaacacaagttcaacagcattttgttccccctgtaaccaaaaagaaggaaagaaaacgatgaaatggctgaaggcagccagcacataacaattttctgaattaactgtacttttaaacgttagcttcaaacatcattttgtgaacgacccaactctatttcacgctaacaaaaaccaaaaaagtgactttggatttgtcagggtgctaaaaataacggcattgcttatttaacttttctcagaactgtctgttacaaaacatacacaaacagaaagaagctgtttttccattctttcactattttccaaagtttcatacctcaagtcagcaccgcacaatttagtgggcaattctttttaaaaaaaaaaaaaaaaaaaacaaaaaaaaacaagagtctttctctgtcgcccaggctggagtgcagtggcgcaatctcggctcactgcaacctccgcctctcgggttcaagcgattctcctgcctcagcctcctgagtagctgggactacaggcgcgcgccaccacgcccggctaatttcttgtgtttttaatagagacggggtttcaccgtgttagccgccaggctggtctcgaactcctgacctcgtgattcgcccacctcagcctcccaaagtgctgggattacaggcatgagccactgcacccgggctttttttttttttttttttcttttgagatggagtctcgctctgtcccccaggctggagtgcagtggcatgatctcggctcactgcaagctccgcctcctgggttcatgccattctcctgcctcagcctcccgagtagctgggactacaggcgcccaccaccaagcccggctaattttttgtatttttagtagagacggggtttcactgtctctactaaatgctagccaggctggtctcaaactcctggcctcaagtgatcctcctgtctcggcctcccaaagtgctgggattacaggcgcaagccaccgtgcccgccctgattcttcctgtgtcattttcctgggcttccctctccctagctggactgcaaacactctggaatgctgacctgagggctggagtgctgacctgagtgcagcagtgtccatggagccccacggggcacacaccaaatgtacagggtgggtgcccacagccgggcacaggcaggttcacagccaggaagcccgcctcaccaccctacacatgttcatcccttcatatgcctgggtctttcctggaacacaaaactgttttgggaaaagtccttcggctcccacatttgtggactaagagaggaaactgtgagcggaacccagccaatgcctctgctgcgatcctactggctcctgggcgcctgggcccacccccgtctcttgttggctggtcaaaaatatggccagtttatataaaatcctgttttgttcacagtaaccacaccccccaccccccaactaaactggccaggcgcacttaaaattctaaggcctccatttgaaaaagggatcctgtcagtttctcaataggccacccgcccacagaaacggggaggtggcgacagggaacggcccctgctccaaaggacaccccttggctcgccccgaggctgggctcgaagggaccccggggtggcgggggacggagcagcgtagccctccagagtcgagctgaaggggaaagggtagcgggtgggtcgcctggtgtcctggaagaacggggcgcgagtcccccgcgctgagtcagggaccccgggcgcagaaggccacgcagcggggaccggggtcggggggctgggggcgtccggggacccccgcgcgggtgcgggtcgcgggcgccaggtggtgcgggaagcccccgacgtgccaggccgggcacaacaaaagcgcgggctggggggaggcgcgggcggagggggaggagggggctgctgggagcgcccagagcctgcattggccgccagccaccgggaggaggagcagaaaatcctccgagcgcaataaaactgcggcccggcccaagcccgcagcaaacacatccgtagaaggcagcgcggccgccgagaaccgcagcgccgctcgcccgccgccccccaccccgccgccccgcccggcgaattgcgccccgcgcccctcccctcgcgcccccgagacaaagaggagagaaagtttgcgcggccgagcggggcaggtgaggagggtgagccgcgcgggaggggcccgcc

SEQ ID NO: 19177 - DNA, 2300 bp, Homo sapien
acaactttagccgattacgtcgcctcactgagcctctgttttctcatctgtaacagggaatataagagcagctgcttcccatcatggctggaagtattaaatgcattcatttgtggcaaggcttatagtaatgcctggcgaaatccatattagctattatagggagcgttcctcaatttgcggagaggtttggggtagaggcacaaaagatgaccttacaggccagttaaccattctcatctctgaaatgccccgcactttccctaccatgtcttgggagcggcttcctgatgacagcagttctgtccacacgaatctgaggctttcacccagctgtcttctcagagccgagccgctgccccttcccctgcctgtcccctgtcagcgcttccctccaccccatggtcatcgcacaccggaaaggccttgcgagccccaggggagcagatgttggtgctccgattccacgaggaggcctctgggttttccattttacctgcctggatggcttaggactttcccggactctggggctaaagattcggcacctgagttttaaaacctttcccagcacttcccagagatgccctcccgtcctctgcactcctgtccttccctggccacttgggcagaagtcattagcactgctgagaagggatgatgctggggtttctgtgcactcaggcccttaatccagatgagatttttttaaactccccacagccagttctatttccagctgcacctgcccctggatcttcacagttcctctggaggggattaggcaaaccgtgcagctgcctaaaacctcacaccttgaaggaaatagtcattgaatgtctgacctctgggctggctgtctcggactctaagctgccagggaaccagggccttccacccagtgggactgcctgggggcttttaaatgcccctgcctgtcccctactcccagagatggtgacttcctgggtctaggcattaggagtttgtaaaactccctgatgattcttctgtccagcccaggctgagaaccactggtcagaggcctgggcacatcccaaggctcatccagaaccatggggtgcaagtgacagaaacaagagcggctgctgattgcctcactgagcggtgaagcccagccttgaccatggattaggccagctggacccaggagctcaggccggaggatgcctgcttccctctgctctgccccaccggccccagcagcctgggcccacatcctctcagtcagaagctggctctcaccggctggctgggctcacagccccaccctgaaaccagcagtgtggcccggggcccccgcagggctcagacagccaggccttgggtggttgaaggccaagagctgggggccctctgggaaccacacagccgggaatgggagggggtgctccccaagggacagttgaggtgccggctttcagtgggaggaaagggaatgggtatgagctggacagagccattatgtcacccagagaggctctgtcccccgccccgctgagggggagacagtaggagagtggccacaggtccagcagtggcgagcacaggctctggggtcaggtgttggagcagggtccagctcctccactggccagctgcatacctggttctcagtgcctccctcccctggggacaggggacagtgccatgcaaccttgtggggcacaggccctctgtgtggtcagcatgccaagagcacagagagggtggatttgcacataagcagccccctgtgtggtgttcacccagccagcaacgtgctagacccaggaaaagactcggagcgctctgtcagagtccacagccacaccaccaggtgcagactgtctgggcccagagcctctgcttcttcccctcccgtccaccaaacgccagcccctgaccagcctggcggcctttccaactgagtgtggctgttagtcctcttgcaggccttgctccagccagactcccaccttgggcctctgccagcctggcactgatagccacaggcagagctgagacaaaagagaggggccctggggagtatcagcagcagccaatcccggaagacatctatgtcaggtggtttctggaaatcgaaagtagactcttttctgaagcatttcctgggatcagcctgaccacgctccatactgggagaggcttctgggtcaaaggaccagtctgcagagggatcctgtggctggaagcgaggaggctccacacggccgttgcagctaccgcagccaggtaagctcctgcctctagctctcaggtgggcacccctctcagtc

SEQ ID NO: 19178 - DNA, 2300 bp, Homo sapien
acttgagcccaggagttcaagactggcctggacaatataacgaggcctcatctctataaaaaaaattaaaaattagctgtgccccaggtgtgttggctcacacctgtaatcctggcactttgggaggccaaggcaggtggatcacctgaggtcaggagttcaagaccagcctgaccaacatggagaaactgcatctctactaaaaatacaaaattagacgggcgtggtggtgcatgcctgtaatcccagctactagggaatctgaggcaggagaatcacttgaacccaggaggcggaggttgcagtgagccgagatcgtgccattgcactccagcctaggcaataagaggaaaactctgtctccaaaaaaaaaaaaaaaaaaaaaaaaaaattcgctgtgcgtggtggcacacgcctgtagtcccagctacttgggaggctgaggtgggaggatcgcttgagcctcagaggttgaggctgcagtgagcgtgatcactgttgcctgggcaacagagcgaggccctatctcagaaaaacaaaaaaagaaatgtaggcgggattggcatagcaggtaagatagagtaattcgagctcagtggagacttcttgggcctggctggggttttgaggccttgggactagaaaaggggcagggcctggatgcagtcagaggaggatgtccagcacggggaaccccagccctgctgccgggaaggccccggtgatcagccctgtgaccacctcagggggtcctgagaggcctgccccttaaagggagcatggagtcttccctgcgggcctggaggaactgctggcagcccccctgtgctgttaggaggatcactctgagcagcaggttccacgtatgtgccttgttcactccttgaacctcaccctggggctaaaacctaggactgtccgaaagttccatgtggaattgtcaccctgtttttgtatcttctcagcccagcaggctgcggcgtggagaagggggtgtctctggtgggggtgtctgttgctggctgccgtgcaccagggcctcgtggtccacatatttggggcccagaattgcacggagccactggagtccccaagcccttcccaggcgccctggcagggaggacagcgtctgcccataaaggcacatgtttgctgctttgttgttttctcaaggaggacccagccagggaagcttctcaggccgggattcactgagctatagttggagggcagagatatggaacctctgcccagggccagtgttctcgatcgaagcaccgggagctgtctccccacgccccactgtggcacttggcggctgtccagagacaggcagctctcaccaaggcggcgcagacgtgggcctggtgccccatggctgcactgagccatcatgctgtatgcccgggaagtgggcttggcgacagcagtgaagggctgcagttcctggccgccaccagcaccctgaccctggggctctgccacagagccacgcctggggtggagggtgagctgggagaggcctgcggccgagccaggccccgcagtgagccgagcagttctttggcgccaaggcacagacacgctggcctccaggcagtcagggcagcgcagactctggtccctgcagtcatttgcattaatagaaaggcgccaggggacagacactgccaaaaacaacaacagatacgaaaaagaaggagtgtttttatttggtttggatgtgtttggtattccaatgctgcaggagcctaacccagaggaagtggagactcctttactgcacatctgtctgctccaggccaggcactgttctaggagccaggatacagaggtggagacagaaacaaacaaaccgataactgtatacaatactctaacgtcaggtggggacaagggccaaggacccagggacggagggtgatgtctgcagcagggcagtcagggagggcttcctggatgaggtggcatttgagtaaaatacagacctgtaccctgtctatgatcctatcccacttcaccccgtcagccttcccctcccacctgactctcctgcgcttctctctttagagggaccacagagcaccagcctgcatggaacttccttcctcactcagcttcccacgttgccagctgggacaggggagatggagtaattttgctgtggaaagacttcacgtcttgccgaatgaaagtaagcaaagatactgctagagtcgggaatctagagtcgggaattcattaagccaagggagtaagaatggccacagagtagtgaaatactgtttcttctggaaaag

SEQ ID NO: 19179 - DNA, 2300 bp, Homo sapien
gcaaggacagccagaggtcactttcattgccatcctggatttggagggttttgaccagcttctttactgcatcctgtttcatcagcagggtctctgtgacccgtatcttgtaacctcctatctcatcctgtgactaagaatgcctaatttcctgggaatgcagcccagcaggtctcatttacccagcccttattcaagatggtgttgctctggttcgaaggcctctgagagagccactggatctctcaattattgcatacagttttatttcattttataaaggttaaaatagacagaattaaacaatatattgtttagggatacatacctatgtgctaaaattataaagtaaggcaacagaatgattaacacaacattcagtattgtggctaccacctcttgggggtagcagggagtacagaacaggaagaacctggagagttttaaagatgcaggaataatgtgttatttcttaagctggaaggcacatgtggatcttttagaaaataaaagattcaaatataattgtcacatgcgtccatgtgaagagattccaccaacgggccttgtgtgagcaacaagactgtttatttcacctgggtgcaagtgggcggagtccgagaaaggagtcagcaaagagtagtgggattatcattagttcttataggtttgggataggtggtggagttaggagcaattttttgtgggcagggggtggatctcacaaagtacattctcaagggtgggaaaaatattacaaagtaccttcttaagggtgagggaatatcacgaagtacattatcctaagggtggggagggtgtattgtcataaggtcaattgatcagtgagggtggggcaggaacagatcacaatggtggaatgtcatcttttgtggttcttcagttgcttcaggccatctggatgtatatgtgcaggtcacaggggatatgatggcttagcttgggctcagaggcctgacaataatgagtattatgtgagacatggttgggactcagtttagcatgacaagaaacattaatgaattcaagaaaggtttgtctcctctccaaaatcaaaaaccaaaagtgcataacagtgtttagcacatttctatttagttaaaggtaatttaagatacgtgtttatgacttgtttggataccatataacatctagtgatcgcctctgggcagggaatacagaacggcaatgggaggcttatttttcattgcgtaccatttatataatttgaattcctcctcttgtgtatcttttactgaacggaaggttttgagagagctgggggaagtagctggtatcaagcaggaaagctgaaggtgcagatgggcagggggctggtgcacccttctgccaagctctcctgccagaggctccacggccaccaggcctttctcagaactttgggatggaggagggcggggccggggaagccttttaacagagtgccctaaaatatctcgggggctagggctacggaggggaaaggagaaatcagagacccttgtttggcaggtttgtcaactgcagattttttgcagggaaacaccccaccgtccccaccccaggacactacagccttagacctccctgatcctggctttggcaactggtcagcagcactctggaggcggctgttttgaagggccaaggagaggggctgcctgagaatgaggatggcagaaaggggcccacggttttccgcctcccaagactacgagggtcgggaggcccatgtaagggggccctcgctcggagaatgagaacttccctccctagtagccttcacccccctcaatgcctcccaccccaaaagatctgctgggcccacgttccagcgcaacgcggtggaagacggccctcatgtgccagtgcggaccctcgcgcccctccagcctgcagccagccggccgctcctccagcgcgcaggcgcaggacggaaaaaaaaaacacaaaaaaacaacaaaaaaaaaacccaaaaaaacacaaaccacagctcccagcagccctcgcgccgtccgcgcgcagccgcagagcagaggctgccgggaacgcgggcccagaggcggggcgagcgcgcgcggggcggaagtcggccaccttcctccgtcccggccgttagcccagccaagcccagccaagcccagccaagccccgccgatcgcgggcaccggagccagccccgcagcgggtgagtgactgcgcccgcggccgccggcgccctgccccagccacgggcccggacccccgtcccggagcctgccgccgccctccgaccctgc

SEQ ID NO: 19180 - DNA, 2300 bp, Homo sapien
attagggctcactgcagccttgacctcctgggctcaagggatcctctcacctcagcctcctgagtagctgggattacaggtgtgtgctgccaagcccagctaattgttttatattttgtagagacaaggtctcactatgttgcccaggctggttttaaactcctgggctcaagtgatcctcccgcctcagcctcccaaagtgctgggattaaaggtgtgagccaccacacccagcccatcatctgcatctctttctctttcaagctgtgtgtcccgctttgtgaattctggtatctgcccacgactttcctgagtctgaggctcccaggcagggcaacaagaagccttctcattgcactgagggatttcctagctcgtaagagttctagaaagtcccagattctctgaagtatggacgaaggtctcataagggctgcaaaaaatgctgttgttttctctggtatccctgcaccaagggctatttgaggacagagtaactaaggaaaggtcagtccgtgtgctaagccttgctcctggtgactgggaaacttcctcatgtcacttacaggaatggagacaagcttatctctggcttttcctgtatcaataagcaaccagggatgtaggttttgccaagcctcagacacgtatgccaagaacacaagcaacccctgatcttctaagcctagcggaggctgcatctctagttggttaagtagtgttgacttcatatccccatcgtgtcctctgagttccccctgggtgctggaggcctggcagcctttctccctgtactcacaggaggggttgacgcatgcagtcagggcctctgtggagtggcttttgggcgcctcgcctgcccggaagcctccccttctgttctcatctccatttgtcctcagctctacctgagtgctggcctcgcccagcctggggcaaggcagtgggcattgtgcttgcaccctcttcttcctctcctttttgattcttttcatctgtccagttgttggtgcggcggatgggaggacactccaggcagggaaaggtgaggcctcttagttttgctctgaatgtcccaaccagcatccccattttcgcatctcctgtttgtccagagacagaccctcacaggagggataacaaaacaaaaaaatccagctgcaacatcgaggtgaggggcagctcggagagaacagggcagaggggggaaaaaagaagcaaaaaaagggggaatgctgttatcatcagagctggcttctgcttctctggccaaatccttcccctgctagtgatatggtaagtttccagagcaagctgggctgacgcagagtctagggatggagactgggtcccaaccagggccggctctggagcagcctggatcagggatcaggatgggagggcagcctacgggccttgttcagaaaaaatatttgtgtatgactgagaaaatgtcaggttttcatatcaaggaatgagaggcctgatagagactgaggagtgcttccagccatcctgggctcaccactgtactcgtgctgttctctagaaaatggaaatcttcccggcaggggctccttcctaacctttagatcacagagctctcaagactctgaacaaaacagtggaccatcaccttccaaaggtgatgcgcgcgcgcgcacacacacacacacacacacacacacacacacagtttggcattttgttatagggggttcacagattcccccaaacctgtctgagtccccgataatgcacagggcgtctcaggtctgccactgtttggagacctgacccctcagggttggccacagcggatcccggaggccttggggctcatccctctgctaccaagtgactaggagcgctcagccttgctgggcacccccatcctgcggggggcattctcgtccggggctcgcagcccctccgcctctggacggacctccagactcacggaatctgccccacccccactctcagcctggcgggctccccagggggccgggaggaggcggccgctggatttccctgaggcgcggcgcggggcacacacggttaatcctccgcggctgctgtttggacgaaaagcgctgggggtgttggaggctcctcgctgctcacatctggctgggcttcgctccttgcgcgtctgtcccactttctccctctcttcctttactttcgagaaaccgcgcttccgcttctggtcgcagagacctcggagaccgcgccggggagacggaggtgctgtgggtgggggggacctgtggctgctcgtaccgccccccaccctc

SEQ ID NO: 19181 - DNA, 2300 bp, Homo sapien
tgctgttctctagaaaatggaaatcttcccggcaggggctccttcctaacctttagatcacagagctctcaagactctgaacaaaacagtggaccatcaccttccaaaggtgatgcgcgcgcgcgcacacacacacacacacacacacacacacacacagtttggcattttgttatagggggttcacagattcccccaaacctgtctgagtccccgataatgcacagggcgtctcaggtctgccactgtttggagacctgacccctcagggttggccacagcggatcccggaggccttggggctcatccctctgctaccaagtgactaggagcgctcagccttgctgggcacccccatcctgcggggggcattctcgtccggggctcgcagcccctccgcctctggacggacctccagactcacggaatctgccccacccccactctcagcctggcgggctccccagggggccgggaggaggcggccgctggatttccctgaggcgcggcgcggggcacacacggttaatcctccgcggctgctgtttggacgaaaagcgctgggggtgttggaggctcctcgctgctcacatctggctgggcttcgctccttgcgcgtctgtcccactttctccctctcttcctttactttcgagaaaccgcgcttccgcttctggtcgcagagacctcggagaccgcgccggggagacggaggtgctgtgggtgggggggacctgtggctgctcgtaccgccccccaccctcctcttctgcactgccgtcctccggaagaccttttcccctgctctgtttccttcaccgagtctgtgcatcgccccggacctggccgggaggaggcttggccggcgggagatgctctacgggcggcgcgggaggagcggccggcgggacggaggtaggtggccgggccgggggacccagcgctgccccgccccatcctcgtggcttcagcctggtggccagggcggggatggcagacacctgggccgggacggacggagagcgccgtgggaggggccggttggcggtggcggcgcaggggcggaaagacccgggttttcgggggcagccctggcgtctggctctggctcagcccccgccataggcgcctttgcgcgggggtcataatggtcccgggtctccctgactgtggaggagcggggcttttctgcacgtggatactaacgggaggaattgcaccttccccctagttttttgtggggtgtttatcttgtttcactgttctctggtgcctttctgagggtgtggaaggaagaggaatggtactaatgcccgcggctgcacctggcggggatgccctcaccccactccttatcactgggaccacctgaccgccgggtctgtccagtcctgtctgtggccaacctggaccttcacggaataggaagcgctgactttggccccccgcatctgacagccttggtgtcctggagggggtccagcttgggcaggaaaaaacggtgttgcttccccggggccctcctgggaagcgaagctgcctgtgccgctgggagtggcccccccggcctggggctggagcctctgagccgccctggggcttctggacctcgcaggtggacccaccgcccaccacccagccctccatggcttctccaccggtgcaggtgtggtccccactgttagcccgggcctcgcggggccaatacccgggccacactcttccagccccagaaagccagattatcttctctggaccctccgcgtgcttcaggcacccttgggccgactcatccctgcttgggagggagggaggaagccgcccccctctgtgaggtgttcctgactcttctaccccacctagtttctaggaaaggaggcaacatgacgtgctgggagctttctggtcctgagctttgaacatgagaaatgccgtgagaaactgttttctccaccgctggccacttcacagccccaggggagcatgtgatgtccttacaggctgcccggcctctgctttttatagtgcaggaaagtacacactccctggcaggccgtgcagccatgaacagccacagatagacgcacttggctgtggtgtgtgctgcagggagcgggaggacatgggaggacgtgctccaggaggcctctccagcacctgccaaccggggaggagggaaccaagacagggagatgggagccgaggtctgaggacaagcagaagcttccccaccctccctcttagagctgcagagctggagaggcccctagagtccacccaacaacaacagtggcaatcat

SEQ ID NO: 19182 - DNA, 2300 bp, Homo sapien
ggctgcctgagtagggccggtggcctgcagccgtgaaacagaaggaaacggagccccgtcctgcagcccatcctgtgcgtgatgtgcaatggccagcatgttcctggacccaggagtagcccaatgtttatcagagattccttctgacaaagccccgctacccctgaaaagccaccactgagagccagactctggccatggtgccttccctacaccactgagcttgatccttagaaagcttgatccttagaatgcctaatccttagaatacctgatccttagaatgcgcaaacagcctcagagcgatggagccgcttgccccaggttccacagtggggaggtgctggagctcagattagacctaggtgtgtccgacagcaaagcacattacacttcaccccgaggggtggccagaaagatgccagagagcataggctcctcctcctcccaagccatggtgcagcgaccgttcccgcccactgggctcagggttacggtgcccaccaatttgcttacttgtttataggtggaaccgctgcagcagcctttggcttcgaggactgtatccagcagctgagcccttgcattcatcattcaacagaggattaccgagtgcccactacatgccaggtatggtatggggtaccagggaaacctgtaaccatcttccttgatgcaatgtgctaagatatccctggtgccagcctgctagcatcttaaaatacaccaccggagtttaattcctttggatttaggcacaggatcaccaggaacacccgcgcgtgcatgcacacacacacacacacacacacacacaccttaaaatgtgaggggcttgggcagtgtggcccatcggatgtgcatttttagggcactgcttttgtagggtgaagagacaccagcatgctggcaagctctgaagaagggaggaaaagacccatgtgctggggtacagatgatttttctctcccgaccagtgccctctaatgggcacaagcagacctgagctctgagttgcaaaggaatctaagttcacgcaccacacggggaggaccctcaggaccatgggccttgccctcattgatatcctttcatggaggagggggctcccctgaatgccagaggacgcaagagacctgtggtcaccccctaacccacccagatccttccatctctcactttagattctttacaaggagaatgggtctaagcgttttctgaacacacctctgtccccagctctgaagactggccccaggaacctgtgggcagagtcagggggccctgcccgccttctgacctacatctgcctcgaacccacccagggctggcagctttcccagcagcttccctgctccccagggcagagggtggctgttatccagatgtcttgctgagggggatgggtacaacccaaagcatagggtttggggcattccaccaagtgtggctttagccgtggccaagaacaacatttgacccagcacagggcaccaagaacttgacttccccatgccccgcctgcctgtctgcctcttctcctcctcccctcgactcctgcctccctgcctgccgtctcctgctctactctgtctcgtgtcaaggaaaattcctacaggagccagggagatgggcagacaccggcccggccacagccgtcccgacggccgtcctggacaggatgggggcccggggaggggcctgcagtctgtgccagccccatctgaagctggagaacggcttagatccagggggcctcagaggcaagatagcagtgccctggtgtacagtggggactgtgggggtccccgtgcccctgctggagaccatccccctttgaaccacattcagatgccaagcccagctctggaaatcaaatgtaggcaagaacaggcagctggaggggtgctgatttgccaagagccactcatatcaccccagcacaagtgtcacacagccgtgaccttgacaaggacccagagataaagatccttcccacatggctccgaagcccctcccttcctgctcacaccgcatgcctctcccagagaactagaggctgcagcggcagcagttggagcatctcactgcggggctcgggaaggaggaaaggagtgagcatgtcctgctcctgcatgtccctgcttaagctcaggactggcccttccaggccaaggaccccagcatagaccccaggacagggccccaaggatccctggctcatgagagcggcttgctgggctgccccaagagagcctgaaggaaacacattgttgagctgagctgacgtcgctgtttct

SEQ ID NO: 19183 - DNA, 2300 bp, Homo sapien
tccagacagaggaaagagcgggtgccagaggacgagacctcaagtgtgatctgttagggactgagtagctccagggagctggactgaaagggactcacgcggggtggtgaagggccagatggaaacgctcagggcttactccctcctttactggcataggaagcccttggagccaggggtggcattcagatttgcgtttttcagagctgcctctggaagcagcgtgggagacagatgggaggcagaaaaccagccagggctggggaagaagtgatggagaggagaggagacctgcagggggctggcgatggatgagatgtggcgggtgcaaggaaggtggcatccaagtggcttgcaggcttctggcccgggaccccgcgtgatggcatgcatagctttcaccaagctgcaagccacaggaggagaagctaatgtggtaaggacgggggagaaggatatgagttaattgggggcttaaaagccttagggcagagcagcctggtgcggtggctcacacctgtaatcccagcactttaggaggccgaggcgggtggatcgctttgaggttaggagttcgagaccagcctgacaaacatggcaaaaccccatctctactaaaaatacaaaaattagctgggcgtggtggtgggcacctgtaatcccagctactttggaggctgaggcaggagaattgcttgaacccaggaggcggaggttgcagcgagccaagattgtaccattgtactcctgcctgggtgacaagagcaaaactctgtctcaaaaaaaaaaaaaaaaaaaagtcttagcgcagagcaaagaggaggtgttcagcagatgattgcatatgtgggtctagaccagcgctgcccagcagaaccttcagctgtggtgcaaggtgctaagagctgtgctgtctagtatggcagctgctagtcacgtgagcacttaaaatgtggctccttggccgagaactggatgtttcattttgtttaactgacatagctccatgtggctcgtagccactgtactgacttaaacatttgcaagcccaggtctcagcagccaggtcagtggtggggacatggaatggggcattgtcagctgaagatgtggtgtggaccaggacaggcagaaagaggtcaggcacggtggcttcacgctgataatcctacccgctttgggaggccaaggctggaggattgcttgagaccagcctgggaaacatagtgagatcctgtctctaaaaaaaaaaaatttttttttttaattagctggatgtggtggcatgtgcttgtagttccagctacccgggaggctgagatgggaggatcacttgggtccaagggtttgaagctgcagtgagccatgactgtaccactgcactccagcctgggtgacaggagaccctgtctcctaaataaataaataaataaatgtagaattaggagcaagaggagctgagagctgaggaacagcctgggagagcacctgtctttgggggttgatcaggaaggctaaacactgggagacagtgtgggccaaaccccatggctgaagaagagggcagtcgacattggcagatgcttacagtgcgcacgaaagaggaatgcagaagggtgttgggtgccacgagggtcgtgggtgatcgtagccaagcagtcggggcggggccagcaggaggagggccagtgggatgctgtgctgattatattcctgacctagaagccccaggctggggataaagccctgtcttatgccaggcttcctcaggagctgcctggaaaatgctggggcttgtccaggccccagacaaccaaatacgtttgtgctgcttgtaaagggctgggtgcgacggggcaccaggccatagaattcccaggttctttcctccctctgttttgggagcggtcggtccccgagggcgtccccgctgctggtgctagggaagtgggcggcgggccaggccacctgcagagtgggctcaggacagctgttggtgcctcttctctctcacacggttctcaaagcaggggcaagcctgccgcccgaggccttccagctgggaggtgagctgaggacagctgctctactcaaggaaatctttgtttccactgggacggaatcggagctctggaggctgggctggccaagcgccccgaaggcccgatgcctgacggctcatgcggcctccttgtttgcagggcctgggcaaaaatttacactgagtcccactcttcgctccaggtgagtccttcctggtgaaggtgcagttgctccaagatgggagggagatgctttag

SEQ ID NO: 19184 - DNA, 2300 bp, Homo sapien
gagatgctggaccaagagctggtgtccatggcccacgcgtcttatcacactgcaggacaggagaggacagcggagactgggtgggccaagtgtcggcttcccttgaaaggttgtgaaggactctggatggccttcgtgtctacgacctgcaatgacagagagactccagccgacctgggacatttcctagggaagccgagtgcttcatccaactgccatgtacccagagtgaggtcctggagacccggcgacagctcaagcctggcttggagtctcttcattattttgagcgttgggctgacttgatacttgaggcttcagactaacttcagtgtacgatgggattggacaggatttgaggttgagtcacatcattccgttctttcttcctctccctcctctttctttgattgagcccctcctatcagtcaggccatcccccaggcacggggggacacatgagtggcacagtcctggcctccaggagctctgaggccgagagggagatagacacatgagagacagggcagcgtggtgggctttgtagtaggggtgtacccatgacgctggaggcagggccaggagagggaggagcgggtcccaggaagactgaaaggagtgaactaggtcttgaaggacacctgcgggcctcccaggtgcagaaggaggggaaagctacctggtagccagaatggggtgtgcaaaggcatggctggtggtgtttgttgggctggtgggtggtttgggatggtgagacccagtgctggaggctggaggctggaggacagtagggcagttgagcctggaggcagctgggtctagttggggagggtctcacctgaactcaatcctacaaagaacaagaggaatcatgggaaagcttgaattggacggtgttctcggaagaatgccagagggaggcagcagagaggatgagctggtgcggggaggggcagattccaagtgagagtcgaaatggcaggggtgcatcagagatgatgagggccctgggctcagttctggaggtgccttttggctgggagcccaggactctgctgaaagttgtgccagggggttggcggagggagtcgggggtgatgccgaaggctccaccctgggcacccgctgttgatgccaggaacagagctcagaaagagaagattccaggggcgaagggatggggacaggggtttcggttttgcatacatgacatctgtggggcctgttgcatctccagatggagacttctggtgagaagtttgaagtcaaggtctggggcttaggagagaggtaggggtgagatgtccatctgggagtcctgggcttatgggtagctgaacttagggcacagagatccgtttcctggatagtctggggtgcagaagtgggagcagcattagatgaggagctggcccatccagggggactttgctgcccccgtgggtctgcgcagctctacagcctgggcaagaagagccacaagccagagcacatgtgatgccatgaggggccgcgaggtggcagccaggagccgccgccgtccatcctgcctgcgggcttgtccttccaatcaggttggaaacataagagtctctccagcggctacagctgaggggaatcctaaagatccagttgaaccttcttatttgcagacgagtcagcttcatatgttattttctagcatcacggatatacgatagggagtcccggcattgtcttgtgtcacccaaagaccctctcttagaagtgtggatttctcccgagcagcccccatcttgcgtggcactcaattgatcgctgcgtgtgtttccaggactgtcattgcctttaacagagggcagggggctcgttcggtagtgaggatcccagagtgggccgtgagcccaccagcgtgaacacagagccttgtgggtccaggtgagagagtgagaaggcaggtcaggcatgccagaaccactggcagcaggagagagcagcgtttccaggcctgagagtggctgactttcactgtgattctttattccctcagggctgaagaacaacatgaaaaatacaggcccagtcaggaccaggggctccctgcttcccggtgcttgcgctgctgtgaccccggtacctccatgtacccggcgaccgccgtgccccagatcaacatcactatcttgaaaggtcagatggctgcaaagacaagcacggggtggccgggctgctctgtgctgatccggaggaagggatggagtcgttagggtggggctaggcgagagcagaatggctccctcgggacagggagcagaggcagg

SEQ ID NO: 19185 - DNA, 2300 bp, Homo sapien
gcagagcccaggacagccaagagcctgcagggaggtgtcagaggggcccctgtaacagggcagggtggctctgccgaggctgtagttcagattcacaggtagggatgccagatttagcaaatgcatagacagcatcctagttcagtttgaattttagataaatatgcaataactttttaatataagcttgtcctatgtcccaggcatcatttatttggaattcaaatttaactgattgctctgtatgttatctgaaaacaccagaaggttagggttttagagggcccactcaggcctcaaacggatccagagccccagtatgagccaatgtgagctcaaggcagacagggcccctccaggcttggcctgacatccagagagaccacgagccacaggggctaacaagaggccacaaggcctaagtcctttctgtcctcaggggcgtgcaaggctgccttcactttcttgctcttctagaccaggtgcctactctttggaaaggagagaagaaaagggaggtttgggcatattttctcccagagactgagcattacccaaaggctgttcaaagtatcccttagaactgtgttctaacctgggtaggatgaaagtttatctatttttattgctaagctgcaggtgagggcttgggaacacctggttacatgcaccccagatcaagactgtccacgtccggtgcacccctgaacacagcaggagggaacttggggatccactgccctcgctcactgtaagcttcccaggactgaagccccaaagaggagccctctgccttctctgtcctccccatgggtcagcgtgtcctgcttctgagtggcccgtccttcctgcctaactggctggcctgcaccatggcccatattcaacaaccttagtcatagttcccaccattggcgtttatggaagcttggagcctcataaagttcaaagtctgcaacaataataaaggcccagtcaacttggcttgggcggcagctgcagcccagcactggaagctcctagctgtggaggggcgttggggcctggagggaggagagccttggtttgccctgtggggcccagccttgagttctggcttctcagggctctgttctatcatgtttcctgtgaactccttttgtgcctaagacgctgggcagtgccactcttgcagaggtgccactccaggccctgcacgcttaggggtagagcaactactactgttgggcacaggcgtggggctgtagaaagaaatccgtgtttcactggaaaactatgcatcctacataggacaccagcttccacatggcccgatactaacctactaacctttcatctttttttttttttttttgagacggagtctccctctgtcgcccaggctggagtgcaatggcaccgtctcggctcattgcagcctctgcctcccgggttccagcgattctccagtctcagcctctcaggtagctgggattacaggcatgcaccaccacgcccggctaatttttgtattttaagtagagacggggtttcaccatgttggccagggtagtctcgaactcctgacttcaggtgatccgcccgcctcggcctcccaaagtgctggaatcgcagacgtgagtcaccgcgcccggtctgaaaattatcttttaataggggttagctgcatgagttaaaatctcattgccaccatttgctgactttgtgccctctgggagattgcttaatctctctgggataaacctcggtttgcttgacaaaggaagctggtgaggctaaagagagaactctaagattggggcgttccgaagccttctagagccttctagcaccctggactcatagccaatgatgggcaacaacaagaacgacgacgaaccctgggctcggaactcgcccaggccccgcccctcacagccccgccccgtcctcggccccgcccccggcctgtcgcctcaacaaagtccccgccgcgcggccgctggccgggagtcagctcggagtcccgtcccagcgcggcgtcagcgctgcgcacttcccattggccgagcgcggcgcgggggcgggcccgggcctgcgattgcctctcggcgtgcgcggacagtgtcatggaggccgcggcggtgacggtcacccggtcggctacacggcggcggcggcggcagctgcaggggctggcggccccggaggcggggacgcaggaggagcaggaggatcaggagccgcggccgcggcggcggcggccgggaaggaggtggggctgcggggcccgcgtgaaccccgatccgcggggctgagag

SEQ ID NO: 19186 - DNA, 2300 bp, Homo sapien
tccaaagcaactgtgacgtccgtgggcccctcaagcttatacaccatggacaggtaaatcttgggtggcactggggcctgcagggaaaataacctggggaaaaaggtcctgtgatgggtgccgtggagagaccactgagaaatcgaagccagctccaaatcgcgtccaccagcccctccctccaggaacagggggcctgggtgccaaatgctcccacatcgtggtcctgtccgtagccaggggacaagtcctcccccaaggccagattcttttgtgggctgaaacatctcagttctgaaataccgtatgggattccctcatatggggcatctaaagtatccaaactcacagatgcagagtaaaggggtggctttggggggctgggggaggatggggggctaatgtgcaatggggagagtccagtcctacaagatgacacagttctagggatctgtcacgtagcaacgtacgcagagttaacactcctgtaccgttcacttcaacagggtcaagatggtgaatttcacgttaatgcatttttgatcacaattttaaaaaacccatctgggtctgtcctctgtccttgttctggcctccactgccccatctgtccagttccatggccaccacgtgtgatgggagaagctggtgggcccaccgtcctccgtcactcacccacctcacagccacatttccaacctccggtgggatcacaccccggacgagcagggagctgcctccgtgccaggcatcctccaggcagcagtgcgtcctcacccagccccggccatcccctcccagcctgtgttctccaaacaagggctggatctcctgggcgctcaggtggtaccagggccctaccgcctcttcctgaagaaaagggcagaacaggggcactcagcagaggccaacagagcaggggtgcccggagcggcagggaagggtaagaccaccaccgtgcctgctggcaagtcccaggctcctcccacctgtcccagctgaggccagaggacagacacggagggaagacacccacccacctggccatagcagaccctccgtgcacccatgcccaggcagaaggacgtgacgaaaggcaaggagcagatgctatgtgtgggcagataacgctccagtcggccccagaacctgccagagacatgggggcaacagctcggtccggaggaagggagggagcctctcagtgtccctcaaacttgctggtggaaactcgaggctctcctgcaccctccaagacaggacttccaggaggactgcagcctccccgtctacagatacgctgcaaacacgagtctgcaggaagcggccgctgggtttggtccctgcccggaagcagccagggtgctggcttcctcccctgtcatcctcccttaaccacccccccataggaagggtcactaaagagcacaaacgtgtcctatcagagacaccagaaacccctccctcccatcagcctgcactaagcacccaggacagcaggactcacttgtcctggttctggaagaaatccttcttctccagacactcatacacccagccgggggcaaacaaagccacggagaagccatgctttcggatcagctccaacgactgaagagacagagggagacgctgggcacatcaggaccagagtccagacaggctcctggacgccagtgacgtgggttggggctctcagggcagctcagaaacgggagggggaagctgtccaacccctccctcctagatgcacctggaggctgctgggcatcacccccgtcgttccacaagcccgccagaagagggcgcgggagaggcggtcagcgctgctgcaagggcaggggggcaggggctgggccccaactggctgtggctgcgcggtcccattgtcctctggcacacctctcattcgattatcagaatcacgggcagtaaagaggctctttagttattggattaatttactcatttaaagctaaattaagggctgagaacatccctggggctctgggaacgggcaggactgatagaccagaggcaggcagagccctgcgcatcccacgccaggggcaccggcctggccccgctccttcctctgtgctggtgtgacctgccttgccagaaaatgctccctcgtcatgacacctaccgatccccaaaccctgggcacctcccccgtcctcgcccctgagccgcagtgagaggcgctgcaggcccctgtgcgtccccgcaggcttccctcacggggaagatcaaggaacgcagctgggacaggaggcccaggcccgccgaggaccgga

SEQ ID NO: 19187 - DNA, 2300 bp, Homo sapien
ggacgggggaggtgcccagggtttggggatcggtaggtgtcatgacgagggagcattttctggcaaggcaggtcacaccagcacagaggaaggagcggggccaggccggtgcccctggcgtgggatgcgcagggctctgcctgcctctggtctatcagtcctgcccgttcccagagccccagggatgttctcagcccttaatttagctttaaatgagtaaattaatccaataactaaagagcctctttactgcccgtgattctgataatcgaatgagaggtgtgccagaggacaatgggaccgcgcagccacagccagttggggcccagcccctgcccccctgcccttgcagcagcgctgaccgcctctcccgcgccctcttctggcgggcttgtggaacgacgggggtgatgcccagcagcctccaggtgcatctaggagggaggggttggacagcttccccctcccgtttctgagctgccctgagagccccaacccacgtcactggcgtccaggagcctgtctggactctggtcctgatgtgcccagcgtctccctctgtctcttcagtcgttggagctgatccgaaagcatggcttctccgtggctttgtttgcccccggctgggtgtatgagtgtctggagaagaaggatttcttccagaaccaggacaagtgagtcctgctgtcctgggtgcttagtgcaggctgatgggagggaggggtttctggtgtctctgataggacacgtttgtgctctttagtgacccttcctatgggggggtggttaagggaggatgacaggggaggaagccagcaccctggctgcttccgggcagggaccaaacccagcggccgcttcctgcagactcgtgtttgcagcgtatctgtagacggggaggctgcagtcctcctggaagtcctgtcttggagggtgcaggagagcctcgagtttccaccagcaagtttgagggacactgagaggctccctcccttcctccggaccgagctgttgcccccatgtctctggcaggttctggggccgactggagcgttatctgcccacacatagcatctgctccttgcctttcgtcacgtccttctgcctgggcatgggtgcacggagggtctgctatggccaggtgggtgggtgtcttccctccgtgtctgtcctctggcctcagctgggacaggtgggaggagcctgggacttgccagcaggcacggtggtggtcttacccttccctgccgctccgggcacccctgctctgttggcctctgctgagtgcccctgttctgcccttttcttcaggaagaggcggtagggccctggtaccacctgagcgcccaggagatccagcccttgtttggagaacacaggctgggaggggatggccggggctgggtgaggacgcactgctgcctggaggatgcctggcacggaggcagctccctgctcgtccggggtgtgatcccaccggaggttggaaatgtggctgtgaggtgggtgagtgacggaggacggtgggcccaccagcttctcccatcacacgtggtggccatggaactggacagatggggcagtggaggccagaacaaggacagaggacagacccagatgggttttttaaaattgtgatcaaaaatgcattaacgtgaaattcaccatcttgaccctgttgaagtgaacggtacaggagtgttaactctgcgtacgttgctacgtgacagatccctagaactgtgtcatcttgtaggactggactctccccattgcacattagccccccatcctcccccagccccccaaagccacccctttactctgcatctgtgagtttggatactttagatgccccatatgagggaatcccatacggtatttcagaactgagatgtttcagcccacaaaagaatctggccttgggggaggacttgtcccctggctacggacaggaccacgatgtgggagcatttggcacccaggccccctgttcctggagggaggggctggtggacgcgatttggagctggcttcgatttctcagtggtctctccacggcacccatcacaggacctttttccccaggttattttccctgcaggccccagtgccacccaagatttacctgtccatggtgtataagcttgaggggcccacggacgtcacagttgctttggagctgaccacaggggatgccggcagctgccacatcggtggcatctcagtgttgaacggtgaggtaatggggcccaggcctgcctctgcccagggcggagagctcagggaagagaagtgtg

SEQ ID NO: 19188 - DNA, 2300 bp, Homo sapien
cctctcatggccccccatgtgatcggccatacgtggagtcaggtgacaaccagcatggaagcctggacaggaccgcccgatccgccacctctcccccgagctcttctcctggtgtccgatgctggggtggggccgggcctctggcctggcccaagttagacttgattctcatggcctcatatcctgcttttctgaggacttacacatctcaaattctttttaaaaatttgggagtgttcccactttgcaagcatcccgagtgcgtcctgggtgtgactcttctgtgatctggcacttggcacaggaagtaaaagcggtagacatttttatagggtacaggtgatcaaccagcggggctgcaaaatctctggaaccagctgcccactctgcacccaagggccacacccaccgctgtctgggcagaagtgagaattcaggggagcatggaaatcagaacagacccatctctgaatggcctcgggctatgcggctcatgaggggcacggaacctacaccagtgaaacatcagggaatggagggaggtgggaacctttgcccacctttgcagcaagagccgtttcatctcaatctcttcatcagcctgggcacagagggctgcagtgggacggccctgggttctctgcaggttggcaccgaagccaacccatgggctctggtggcgagtgctgcgtgacttggcttcaacactacccaacactctggaattcatcagttgggggtggaggtttccattgtagaaaacaaacccaccaggtttgcccaggtgttaactatttacggtagaaacaggccagccaggcagtctcaggctgtctctgccatctggggttccagacagtgaaatggaggcagcagagacaggtggaggctcccagagaggcagaattgacaggggagggcacccaggaagccagaatcaccggtggaggcatccaggaagccagaattgacaggtgaaggtgcccagggccatctgaagcacacatgcagcctccaagtctcactcgcccagagtggacccagaagagtcactggatggagccccggggagtctgggcttggggtcagggtctccaggactctgctccatcatgggccttctagtaagaagagtcagttcttcggactggaggtcttcccagaaaacaaaacatttctttcagcctgatgcagtggctcatgcctgtaatcccagcactttgggaggctaaggtggcaggatcccttgagcccaggacttcaagaccagcctgagcaacacagggagaccctgtctctacagatagtttttaaaattagctgtgggtgtagtggcaggcacctgtggcccaagctactcgggaggctgaagtaggaggatcgcttgagcccaggaggtcgaggctgcagtgagccgtgatcgtccactgcactccagcctgggcaacagagcaagaaactgtgcccccctacccccaaaaaaagtttcttccttcctaacctgggatttatctttttggaagattccaaagtcccagcaatggcgtccagacacaaggttgtgtgatggtgggccggggatgcggggtggggtgaagacttggccagagggaggaacataccccgaccctccgtcctcactgcctccagtctgcctgccctgcagtggggttgttagaatctgggtcaggggttcacacatggcctgggcccactgccaccctctccagatgtatctccccagctggccagtgggctctcgtccctgctgttcctccccacccagtgcaaagggacaaggagccgggcccacggggcatgctgtagagataagacctgggtacactgaggaggggtaaggggctgggcctcgtcaagaagccctcctgcccaacctgtcggaatgcctggagccggagcccactgcaaggcagctggtgtcccccgcagaggcctccaggtggagcaggtctttgctctgctcctgggttcccccggggagaggaagactggcccacctgcaggaagggagaggctgggatgccgattacaggctgggatccctggctctgccactccccagctgctgacgggaggttgctgtgcctctccagggctgtttcttcatctgcaaaatggggagggtgtggtggctcactgggcagggaggaccccgtgagtttcgaacagtctgtgtggctcacacacagtgttgaggaaaaccagcccatccttattatcattcccagtccaaatgccctttcctcctcgacctgctcccaggccaccctcccggacag

SEQ ID NO: 19189 - DNA, 2300 bp, Homo sapien
ctgggtaccccaacaggcagggcagccaaagggtggctggaggagggctggggccagccaccatgacagagccctcaggcaggcagtgaagggcctgagaggaggtttccagacttctgaaggcactggcttggccaggctgcagccccacgccctcggggctcaatggaggacgcaggggaggcagaacagcccagaccccttcctgggacccatcacccctgctattctcgactccctcccacacatgcctcgtcttctccatcccaggctgcccctggacagcctcacccaggcatatgtgtggaaaataggtgacttcgtgcccagagcccccctccctgtcggcctcgtcctccaggggcacacgggccccatcagagacctctgtactctgcagcattgaggactctggcctcgggggaggggggcatcatccaggaggggtatgtggccatcttggtacccatgcctaggtgggccttggcagcctcagggaggagggggcatcctggagtccagcctcttagctggttctggtcagagagcactctgtggagagtccaccagggagctgctccagctgtcctggggtgcctgggagcctggggctgggtttatgggaacagccacatgaaggatacaggccagcaggcctgggtctggggtcctgggccaggcggggctttagcccgtgctgggagcagtgggggccaaggctcccggagggcaggcagcatggtggagagaggaggctggggcggggggtgccgggggctaacggagcagggcggggaggagtggccagtgggtcttccaggaggctaatcctccctcttcctctctctccttccctctttgaacaggtcaataatgccacggcccgagtgatgaccaacaagaagacggggaacccctacaccaacggtaaggggctgggtccccccacaaggctgctggggtcactggctgggacagaggccctgggggagctgaggctgctgcaggctgaccttcctggatcctaggcagcctccgtccccagtgtcccagccctggggctgccgctctgctcccggtcagaagcgggtggggcagaagaggcgggaggagagctgggggccactcacccctctcatggccccatacagtcagccatagctggagtctcactttcccaggcgtgcctggcccccagaggccacacgtgcaggcttctgatccagggggatagctgtgccttcctggattaggactgactttcccccagggccagagtttgaaggcttctgtgctgagacctgctgcaccgattcccagtgtaagcaggctcagggagggcagtgagggcacggggggccttggatgagcttctagacctctctgagttccagtctcttcatctgcaaaacaggaatagtgacaccatcccccagagctgttcgatgacaaatgacacctttaagcaccatgaggaagggcccggggggaggtgctcagatttcggaggatgtgattacagtaactgccttcctggggctttttgacatgggtggccctgaggccccaggctgagccctgctgtccacagcaaggggagactgaggaatcttgtgtgtgtgcaccccactgcaaacggaggtggccggtcttccttggagatggatctgccgacgctaagtgctggctctggagaagcagggggaccactggtggccactgcgagtcttaactccatccggcaaggggcctgctttgagcagagcaggcgtacgttgggggcctccgctcattcctgccagggagcagcttcccactcggaccccttagaagcctcagcgctgcccctagacgggatggatctccctgttgccgtggactttcagacggtgtcacccccagcctctcatggccccccatgtgatcggccatacgtggagtcaggtgacaaccagcatggaagcctggacaggaccgcccgatccgccacctctcccccgagctcttctcctggtgtccgatgctggggtggggccgggcctctggcctggcccaagttagacttgattctcatggcctcatatcctgcttttctgaggacttacacatctcaaattctttttaaaaatttgggagtgttcccactttgcaagcatcccgagtgcgtcctgggtgtgactcttctgtgatctggcacttggcacaggaagtaaaagcggtagacatttttatagggtacaggtgatcaaccagcggggctgcaaaatctctggaaccagctgcccactctgcacccaagg

SEQ ID NO: 19190 - DNA, 2300 bp, Homo sapien
cggaaaggtgggccccacgacctggggaacctgaaagtcctcacaccccagccagctcttctgctcctctctctcctcaaacccaggccaccagcacccatgccccctgactcactcttgccaaaagcccctggttctgcttgtgggctgtgtctccctctcctccccagctccaggccatgagtcccgcagccttgctctctccccctccacactctccgtgattcctccagtgttacactggtcaccgcgtctgtcttcccattgcagagagagccctcgcctcgcaccaccttcccaggcgcaggcctggtgcccgcccctctttgcagcaagatccctggaagggggtctctgccctcaccattccttgtcctctcctccccccatcctctcctcctgccctccccatctccactgcaactgtccagtgtctttcggaacccccgggcccccaatctcccgctctgtcccttcactgctccctctgctcttgccgccttctaagtcggaattcgtggccctcctgtcttctcccccttccttgctctgtccatctcttggctgtgagtgccgccccaaggttgatcccaagtgcacagctcagcagggtctaccttggaaactccctctttatttacccccatggcctctgctgtgtcctgttgggtctcccagatatctcaggctttgcccctctgaaggaagtgagaatcttttagggcaccatccttggcagctgtggacacggctccagtccgggtgggaggtgcctccttcctctggggagtgcaggcagttggggccccagggggttgactccctgcttggctacacactgtgggttcccagtgagcactggggccacacaagcccccccaggccctccccactgcagagggttactgcggaggggacttgctcagggcactcagagggagctgaggcctcagggatgagaaccagccaggaaggagttaggtctggacgagggtgctccaggaaggggggtttgcagggtgcggtggcctgggcagaaggatctgggtatgttctagaagctgacagaaacccatgctcctggagggtttagtgtagcaagaggaggtgagagaggagggtggggcataacaggccttgggtaaggagcacagattttattttctaaaaccaggaggcttgtggaggggttagcagggcgtgagtgtcacctgatacatgttaaacagcaagccatcgggcgacagggtggggctggcccagggtgtcagagcacagcagaggccacagggaaatgtgtctccctctgggaacttgcagacagttgaccatggtggggaggggctttggtgactaaatgggtaggggctgccttccaggagcagagatggggcgagtcaggggacaccagcatccgtccaggcaggccaggtttgaggatcccaagggatgaccccaggaaggacatgaggtggcagctggagctccggcccggcccgagggggaagactatggctgttgtcagcaggtcctcctgagccacagacctgcctgaggccagaggggagaggagagccagggctggaccgagcccttggaagcctggtgggggagggggtggtcctagtcaaggagactcagtgggcaccaccctggagacaggaagaagccccaggccagtggtgactccagctggagagaatttcacaggaagagcatggctggcaggtggcagggcccatggctgctgagagtcgagagctcagttgcggggggagcggagggaccttagggcaggctccgccagcctggctggctgttctttcctgccaagccccagcttcacttctgggggcaggggcttcctggctgtggacttccttgtccatcccctggtcagtgccgagggagagacgctcacccctgtgctcctgggacgggcgggaggcccggacaggctatgattcccacgccacctgtgctgggagagcccctactgtgtgttcattcctcacatgatgtacttgcctggaggattccgctctgcacttggggagaggggtgaataagacccgcccctggctgcagggagcttctgctgtgagcaggagacagggagggctgaaggctgtgcagcaccctggtatggggtgagtgagggtgcctagagggcgcccacagaaggggctcctgactcggactgaggggcagggaggtctccttggatgaaggggtgcctgggctagggctgcaggctggctggcccttgccaagagaggacaagagggagccattccgtg

SEQ ID NO: 19191 - DNA, 2300 bp, Homo sapien
ttgggaggctgaggcagatgtgtcacttgagctcaggagcttgagaccagcctgggcaacatggcaaaatcctgtctctacaaaaacatacaaaaattaggcgggtgtggtggcgcacctgtggtcccagctactggggaggctgaggtgggaggaacactgaggctggaaggttgaggctgtggtgagctgggatcgtgccgccgcactccagcctgggtgatgaagcaagaccctgtctcaaaaatagcaataataataacaataataataataacaataatggcagcgagcactccggaggcgctcactctgagctgaagagggttctgagggctttgacccagtgaattgctgcaggaccctatgaggtgggaacttctctgttgccttttcccagctgaaggaaccgaagctcagacacggtgagtgacttacccaaggtcacccagccactaagaggccaaggggacaagagaactgagtgtaaggaggaaatcaggaagagactgacaggaagtgagcaggggacagtgcgcagctgtcctcgtgatgggcccagccttgaaggcagcgttccggctcccagagctggcagcaggaagacattgctggagggagcaagaggtggggcgggcaggagggccacctgagccctgagccctgagccctcagcgggctccttggagagtgacctggaccttaacattgaccctggcaccccgcctgctgttccccatgacgccccacgcccccaccctgcgtctgctcctgtgacttgaggaaacggaccgacctcctttaaaggaggggttcctgagcctggggagcgtgacttccgagcctgtccgaaaacaccaaacgccaaagacaccgaagctgttccacagaagccgcagccgatcgaaagccattgctgcacgggattttctttggaattggtttttggttcaggtattttttggattagcatcatcaacactagaactcaacatgagaaatcctcctggcaccctcagacccccaggatccacccgcagcgccccacccctcgggggtctaaggacggggccacgggaggtgctccccacgccttagctagacgcaaggccctcccgcaggctcccgcaagcccatcagggctgggcgtttcccaccccttcccaccccacccatccaccttccgtccaagcaggagtgcagcctgcttgggctcagcgtcccctcttctgagaagcagcccggccccatcctgagcgcccctgggcccacaatccctcctcacgtgtgtggggctggccgttgatgtcgcctgggctgggggtgcacctgcagcgcaaacacgtgactaagcatcttcctgtcccgggccctatcagcgttgggccccaggcagcccctccaggggctacagtcacccacccacctacaaagcccctcatctgcagcggtggcttcattcccgggacgcgccccaggctctgctcagtcatggcccccagaccctcaggagcccccgaaacatgatgacctccagccacgtgccagctgccaggaggaggcttcaagaccccagatgagcacccggctggccatgccccagggacagaggacccagtgtgacagaatccggcctgggccacagccacccacacagtccatcccagttcagcccgaggtggacaagaaaagtcccaccagggactggagcagatggggcgggctccggacccctgcctggtccaccatctgtcttgccagtcggtccgtctacccaggcagcccctcctcccggcccaccatctgcccggccctgctaggccctcctcctggctcctccagggccctcaggaggagacagagctggagccagggcccagacctccactgccttgggcccgccccatctggcacctccagaagaagggggcggcaagagcttggccagggcaggggcactccagggcagccgaaggcccttgccagctgtctcatgatgagatgagcagagggagggggaggggaggaagggagaggctctgggaagacaagggcccctccgctcctcctcccttcttcctcccctgcccacgtggcctgggcgggagggacacgccgatgggaacatcccagctggtccaggcctctgctccccccagctcctcctccctggcgggcagctcttctgggctcctgaggtgctgcgcagccccttccctggccctgggacccccagtgcctgagatgaaagaggagttgcttccatggacggtcccagtgcaagctggggggcgctggcc

SEQ ID NO: 19192 - DNA, 2300 bp, Homo sapien
cttatcatggaaagaggggagaacagatattaggggacaactaaccagctctgccacagcggaaaatccagattccgccacggcctacaggctcctcctggtcgaccctctcgggagccccggtgcctcccttcctccatgcctggtccctctgcctgaagccttcccgccctctctcctggctccatgcatcctgtgggcctcccacaacgctggtgccagcaaagcccgatctcctctcccgaggccgcctgcattccccctgtgcgtgcatcgtaacctgtgtccctgactcacagggatccttaccctccccaaggtctgtgctccccagggaggagccaaacctctgggtgccctgagccccagccctgcagagcaggcaccccacgcggtggttgcaggcaccgggcagtcgctccatcctggttttcagcttttggtgcacagaagcatgaagaagaggggtcactggcacggagtcctccttgagagtgtgttccagtcggccaggcaggggcagccggggatccgtaccagtggtccctgcccacctgggttaggaaaggctggctggcctggggaggctgtagacggcgtctgcggtgtcatctgagtgccacggccatcgcttcgagacggcgtctgcttgctgcagccagccaaaggtcttaaggaaggccggggccactgtcggcaggtgtgtggctccagattgaaattgtgacaatacctccaaccatgcccttccgtcttcccaccgcgcaatccagtgcaccacctcccaccatgcaatccagcgcaccacctcccagcaaaacctccaggatccgcctcaaacccagccccatcccacagccaccaccctggtccgggccaccaatagctcttgctcagacacaggcagtcacctctccagggagcacccagtgtccattctgccctcgttctggtctatccttcacccacaaatggagagtatattttagcattagatcagttcatgtcactctcttgcttaaaacccgcgcctggcttccactgcctggcatgagaatcaccgccacctgccctacgggactggccctgccacccctgccacctgccccatgcccgctcccctagctcatggtcccccagagtcactggcctccaccatcctctcagcgagaccccaccagccaccactgcgtgccgcccacccaccccgccagcctctccatcacgtcttcctgccttcccttcttttgggaaactctttttttcttgtttgttcattttatcttctgtgtccccaactcgaatggaggccacgaggaacattgtctgtctcattcacttctgtgtccccagaacctagaaccatgcctggcacacagaacgtgcttaataggaactgagacagagacatacagggaaggaaagagggagagagacagagaaagagagagaaaataagagaaggggaaggagagatgggggagagggagggagaaccgcacaccgaatccaggggttcctctcccacccttcatgtgcctatggtaacaagggagtccccctcttctgaccccttgttgtcatcaagcaagaacgtctgagccccaggcaccctctgaaattcccaagaaggaagcatgccaagaaggaagcaccccaagaaggaaggcgcacaggacgctggtctggagccatccggttcccggtctgctcaccacgctcaaggagcccctcaacaggaccaggaggagaacaggcacccagcctggggttccccccggacaaggccatgctgtgacccaggcttggtcctggccctgaccatgggaagcccaccccacaggccctcacccaggcaggcctgaggcccatgcaccactaaaggcctggagagggggtcccaccccagcctcacctgggtcccctggggtcagggtgagctgggacagagggaccacctgttgctatgggagagggagagggcacgactttcccagtggaatgggctcctgctgtgctctgagccctgggtcactgtccccactctggggagggaggggaggagcctggagcaccaagggcgcggctggcaataaaggcagatgctcaagttgatgccaccccacgcacgtgaggctgggaccaggggtggcactgacacggctggggagcccactcccgaggttcgacccggggatgtgcacagccacattccaaaggcgcacgggatgagatcagcccgggtgaccctgggactttgtcctcctcggcaggagccagccctgtgcaccctgtgtgcc

SEQ ID NO: 19193 - DNA, 2300 bp, Homo sapien
cctgggtccggccttcgctgtgaccccggtccatcccgccgccctctgcacctcttcctccctcaggcaaatatatcgagaaccacggggtggttcacaacatgtactacaacaccaccagcaaggtgaagctgccctaccacgccacgctgggcatccagaggtggtgggacaacggcagcgtgcccatctggatcacagcccagaggcaggtaatgtcacccccgcccatactgacatcgcagagcacgggggcacctaggcccaggtgaggcttggaaccatgtgagatccacggcaggtcccttccccactccagggtctcggggctcctggcctaccctggcacagaagggtgtgaagtagggccccaaaaggggcaggtggtgggtgctggtgaggactaaccagtgagctacgtccggctcggcccatggacacagccctgcccggtcctctctggggggccctgggagcaagagggattgctctgtccccctagtcggagggagaactgcacccttgggccctgcagcattgggggtgagggtcggacagggaagatcactgtgactcaacaagaaagcatttaacaattagacgactttctccctttccacatccctgtcacagctgaacagctaaattctaaagggccaaagacaaaatgagaggtgggttacagtattgacccaggaacccccccacccacccccagtttgcaatgctctgggggcttcctggcccagaggcgaggcttccagtaaacaaagtcagtggaggtttccaagatgacgctggaataaatgtcagagcccatgcccaccccagagccaagttatccactcaagccggggttccctcactccagaaggatcatagacacactcagggctccttccaccggctggtgagcaggaagccaaggtagagaccctggcatcgcaaggctcttgatccaatgaaagaatatcctgggggagtggacgggcaggtgggatggacagtgatgaggcagacactgtgtatctgggaacatttttttttttttttttgagacggagtctcgctctgtcgcccaggctggagtgcagtggcgccatctccgctcactgcaagctctgcctcccgggtttacactattctcctgcctcagcctcccaagtaactgggactacaggcgcccgccaccacgcctggctaatttttttgtattttcagtagagacagggtttcaccgtgctagccaggatggtctccatctcctgacctcgggatccacccgccttggcctcccaaagtgctgggattacaggcatgacccactgcgcccggcctctgggaacatctttatactgatgtcttgtttagtgctcaagtccagtgggcacctgttgtttcctctataaaatcaggttttacccccatagaacatgagatcagggatgttttagaaattaaaggccccgcagctgcagctaggagcagggatgggtgggtggaacagagaagtaggcacgtgggggacaaatgtgttcacaggcatgagacaaggggcagcccactgaggagtcctgtctttcacgctgccttgtctggcagggcctgagggctggctccttcttctacccgggcgggaacgtcacctaccaaggggtggctgtgacgcggagccggaaagaaggcatcgcacacaactacaaaaatgagacggagtggagagcgaacatcgacacagtgatggcgtggttcacagaggaggacctggatctggtcacactctacttcggggagccggactccacgggccacaggtacggccccgagtccccggagaggagggagatggtgcggcaggtggaccggaccgtgggctacctccgggagagcatcgcgcgcaaccacctcacagaccgcctcaacctgatcatcacatccgaccacggcatgacgaccgtggacaaacgggctggcgacctggttgaattccacaagttccccaacttcaccttccgggacatcgagtttgagctcctggactacggaccaaacgggatgctgctccctaaagaagggaggctggagaaggtgtacgatgccctcaaggacgcccaccccaagctccacgtctacaagaaggaggcgttccccgaggccttccactacgccaacaaccccagggtcacacccctgctgatgtacagcgaccttggctacgtcatccatggggtgagtcgcctgctggaggcaccacctccaggggctccctccccaggctctgggtcttctttttttttttt

SEQ ID NO: 19194 - DNA, 2300 bp, Homo sapien
gattagctgggggttattcttcccttctgcctattcccagctttgtttttagggaacgtgccacagattttggatcacacgttcacagaatgtatctgattatttcattctggccaaatctgtcatatttgtttctccaaatgaattatctaaatattattttacccaaactgtttgcagttgggtagatgatgtacatgttaaaccttcctggacgctgatttatttttttcaatgtgttagtatcaaattctagcaaatttatttcttaagcaaagaaatcattcccttttcaaagccttcttttctttaaaaagaaatcaagcaagtatcccagcataccatgagtcaaagaggaaactggaaacttccagggcaaaatcttagacccaagatgaattctgcaaggaaacgtgatgtgaaactgatccagctatttgtaggattacaataaatacacctttgccctcaactccacaatttactgccaagctgcacaagacagggatacaaaaggagccggcggagacactgttagcggatcccttcactccagaggccagttttatcccaacacaaggattctttactgcctctgcccctgagtaaacaaacaccttccccccaaggacatttccctttctcctgccctctttgcaaacaacatctgaatttgcacgtactctccaggaaatcaaatgaatgtaacctatctaaccaaagaaactgaagaacacgccataaattgaaagatcggttcctacagttcagtattttctccagtaggcctttctgtaaaaacaaaaaaacacatttctcctgcagaaccctttataaatatggttttgatgatcacaattacattgagacagtctcctacaacaagaaacgacttttggatctgctcaacagaaagagaattttgcagctgtgttcaaggaagcaagaaaagcagagagtgaattttcatggagttagactgcgttgagacgaatgaagctaaggctcaggtctctttcattacgtgtttgacttgtcctgattcaaaatctaaataacttaaagggtgattcttcatggaattcgaatcttaacaccggaataaaagggtagcctgctgacgacgatcacagggaggacaaggggtcacccccactttcataacatggcctgacccttttctgccgcggacaattgatccgaaggacgccggctgcccagccctggcgggccactactgacctagtccgaagttaggaacagccttgcaaaccgccccctccccctccatttcatcaaaatcggggaacaaattcagaaaaggtgcagctggttttctccctacacgtgccctaaaactcgggggctggatccacttttcatagctgtttaataagaactccgggcagttcgtattacttctttctcagagtgcttggtggtttaagttaaagcattttcctctctcgcctttgggggaaaaagcctcggctgctggggtttgtgggcccctcccccggacttcgtcttcctttccttccccagcccccgacccgttttgctctcgtccaaaacagagcgactcccccgctgccgaggaaaagccagttcaagaagccgggggaagggtggggccccgcgtgccccggagcagcgcccctcgaaggcgggggcaggaagcagccgccgcgccccgtcccgcttccctcccttcgggccagaacaatggctttttgcccggaaaacggagttgggagcaagggcgggcgcgccccgggaatcacgcgggactcggtgggcgccccaggcccgaagtccctaggcacctcctcccccagccaggggcccgcccgcgcccccacccccgcccccgcccccgcccggggccccgcgcgggaccccccgccggagcgcgaggcccagcccgccgcggacaatgcgcgccccgccccgccccgcacccgccccccctcgctgattggcccgcacgggatttgggcagcgcgcgggggcgggcggcgggccggggcgcgggcgcggagcggcggtgcgcgtgcgcggggcgggccggcgccgggcgggggcggtgctttgtgtgctgccggcggggcgcgcggcggtccgggcgggtgactggcggcgggcgccgcggtcgggctggctgccgggcagcatggaggagctgagcagcgtgggcgagcaggtcttcgccgccgagtgcatcctgagcaagcggctccgcaaggtgcgtgcggcccgccgggccccccgcccgccgcccgctgtccgtctggctcacg

SEQ ID NO: 19195 - DNA, 2300 bp, Homo sapien
ccagggcggagggtgggctttctctgggcggggaaaccagacacttacaggcggctgaggccgactttatttttactgcccaaactgttggaaagtatttaagcttaaacagaaacagctgtatcgctggcaccggccgacgaaactatttgttaccgggaatgactttttatgattaaggacgcggccgtcggcggcctcccacgggcggcccgcgagggtcactgggagatctgagcgtcctcgacgcgctgttcgttcagacagaacggccggagagatgggactgttcgacaagcggccaccttgtgaagtttaggaacaaggccaaaacctgaaacccgtgtttccagaggctggggcacgactgggagggaagatgggcgaagcgccccgcttgcccggcgggtcgaggacctcgcggctgccgccgcctgcgcgcgcctcactttggacaggaggccagttttccgctctgggcttcctgcccctccgtgtcagactccttggctgcttctctctctcttcctatcgttctctctctgcctctctcttttccccccctctttctccaccccatctctggccaagggaaactgcttgcagtcaggctgatcatcgatgtttgaactaaatcgtgggttccaaggagtgggagttgtgatttggagcttgagcaataagagaacagggtgggagggagctgggcccagagtgaggctgctgtccccagcgccgcccccgccacgggtcaccggtagcctagctggcggcagggtcggcggtgcacgtgcttgtgtgcgcacggcaaggcggtcgcggccggcccttgtccctttccaggagcccgccatcttcgcgcgtgagaccctctcgcccagcccgcactggacccggcgacgtcccccagcttcccgcgctggcgtttctcgcaggatgtccgccgcccacgttgggaagagcggtggacaggaagtgcgcgggccgggcgccggggttcggggaaagccagacgcacccccagccgctcgccccatcctctgccggctccgcccagatgcccttagcccacccaggccccgagcagggggcggcgaggggaaggcgaggttcggggccgaagcctggcgggggcgggcagcttgggctaagggcaggggcaggtggctgcgggcgtcggggatggtcggggggcaggaagaagccgcgcgacatcctctgtggggtcctgggctgcagccgggctccggagggaacagcccggcctccaccaggtctgtgttcggcttcggagccggggacgagcgctccagccagcccggctcgcagggcccggagggtggccgagggcagggccgcgcgacaggagcctgagacacatgcacattgatttgttagcgggacccggcttgggggggggggggacgttgccatggagaccgggggtcgggtgtgcggctccgggggaggggggcgggggccgggggagaagccagccgatgggcgcgccgcaggctctcggggttcgggcgcggcccgcggcgccccagcacctgtgcattgtgcattgtgcggcgcgggcggctgggggaggggaccgcgcgagtcctgggcggtgggggtggggcggcgggccggggtctgccgaggggcggagccgggctgacatcgccgcggggatcccagcgagagctgtgggggacgccgaacgccggagggacaacttggtggcgggggaggggggccccggcgaggacagagggcggcctgcccccctcgccagccccgcagactgacagcggccgggcccgccttcccctggcgtcacttccggcggcgccccctcccactcgcgcgctcggtctctggagtcgcctcggactccgccccctggcgattggaacgctggtcacgtagcaacgcgggggagaaaggcagaggggcgtggctcggagctcgtccaatcagcgtgcgggggcgcaggcctccggccgctcggctttagcaacgtcgttagcaacacgtggggcgggaggaagcactgggcggaggggagggggccgagcggaggagcgcgggaggggggccgcgggagggagcgagagcgccgggagggggaggagaactgacgtcagcgggagagtattatggtctgtcgtgcgctggctgctgcttttctgctcctggaagcggccaaggggggaagcggcgagtcaacatggagctttcagcggtgggggagcgggtgttcgcggccgaagccctcctgaagcggcgcatacggaaagtaggtgcccccg

SEQ ID NO: 19196 - DNA, 2300 bp, Homo sapien
tcccgatggtccgacggcgcagacggcctgtgcggcgtggacggatgactgccacctacagcgcttcccgcgccagcctcgcgacccctctccctccgcggtggagctgccccgcgcgacagttcttcgccctgggcaaaaatgccaggaaaaagccaaacacggcaggagaaaaatattttcctgtacacccacccagcttctggtggcccctgagagccggcccccaccccccgcaactagtcagggaaaccaggcaggcgtcgtcccaccttgcttgcccccccgccgcaccccaacactcagggaatcctaggtttgcgcctcaagctcgttagagatcagtcgcaaacccaacacctctgctgtcaccagaagacaaccgtcacccctacacccctggggaggggccacgtgggtctcggtgggtagcagccgccgggcagcagcagcctccgtggcgcaagagctgcaaggtggtaatgaaatggagtccacgtgtgcgttcaacaccagaccgtcttcgagcttctccgggattcctgggcgaacacgagccccgcgcaggctcctccctcccctgctcgcccgagcccccgtgcggtccccaacagacagccgggtcgcgtgtcagggcggtggtggagacccggatggctctttgcccgcccccatccctcgctccactctcgctctgcttttgctctttttctttctccgtggacgctcagccaagggattgcgcaagcctcctgctcgcggtccttcaagagcccggagccggggcccagacacaccccaggccaggcgcgcccctgcccctgcccctcgggccgcgctgtccgctcccgggtccccccaccccgaccccacggagctcgcgggccctcggcggcgccctcggcaggccgcatagggcgcagcagctccaccagccggacgcaggagccgcgcgccagaacgcgccgtctcgccgccggaggtgccaaacttcacactcgctgctgctcaggccgcgtcagtccggagggccttggcttggtcgcctgtcgggaacaagggtccgcggacacaaggcgaatgcgtggctcctcggccattccgttcatctcccctttgcgctgcccgttcgtcccccgctcagcctcaagctcttcccggccctcccagctccctgtttctaggccactcccgggaccccacgaagtcccctcaggcccccaggcggaccctggcctcccgcgcccgctctctctgcctcctacgcctctcgcctagcttggctctggaggctgctagaaacaggacatctcgccccgtcaataagaggaccaagtgtaaattcggagccattgaggatcggggtgggatcggatttggagccctttctgccgaggttcttgggcgccagggccccgggattggctgctcctcggtccccttcctcgtgcgttcttcaatctctccttggcacccagtcctcggccttctctccgccctgtccctttccctcctcgcgctccaaaatgcccggagcctggaggcgaggcggggcccgcagtggggcgcgagctgcccctgccccattccgccccctgccggcggggcccgcgcgtcccggggcgctggtgacgcaattcggtgcaactgggagcggcggcggatgcttccgtggcccccagcaggggtcccggggccgtgaacactgagaacgtgccgcgagggggaggcccgggcaccgggatgtgggcgaggggtcgccgccgagacccttccgggctgtcaagctctccgcccgcctccgccccggcggacacacctctccttcccggtcccgctccctctctgcagcctccctctcccaggctcgccgatccctccccctgcacctccccggcgccctcccctccgcgtcccccacccgcgccctttcctcctccccccgccgcccaggcccggggcctccggtaggcccggctgcgccaatccgcgccgcggcccgccccctgacgccgagctgggcccggcgaggccccgcccgctgacgtccgggatttgcatgagttcttgtgcagccgcggcccgggctcagttgtctgagcgagcgcgagccgggagccggggcgggcgcgggcagcggcgggccggccgggctgtgcggggcgagcggcggcggcggcgggggcgcttcggccggggcggcagctgggcgccggcgggagctagcagcgtctgcagccgcgccggccgccagcgccccggcgcgctccggctcggccatggagctgccagctgttggc

SEQ ID NO: 19197 - DNA, 2300 bp, Homo sapien
gggaaaccatgattctcccatgatggagaggatggtcggaaagagccacccgggtggggtcacaaagatgaccatcccctgggaaggaggagttactgcccaatccagagaaaaccaacgtgaacctggataaggctgcaaagtaccgggacagcagcgtctgtgtgtcttgtcaacggattctaaaaggcagttcccaaaatattctcagccatggtcaaccactaaagccactgtggattggcccaaaatgccagctacccaggactgtgagggaaggggggtgtctgtgggaagtgtggggcctcagggagcctgtgtccatttgcctcttgtgcacaagggtggggaggtgccacttccggctgtggggcagagatgacagcctctccactggacactgctcagggtccctggaaagttccttcccttgcaaagtgcttagtgtgttaccaatagaccccagcaagacattgacccaaatgttgtcctctgtgtgtgtacgtgtgtgtgtgcgcatatgtgtgtgcatgtgtgtgtacatgtctgtgtgtgcgtgtgtgtgcatgtgtgtgcgtgtgtgcatgtgtgtgtgtgtgcatgtactgcacaccgagcacctgcctgtggatggtgtacacacaaacacacccaccctgcacagacacagaggcaagccgccatccacacatcgcgtcacctcctcggtggaaggcacagtagtgaccctggcatttcgtttttctagtttggttttgtccaagctggcttgtgaggtgcaggtgtcctcctgcatccagggcagggcaatgtggtctgtggctgtggtggtgtgtgggggacagatgaaggtggaagctcgcactgcaccccaccactgagcaccggatgagggcgaagggctgtccgcctcactggactccccgtgactgcatctacctgcttgctctggccagacctccccactagagcatggtccaccccaatgcccgcctccacccctctccttcagcacaggccaagcctccattccccctcccaacgtccaccctccctggcctgtgccactgcatggactcctgacttccttcccatccttacggggtggtcggcctgtgctgtctcaggtcctgagctgcccctcccttcccaagccatgcaccagggtccagcccagtgaggccatgtggtgaggggatgagccatggcctccatcaggacaagtggggctgtctctacaagagggctttcctcttccaccagtcttgggtgccagggagagaggcaaatatgggtagtggtgggtacattggctagatcagagggggctggcttcccagaagttgggagggtcccttttaaagtcatagaaagtcacacacctgcttgagataacagtagcacttttggtacctgctaaaggcaacacttactcccaatcccacaacgctgtcagaggactttgcatttcatcgcaacaggattgagatgactgaaagttgctgagcaaacctcagatgaatgaataatcacagaagggttacttggtgactttcacgcagtgtttgtgggcacagggttcctgaggttttgcagaacaccccagcaaggatcttgttgtggtgtcgatggctgcaggccacaggctgggaccccctgtcacacagggcaagagacctcccctggcagcctgtgctagccccccaggccaggcctgcagggaaagggggctaggggctggaactgatctcacgacagcctgtcctcggctccagcatgtggctccctggcttctggccacggctggctgggtcccctgtggcaggagctggccatcctggagttcaagggcccctgaagcactgcccacgcctgatcttcctccccagtgttctctccgctccaggggaagtgagacagcccagcccaggcaaacaggtccagctgcagctggcagccagtcccaagaacgctgccactcggccctccccgctgacctctgcacaccctcgcccggcgccctgccaggccttattcatgggctggcagtgccaggacctctcccggaggcggggcagagcagcagcttctcggccctgtgccgagcccaggcctgcaccctaggcaggcactgctccgtgatccaggaaccacctctctctacagctgggagtgagcagtcagagagggagacagccttgcccggtgctacccagcaagctagtcaccgagtgggcagagggaggagcggccctcaccggatgtcaagcagcctgggtccccagtccagctctgcctgt

SEQ ID NO: 19198 - DNA, 2300 bp, Homo sapien
gggcgtgaggagcaggccatgtggtctagactcactgtgtagccttggacgtcatgtctgccccctctgggcctcaagacgtgccacctccatccatggtgggggaggctggtgggggtccccagccagaccgttgggtttggcccttgccttgggaggtgagggtgggaggctaggggagtgctgagctctgggctgtgtcctgcttagctccctcctttcctggagaacggtaggagcacacattgagcacctgttgcatactaaataggaagaggatttttttttaagagggagcaggctggggaaggggatacttgttcttgtccctgtggatgggtaggagcggaagctgtcacagacagattagggccacaagggccaacttcccagcacctgccccttcctcccctcccactcccacttccccatttcacccccacttcacttctcccacatcttactccatcccctacctcattccccatcccacgccccctacttggctgcccccacacaggaccacctcccagggcctcccaccccacttttatgttcttgaaaccacagacatggaaccttcatgcacctgtaagcttagaacttggctgactttccaaagtgctgagccacaagaggcctcacacctttcctggaagaggagccagccccaggccaggcctggcagcctctgggccaggacagcctcttccacgaccccgcctaaccctgcctgccagacctgcccgccacaccatcgggaaagtgtctccctccccctcgtctcatggccactcctagatcgcagcacccctgggggtcaatgcacagggagctgtcaccacatggccaggccaggggtgtcccttcctcttgtcctcaatggtgtatgtgaagaatagtgcaaggagggtccctgcggggctggctctggccccaaggccttgcatgggctgctatggcaaaggcccatccccacataccgtgagatgttcctcactgggggctttggatcaagggcaccccatggtaccaggagaggcccgttcaatatgaggagaaaggcctgggcttgaaccctgaactcctggttccagcacgtcctgtgacctccctgaacttagtgtcagacgctaggatcctggttatccctgccagaaactttgagggctccagtgaaaggaagttggtctctcccccacattagtgcacccacagccctcagtttccgggccatgtgctcagagagacacccgctcctgcaccccagcatctctgtgcacacctagcacgtccctccccatcacgaccctccccacatccgccacgcagtgccccgtgatgcccgcccccacccgggagcccgcaccgagcccggccccagctggcagccgcctcgcggtgtttgctggatgataaatgaataaacgggggcctcctggatgctcagcaaatattgcctgaatgaaggaacgtcgcacgaatacagacacacgagagaacacagaccataaaagtggccgtgaccagtgctgatgggctgataagcgatctcggcgcatggaggcactccacaggtcaccatggtgggcccgggggggcgggagaagtttctgctcacagccggatttgagaaggccctggtcgctctatggcaacctctgcctgtgcaccatgggccctttagttctgttcgaggcccctcttttgctgtgtgaccttggacaagtcacttagcttctctaagcctcactttgctcacctgtgaaatgtggacagtaactgtgcccacctccagtgcccatttcaggaaccagaggcaaagcatgaagggccaagcacagaaagcacttcccgtgggcccgcctgttggagaccctcacgcgtcagcgcccggaaatgacactgggagctcaaggccagtggtggcccttccagcaaaccggacaccccaggggacgtctgggcagtggggagtggcctaagcagatgaaaaacctggggcccacagcttggagttcaggtcctagccatcggcccccatctctgtgccgccgtatccctgcccgggcaaggggaggacagtcatgccatctgtgcggggtggacaggcagcgtctgtgggagaaccagcatcactaaagcagacaatgtgggaggccctcacccgggagtccctcggggaagggcagctgcttcaggaaggaggccggagggtcccctcagtgcaggaagccagctcagccgccccaggcccagatggggagggggcgaggtgggggatatggagccgggccccc

SEQ ID NO: 19199 - DNA, 2300 bp, Homo sapien
gctgaggtcagcggtctcttccctgagtggcaggtgtggtccctgggacttcataaaccatcctcatgacagttttacacttagagtccccaatgcactcccaggaggtggcctgggcaggcaggcatcattattctcatgttacaggtgaggaaactgaggctgaaggaggcagaaggccacatacccggggagaatcgcaggcagcaggggccaggccccttccacagcactgcctctcacccttctcccgaccaacccccaagggcatgcctctggcttcatgaaccttcgggggaaattagctttctagtttgggggcggttccctctgactggagacaggacagaatgctttcacacccaggaacggccgtgcagcctggcttagaaacaagggacgaagtggatcctgaggctcattccctggggactccaagaatggggcaggcccagctgcgcagccagtcctggctccactgacttaggctgcacccctgcacatatgtgtgtgtgtgtgtgcatgcgtgcgtgtgtgcatgtgcgtgtgtgtgtgtgtgtgtgtgtgtgtgtgtgcgcattttcccaggggacctctcctccttcctctgaggcaaagtggcctgcaggggcccctgcagagcatacagggaggtgcttccttccctctgcccagcgagcaaagggtggagccttggcacccccagcaaccccctccaagggtggagccttggcacccccagcccccaccccgcaagggaaaggggaagctgcacgaggagcaagatttcattccccagagggcacagcttgggcagattcccatcatctaggggctgtgccccacatctatttctgccaaacaagaagcagacgagggggctcaggggggcgggcctcacaggaacggaagcaccaccccacctctattccctgtggcctccaaaagagctgggcaacctctgccagccactaccccttagcccaaggggagtcctcattccagagccagcatcttcatcttgtcctgatgccctgcccacccccgccgagcttcacactgggctgctatggaaaactgaaaggtcagagggtggaggtcctctccctcctggacatggaaacctccccctgcctggcacttcggctggtcaggaacagtggctgctcatggagctgccctcccaccttcagaccctcctcctcccccgcaggggtgggctggggccctccctccctctgtacttgatccatgacttgtgagttctgagtcctcagggccgagacttgagtcagaaccttctggagcagtacgcatttcccctctgcacctggtgaggacaccaggctcctcgcttcctccccagatctctgagtgctcacccgaccccccaaccctggcgggaccttccagggctggcaagcatcgagcctgaccacgttgcctcttgggtgccagcacgcccacatcaaaggtgtcccctcttcccagaggccctgagcaacatcgggcgacgctgtcagcagacattagcagcagagctgcaccacgcatcaacttttaagtatgcgcacacacgtacgccagccaataacattaagtgtcattttaaaaaatgggttaaataagcagcattgctgaggatggccgtgcagggctgattatcccctatttgcacgttctggcggtgggaaggctagaagtctaatgactgaattatcgccctaatgcctctcgctggctgggaataatcccggggcaacagctgccgcggggtttttggctggtttcctctaattgcatccagattaagggagttgtggaggggcggggcttctccatcccccgcggagcagcgtctcctccgccaagccctgaacacccagctcatggcttccgaggtcctggctggtccgagaggtgcagacctcactggggtccgggccagcccatggggagcgtgaggtgcgagcagtgcacggtgggggtggcacttggtgcagagatgcagctgattggtccgggtcaggtcttggggagcagcaggggtgagaagctgtagggccaggagactcagaaggaatgccttctactaggaccttcccaagtgaggggagccctggacctgtctatcctcttcctccctcccaaacacagcggttcaaaggcacgaggtatctagtgaaatgctaggaccagggacgctattcccctggagcaggcgggtggggaaggagtgctccaaagcaggcattattaggacacagactctccagagtcccagttgtttagccctccaa

SEQ ID NO: 19200 - DNA, 2300 bp, Homo sapien
acacgaagggaactgtctgcccaggagcctgagcctcaggctgttggagaagcatctgatgcctttttctttgctgggggtcttctacgtgaggttccttggcgttgtttaaggtcaactccaccaaatacagcaaccagctggggcttgaatgggtcgatgtgtgcgtgtgtccctgcgtgcatgcatgcatgcacacgtgcgtgcgtgtttgtgtttgcaagatcctctgacaatgatctgctttgtcccagggacgtggtagtgtattagctgaccaaccaagacaaggacacctggaaatagttagactcttccacttcccttcaggacctgtgaactcagatatgtaagtcagcttctcaggtggtcggacgtgagagcgaccacagtgaaggagccagcactcagggctctctgccttctatgtgggaatgaggtcttcccaacagactctccctcttccaaaagattgtgtatcagttgctccttctgggatttagagatggacagaaaagggtgtgcgatctatgctgtgagaactcccagccagcttagaagtgtcgagccatttgcacagaaagccactccttgagcgaggagaccaaatccctcctgaaatcctccatcgcgtccttctggggagaaaaacccttgatgtgctgagaaccatcatggggaccaggatagaaggcttcttcccactcaaagcttttctccctggagggtgggcactgctgggccatgccacttcaaagcagtgttcctcagcaggaaagcggaggtcaccacttaccggcctcctccaccttctcggcttctcttttctccatgaacccaggtcgtccagcaggtacttccaagttcccaggtctgtctgcctaagagccttttgaggagaccgtcctggagccccatcagtgcccagatcctggggtaccgaccattgctgtctagcagtgggggatcctgtggtgggaatggggtgggcttctcatccatgttgcttctgggaagagagggttgcctttctgggctagggaggtggctggagcttctgccctgaccctccgctagaaaccagttatatccattgccacagcaatactgtgtaacaaatccgccaacactcggtggcctgcaacagtcagcactgatctagggcaggagtcagcagtctgggcagggtgattcttctggtctaggctgggcttgtttgtttagggccagtgggttgttaagtcccaggggatgctcatggtgcagaggtcggacctggccctgctctgtggtctcttgcatccctcctgcaggccagccatggcacagccaaaggcacggagggagagacagcaagtgcctttccaagccttggtggacaccacacctgcagctctccccttggccacagcaagtcacgtggctgggctcagcattaaggggtgggggacaggcctgccactttattgtccgctctgcacagtcgggtggcagtaggctgagaatttggagggctaaacaactgggactctggagagtctgtgtcctaataatgcctgctttggagcactccttccccacccgcctgctccaggggaatagcgtccctggtcctagcatttcactagatacctcgtgcctttgaaccgctgtgtttgggagggaggaagaggatagacaggtccagggctcccctcacttgggaaggtcctagtagaaggcattccttctgagtctcctggccctacagcttctcacccctgctgctccccaagacctgacccggaccaatcagctgcatctctgcaccaagtgccacccccaccgtgcactgctcgcacctcacgctccccatgggctggcccggaccccagtgaggtctgcacctctcggaccagccaggacctcggaagccatgagctgggtgttcagggcttggcggaggagacgctgctccgcgggggatggagaagccccgcccctccacaactcccttaatctggatgcaattagaggaaaccagccaaaaaccccgcggcagctgttgccccgggattattcccagccagcgagaggcattagggcgataattcagtcattagacttctagccttcccaccgccagaacgtgcaaataggggataatcagccctgcacggccatcctcagcaatgctgcttatttaacccattttttaaaatgacacttaatgttattggctggcgtacgtgtgtgcgcatacttaaaagttgatgcgtggtgcagctctgctgctaatgtctgctgacagcgtcgcccga

SEQ ID NO: 19201 - DNA, 2300 bp, Homo sapien
cagggcatattcagccgtgcctgtatgtgtgtttaagcttggtgcgtaggtttaaatgactcccccatgacccccgtccccctctgggtagtgtgggcagggagaagtgtggcgatcatcacataacctgttccaccagccccccgtccagctccgacgccggcctgcggttcccggacagcaacggcctcctgcagaccccacgctgggacgagccgcagcgggtgtgcgccctggagcagatttgcggcgtgttccgcgtggacctgggccacatgcgctccctccgccttttcttcaggtaggaagcatctctgggcgcctcctgggagttggcctgtgtgtgttttccctggcagcctgggctttgcagccggtgcagtgcacggcttggggacacagggccctggatggagtcttcccaagcgtctgctttcctccctcgctgatcttgtgggcagtgattccccactgcagctccctgacagttctcaggctgggtgagctaccgaactcactcccctaccttcagcgtgatggtagccagcggttgcttgcaactctggcttgggagaagaaaccaaaccagggcagagggtagcagctgccggcggctctgatcgccgggggatgctctggagctcggccacctgtgcgggacgggccgcagctttccggatggaggctcccttcctttcgtgatgggtgggcgatgcctagtttcctgcagtcattccccacaccagatcctcctccttatagtcagggctgcccagccgcagacatcaccaatgagaggcccgggcttagaagaagccggcgtgtccagaagctgggggggttcccagacccagagccacattccagcctttcatctaagggcagccggggctgggctgacagcactgacggatgtttactgagtttccctggagggttctcccagagttccacccacacgcaacgaaggaggtctgttcccaggaggttctcttagcacatggcctgccagggctcagaactggattccagggcactcagcgttgggacccaggtctcccggactgcagggaccatgttgccgggcagggggtggtggggagaaggccactctggcaggtctccagagaggagctccagggccccccaggaaggagcagttttgccatcttcggcaaagggggtggtggtttttgttcggtgtagttctgtcccctcccgctagcagccaactccactgggactcactgtttcctgcttctgaggttggcgacagtggcctctgattatacttggaaataaaacccccgtgtttacatattcatcgggcttccctctcccccttccaatggcccttcagcgacgaggcctgcaccagcggccagctggtcgttgccagccgagagagccagtacaaggttttccacttccaccacggcggcctggacaagctgtctgacgtgttccagcagtggaaatactgcaccgagatgcagctcaaagaccaggtagcccagcagacggccccagaatgcccagcggttgacactccccaccccccacgggccccatctccctcctgggtcctgtgtctggggtccccgggccccgggggcttacggggtgtgacccacggtagtttttggccgtcagagcagcaactttgggtttgaaacctttgcccagggctttcggtaaagtcagtgccctgcacttgaaaaatcatgttttgacaagacttcctgccatattttgctcaatctacgtacaaatgtaataagagctctttaattatctgtttaaggtactgtatgtgcttattagaaatggggccgattttaaaattcccttccttcccgcagagcctcctgctggcttcccttattacagtagcatggctttttttccccctacattgaacaacctttgatttttgaattaaatgtcagctgcagttttgccctggattcgtgactgctcgcggaggcaatctgacaggctggctccctgctcgcagaacagcgatccctttgtatgtggccaatcacatgtaattcattgcaggccctcccggcagagggaagttaggccgaacgaggcattcattccgtttttgcggctggggttggagagagtggggggcggcggcacagtgggccggggaggagagagccgcagagggaaaccgattttaagatgaaggtattttcattttaattgcgcctaattacactcgccatttaggggtttgtatgcaggggacggcccttgccctcctttcagaagagagagaggctttt

SEQ ID NO: 19202 - DNA, 2300 bp, Homo sapien
caccataaacatgccacttacaaaaaaatatgcgcacaataaccacgctcaggatgcaaacaacatccattaatgaactttgtagttaataccaaaagttactcctcactttattctttatttacaaaagctttcatggttcttaaaagtgtttagtattcaccaattttactgttagcgtttctaatgaggattttctaaaactgaggcatggatttgaaaaagtgttctgatcaatcagtaacagatttggaatggaatctccagcccccagtctttgcgcccaccctctggcaatatgccgcctcacgtgagcatctttaagacggagttccctttttattccagataaaagaattaggagccttctggtagaaaagaaagcagatcttcaggatcaagtcgcagaggctggccaatcagcccagcttctcatttgaacttgacccagacagtaaaacaaactttaccataaggcgagactaacttttgttatgtcttttctattcatttcctatttctgaatcaaatctgaactactttgtggccaatatacgacaccagcttccgagtgtgggaatcacaggatttcaggattcagcggcttccggcaggatcccctaggttatgtttagcaatcttcagttgcctttcctttttttctttccttcctttcgttctttctttctttttctttttttttttttcccaaaggaaagaacaagggagcccaggcggaacggaagtgagtatcccgacacgcggatcttaaacagcccagaccaccaagcccgacaggccgggaaagctgagcgcgcgctgctggggggacgcacactttggaggctgtgtgggcgcgcgccggcaccccacaagttctcatccgtctgctccgccgattcagccagacaaagaccgcaagttccccggtccaccgctccagacaggcggggaccagtctccccgaattaggcccattccgggcccgggcgccctcactcgccgcggggaaaagtccccaggtgcccctccgtgatccaggtcctcccacaacgctcccgctcctgctggcgccccgcaccccgaggacggcggccggaccccggcccctccccggtcccgcggctgcaggcccacgcgccccacgcgccccgcgcgcccccgccccagctccgccgagggggcgctgctcgctgcgcggtggacccctcggaccccgcccccgcggccccgtccgggccccgatacccacccgggtcccgctgcgggggccggattcgcgccggctccgagagccgccaccgtcgcctccgccgctgccgccgccagtgaggcgcggcggggcggggacgcgcggggaggcccggcccccggcccgcccccgggcccgcccccggcccggcccctgcctgcccccgccggtctccccgcccaccttctggcccagccctgggcccaagcctctagttccctgctggccctccctcaggcctcgccgcgtcccggcctcggggactgtgccccgtcccgagcctggcgtccccaaaggaaaggcagggctcctcggacgctccgcgtgcgcgctggccctccgctgccgccctctgcagggagatttctcctatttcggactaggaagggaagatacgctccggaagaccccccgggcgtccatgcaaggagtctccgtaggacccctggagaagggcaccggagccccctagggcaggagatggaaaagcgctcgccatgcgcggggtccccggcccccggtgcccccagcccgcctgccattcccgggcgcttagcagtccggggtccccaggtgcccggcaggtcccttcgggacctcgagccgcccgctgggcacacgctgacgccgctgtcgctttacagaaattgagcgcagccgaggcgggacccgggcgcagagagcgataaaggaaaagcatggtcgtgctctaatcattacagtctaagggacgacacgtcgagacggcgcgcgcctctgcgtgcgtggagatggcacaaaggccgcgccgcccccggcggcccccgccctcgcagcgcgcgtggtcccggcccggccggatgttgacagcgtcgcctagcaacgggaaatggcggaaccgggcggcgcggcgggccggtaagccgggccgaggggcagcgggtcttggagtcgccaggccgcgctctccgttcaccgctccaggtggcccccgcgtcggctcctgcctcgccccttcgcctccactcccccttcctctcgcctgtgtcccttctctcgccattttgct

SEQ ID NO: 19203 - DNA, 2300 bp, Homo sapien
tcaggtggcggagatgccacaaaagcaaagctccatgaatgaatgaaaaatataattattaaaacatcgaaggaacagcaggattagatcaccccagaaaagtcacctcaaatataacttgtgtctgggacaaaactggggaaaagaaatacaacgtagagaaagtagcgcgatcagagtaagtgttctggggactctgagtttctccacgatttacgtagcacaggaatatatatatatatatatatatatgtatatcttttttaaaaaattaaagattcaagctatttttatctgtcaaaggaatatagatatgttcaaagagacagacagtgacagttccctgtgatcttccctttccttcccaagataatcattgataacatttaggaccacattctttcaacatttttctatgttttaaacacacacacacaccctgaattagagatcatagtatacctacccttttacatttatgcctatcgttttattaataatacctttagtctttccatgtcaatacatacagacccacctttaaaaaaatgaaacaataccgatgtgtctaaggtaaaaaggccaaactctttccaatcgtttctatccttttaaacagagcctaagcgagcagaggcccggtggcagggatcttcactcagccgccctccctgtgcgcgctcagtgcttccacccaggccccaggacggtgaccgcggactatcgcgggccgcctaaccgcagggacccctcccatcgcgggtcacccccaagcctgcgagaggggatctgtccttgcaggagggaggcgcggggccgggctggtctccggccacagcgagtggccccggagcaaggtcaggggcggtatccaacagccccgcgccctgcagagccctctactcttaggaggactgcgcgcagggaccgccacgcagagtggttgccatggtgactgcagagtgagcggtcccgggttttagagggagtcgcgcgcttggagtaggggaaagagggaggccgagagaggacaaagggacaggaggggagaagtgagaagggttggcgggggggtgaggggctgaacgcagtggacgggaaaggccagcaaaatggcgagagaagggacacaggcgagaggaagggggagtggaggcgaaggggcgaggcaggagccgacgcgggggccacctggagcggtgaacggagagcgcggcctggcgactccaagacccgctgcccctcggcccggcttaccggcccgccgcgccgcccggttccgccatttcccgttgctaggcgacgctgtcaacatccggccgggccgggaccacgcgcgctgcgagggcgggggccgccgggggcggcgcggcctttgtgccatctccacgcacgcagaggcgcgcgccgtctcgacgtgtcgtcccttagactgtaatgattagagcacgaccatgcttttcctttatcgctctctgcgcccgggtcccgcctcggctgcgctcaatttctgtaaagcgacagcggcgtcagcgtgtgcccagcgggcggctcgaggtcccgaagggacctgccgggcacctggggaccccggactgctaagcgcccgggaatggcaggcgggctgggggcaccgggggccggggaccccgcgcatggcgagcgcttttccatctcctgccctagggggctccggtgcccttctccaggggtcctacggagactccttgcatggacgcccggggggtcttccggagcgtatcttcccttcctagtccgaaataggagaaatctccctgcagagggcggcagcggagggccagcgcgcacgcggagcgtccgaggagccctgcctttcctttggggacgccaggctcgggacggggcacagtccccgaggccgggacgcggcgaggcctgagggagggccagcagggaactagaggcttgggcccagggctgggccagaaggtgggcggggagaccggcgggggcaggcaggggccgggccgggggcgggcccgggggcgggccgggggccgggcctccccgcgcgtccccgccccgccgcgcctcactggcggcggcagcggcggaggcgacggtggcggctctcggagccggcgcgaatccggcccccgcagcgggacccgggtgggtatcggggcccggacggggccgcgggggcggggtccgaggggtccaccgcgcagcgagcagcgccccctcggcggagctggggcgggggcgcgcggggcgcgtggggcgcgtgggcctgcagccgcgggaccggggagggg

SEQ ID NO: 19204 - DNA, 2300 bp, Homo sapien
ctgctaacagccagagcgtagagattcaaaactgggagagatgggtgagctgcagaggtcccaggatagatgagaccaggaggcgagagcagaccgggggtgatggagggtttcaatagatgcgaatgcgagggtgaggccggcacgacggtcagaccatggcccagggcctgaccgccgtaggatgtgtgcggcaggtcagtgggtagctttgaatcagatgagacagtgggggctacagcacgtgctatgcaacattaccgataaagcaacgtccttgcacagagctggtcatgtaggtgaccggggacagtggcttcctcttgtgactacggagtatttcagtctttatgctttttgatgttttcaactttctcaatcaactgtgtattactcttataatggggaaatgacctacacaaacctggaggaaaacagaagcacatggctatcccagctgttctggaaagaaacattttaaaccctgagaaaagtggaagaggttctggaaatttcagagttagggtaagtgggcacttatcaagcacctctcttggctgggcgcagtggctcacgcctgtaatcctagcactttgggaggccgaggcgggcggatcacgaggtcaggagatcgagaccatcccggctaaaacggtgaaaccccgtctctactaaaaatacaaaaaattagccgggcgtagtggcgggcgcctgtagtcccagctacttgggaggctgaggcaggagaatggcgtgaacctgggagtcggagcttgcagtgagccgagatcccgccactgcactccagcctgggcgacagagcgagactccgtctcaaaaaaaaaaaaaaaaaaaaaaaaaagaaaaaagaacctctctccagttagcatcaaatgaacagaaaacagtaaaaggaaagaaagtgacatccacactgaactgaaagagccacatcctccagaagtaaccaaatttacacccacctgaaggaggacgcgtgcccctaactgctccccacacctgcagtgaggctggagccgtggagctggtgtggagcgccctccggctcccctctgctagggcttaaagagtgggtgggattccaaaaagatccaaacactctggtggactctgcttcctggagattaggagagggccagagccgaggctcttcaacccagcaaggcctgcgtcaaacagcaccgtctctgccttctcagaactgaagaatttgggcaacggtcccggccctgaccggggggcagccaccactgcacagtcccttaggtgagacgtgggtcctggcccctggagaaagcccacggtcacctgcctcatctgggagggagactgtattagggttgtctagagggacagaactaacaggatagatatatagagaaaggagagtttattcagtattgacacaggatcacaaggtcccacaataggccgtctgcaggctgaggagcaaggagagccggtctgagttccaaaaatgaagaacctggagtccagtgttcaagggcaggaagcatccagcacaggagaaagatgtaggctgggaggctacaccagtctctcttttcacatttttctgcctgcttacactctagccgcactgtcagctgatgagatggtgcccacccagattgggggtgggtctgccttttcccaggccactgactcaaatgttaatctcctttggcaacaccctcacagacacacccaggatcaatactttgtatccttcaatccaatcaagttgacactcagtattaaccatcaccgacactaaaccttcacaccaaaatgagttaccaacccgagatccccagacctgagaggagactgagccggacagacaggcaaacccagccctgattctaaaaacagagcatgcggaggcaccaactggtagtctcatgagattttagaggacgttgtatccgtaaagagaacaaagtgttaggaagaggggtacgtgaaatttaaaaatataatcatcatcccagagtgtgcagaggcgccaactggtagtctcatgagattttagaggacattgcatccataaagagaacaaagtgttaggaaaaggggtacgtgaaatttaaaaatataatcatcatccccccaaaaggcactaactagacaaatgaatgcagttgaaaactgaatttcttaactaaaaagccagttcgaggaaccttccctggaaatagagcaaaaccccaaatgattgatatcttgaggaggaggtaaaagacatggacgacagattagggaaatcgaatcagtgt

SEQ ID NO: 19205 - DNA, 2300 bp, Homo sapien
ccctttcctgttttttggctttttctgatctcatcagtggatcaataaatatccacacacattaaaaatagatactggatcaccaggcacggtggctcatgcctgtaatcccatcactttgggaagctgaggcaggtggatcacttgaggtcaggagttcgagaccagcctggccaacagggcgaaaccctgtctctactaaaaatacaaaaaaaaaaaaaaataggcaggcatggtggcacacgcctgtggtcccagctactcaggcagctgaggcatgagaatcgcttgaacccaggaggttgcagtcagccgagatcgcgccactgtactccagcctgagtggcagagcgagactctgtctcaaaaaaaaaaatactggatggccaggcgcagtggcccacacctgtaattccaacactttgggaggccgaggcaggtggatcacttgaggtcaggagttcaagaccagcctggccaacatggtgaaaccccatctctacaaaaatacaaaaattagctgggcatggtggcacacacctgtaatcccagctacttgagtggcttgaggctgcagtgagctgagatcatgccattgcactctagcctgggtaacagagtgagagactgtctcaaaaaaaaaaaaagaaagaaaggaatgaaaggaatgtttaaagtaccgcagaacatctcagaataataggaaaacatgcctcacacacacaaaattcaaatcctcatgctgaggcgtaagaatgacttgaacccaggaggcagaggttgcagtgaggcaagatcgtgcctctgcactccaacaaatacaggatttgaatctgattatttcatttgaatcagtattttagatctgattatccgatatctgtgttttagagcttgacgttaattacaggtatctcatcgcagcatgccgaggggaaagacaatagaatttgaagtgggcccactggtgttccctcagccacgctgtttcctgcagaccttgggctagtgattgaaatgctctgagtctcaatggccacatctgtaaagctggactatttccttcctaggattattgtcatggttaaggaaggtgggcagatgagaacccctagcccaacgtctgacccatgcgtcactttccttctccccataatcacagtacaaaagagttgtcaacttgggctttcaatagataatagttctcttgatctatttgaaaataatagtcaagatttggctattggctgcaaaaatacagtgagggagaaggaacaaggcccagtgttcaatagcatgtcacagtgactacagttcacggtaagttagtgtatatttctgaatagctagaggaaaagatttggaatgttctcaacacgaaggaaggatcatgtgtgaggtgatagatggccggttcccctgatttgatcatgacatgctgtatgcttgtgtcaaaatatcgcatgtacctctcaaatatgtgccaatctatccataaaaattttttaaagatttggctgctattaaaagagttggtttcctgctgggtgcagcggctcacacctgtaatcccagcactttgggaggccaaggcaggcacattgcttgagctcaggagttggagaccagcctgggcaacacggtgaaaccccatctctacaaatagagtttaaaaattagccgggcatggtggcgcacacctgtaatcccagccactcaagaggttgaggcatgagactcgcttgaacccggcaggcggaggttgcagtgaaccgagatcgcaccactgtatttcagcctgggttacagagtgagactctgtctcaaaaaataaataaataaataaataaataagagttggcttcctaatttatttctctgtgcattgagttcgccttagtgagctccctcgtgtggggcgcagctctgtgcactggctctctgatgtctcacacgtaactggctctccccgctgcatttctacagaggatgccagcatcaagccaaatccaccgacggcgagattgaggcctataagaaatccatcatgaaggaggaagaaaagaacgagaagctggcgagcatcctgaaccggacagagacggaagccacactgctgcagaagctcaccacccagtgcctgaccaagcaggtggccctgcagagccagttcaatacctacaggctcaccctgcaggacacagaggatgccctcagccaggaccagctggtgaggccgggcccgccccacaggtcacacctggcgcacggtggtgcctcttcaggcacgtgcaccctgt

SEQ ID NO: 19206 - DNA, 2300 bp, Homo sapien
ggcgcaacaccttcacgccgtcccttttcaggcgtaggtctcgcctcctcttcggcatttcctggaatctgagtttgtggggggccagcaggtgtctttcttctggtttgcatagccctatatggagtctcttttcctacccagaacctttcagagatcgtggccctgcagacacgccttaagcacctgcaggctgtgaaggaggggcgctacgtgttcctgttccgctccaagcagtccctagtgctggagcgccagcgcctggacaagcgactggctctcatcgccaccatcctggaccgcgtgcgggacgagtacccccagttccaggaggccctgcacaaggtcagccagatgatcgccaacaagctcgagtcaccagggccctcctagggagcagcctggactccgccttgcaaggcctccaggaagagatccggaattgtgtttgtcatgagggacttggaatcttttgtgttcctaaaaaccacatgtaccctcagaagggcatcgtttaagagaaataagccagccccacccataggaatctttttagccactcagcaatttaataaaccaggtaaaatcctagcgtttcccatggcatcccatcgcaaagacagagcctgtgactgcagacccacacacccacactcccacactgggcttactcgtccaggtaacactttggtttgcagcactcccaaatctgcacgtgcctctcacaacacaacgctgccacaggtccacaagctggtgggctgagcagaggtgggaaagttaaggcagctccagccagcctggcccgggaggctggtccccccagcacttccctctactaggtgcatctgaaaacccacaaaccaccttctttaccagttttcccatccccaccccttagaactctcaggtcccttttcctgcccccatgtccccatttgagttaaattcagatccacagcttgcaggagaaagtcagtggccccagacacacgtaacagggtgagcactgaaataagagcacgctggggcgtccacaccaagggactacgccccagtctgcccacctatcttttctccatcattaacccagcgctctttctccctggacttccaagtaccaatgaccttggggcttctttgcagtttaaagggaaaatgctctacaaaataatttcactttcaaacatttcagcagaagaataaaatcttttttctgaatatctagtaagcctttctgagtcagccttacttattttaaaacattgtagaaatacagaaaccacaacagaggtggaagggaggcttttgtttttttttttttgagacggagtctcgctctgtcgcccaggctggagtgcagtggcgcggtctcggctcgctgcaagctggaaagggggcttttaatgcccctatgcccctacccaggaacaacacctctgtgttttggtgtggctccttttgtatttttctgcacatacattttattaggcaagttaaggttatactgtgtgttttttgtatctcacatgtaaaaatgtgctcctcttaatgtaagcattttctcattttatgaaaaaattccccctgtgtcagtttaatgttttctcaattgtcagttttatgggttatcacaatgttttgattattcctttctggaataactgtgagttatggagcacacttaaggactttccaaatgttggctgtttctaacttggcgctgagcgcctttggccgcctttccgatgatgccctcgggacgcgttggcaggaggaatccctgggcgcaaggcgcggctgggccagccccttacaaagccctacgagctgcggggacccaggccggggcagcgggggccacgccccatctccgaccccacggggaccgggccgggactgcgccagcgggggcctcgccccgtctctgaccccagaggaaccggcagcgggcagcacgcgtgggcctctccccgcgggacgccggacgcgcagccagacgcgctccccaggccccctccgagagcgaggacgcgcccaggcccgctctgccggagccgccactggggggcgtagcgcggacgcgcacccttgcctcgggcgcctgcgcgggaggccgcgtcacgtgacccaccgcggccccgccccgcgacgagctcccgccggtcacgtgacccgcctctgcgcgcccccgggcacgaccccggagtctccgcgggcggccagggcgcgcgtgcgcggaggtgagccgggccggggctgcggggcttccctgagcgcgggccgggtcggtggggcgg

SEQ ID NO: 19207 - DNA, 2300 bp, Homo sapien
agcttttcaagcactcctagaaagaagctgtggattaaagatgtgcccagcgatgcaagccagatttgtgaccataagaaaggacaggaccgggctcatgcctgtaatcccagcattttaggaggctgaagcgggcagatcatgaggtcaggagttcaagaccagcctgaccaacacggggaaaccccatctctactaaaaatacaaaaattagccgggcgtggtggtgcatgcctgtaatcctagctactcaggagggtgaggaaggggagtcgcttgaaccgggaggcagaggttgcagtgagccaagattgcgccactgcactccagcctggggaacagagcgagactctgtcacacacacacacacacacacacacacacacacacaaaatagcggggcgcggtggctcacgcctgtaatcctagcactttgggaagccgaggtgggcggatcatgaggtcaagagatcaagaccatcctggccaacatggtgaaacccggtctatactaaaaatacagaaaattagctgggcgtggtggcgcgtgtctgtagtcccagctatttgggaggctgaggcaggagaatggcgtgaacctgggcgacagaacttgcagtgagctgagatcgcgacactgcactccagcctgggcgaaccgagcaagactccgtcaaaaaaaaaaaaaaaaaaaaaaaaaaaaaaggacagagctggcgctcgtggaaatacaattttcccaaagttaaaaacatgattctcaacagcatgaactgcccttcaaagatgatggagctgcttcaaaaggcgttagaggagctgggtacgaagaagcacttaaagtgtcagataagaaagcggttagtggctgcgcgtggacacctgtggtcccaggtgctctggaggctgaggcgggaggatcgcctgtgctcgggaggtggaggctgcagtgaaccgagatcgcgccatggcactccagcctgggcgacagggccagactgtctcaaaacaaacaaacgaacaaacaaaaagcaggttaagatgcacaactggttaaagttctgctgggcaattaaaaaatgatcccgtctgggttatctttgctgcaggacacgcattagcagcaccgtctactgacaagtggccttcattaagagcaaattgcaggctcagcatgtattttatttataacagctgcttgccgggcacagtggctcatgcctgtaatcccagcactttgggaggccaaggcaggcggatcacctgaggccccgcagttcaagaccagccaggacaaccctaacccccgcctcccccaaccccgtctctacaaaaaaatttaaaaaattagccgggcgtggtggcgcgcgcctgaggtcccagctactccagaggctgaggcggaggctacaatgaaccctgatcctaccactgcactccagcctgggcgacggagcgagaccctgtctccaactcaccaggcaaacggtgaagacacacccaggcgcgtcccctaagagggacgccggcttcaggggccctggccctccccagcgcagacccgccggagcccagcgccgcgccggggcccaccaccggcggccgtgagggtttccactcgaatctccccggcgagctgggcgcctccactacgggtctgcgacgcagtccacccactgcgggcccgagagaggacccgtgctcgtcatttttattcgaggcggggctatctggggaccccgcccggagcggaggcccctcgcggccccagcctgtttccagggaattcaggtccacacgccgctcaaagaacctcagcgccccagtccgcgaaatcccgcggccggtacgaaacaccgccaactttagaagtaccaccccctccatccctttcgtaaggaactgggtgccccgccctcaacgagatcccgcgggaactgcatatggcgcgagagcagaaacaccttacttttccctgcggcaaacgcccagttccctttcacgtgacgaagagtgccccgtcccccagaggcgtggccgcgtcgcgcgtacgcacgtacgcacgtacgcacgcacgtctctcgctttcgcatacttaaggcgtctgttctcggcagcggcacagcgaggtcggcagcggcacagcgaggtcggcagcggcacagcgaggtcggcagcggcacagcgaggtcggcagcggcagcgaggtcggcagcggcacagcgaggtcggcagcggcagcgaggtcggcagcggcgcgcgctgtgctcttccgcggactctgaatcatggcgaccacg

SEQ ID NO: 19208 - DNA, 2300 bp, Homo sapien
ctccctcctcagcctctcaatgcactggggttacaggcatgagccactgcacctagcctaagatatggtttttgacctcagaaaacacagggtccttcagggttgtggcttccttgactgtttctttttattttattttattttaggttccgggatacatgtgcagaatgtgcaggtttgttacataagtagacatgtgccatggtggtttgctacacctgtcaacccatcacctaggttttaagccccacgtgcattagctatttgtcctgatgctctccctccactccccctaccataggccccagtgtgtgttgttcccctccctgtgtccatgtgttctcattgttcagctcccacttatgagtgagaacatgcagtgtttgggtttctgttcccatgttagtttgctgagaatgatggcttccagcttcatccatgtctctgcaaaggcccttcattcctttctatggctgcaccttgactatttctatggctatttctgttcttagggaggctcctcccatctccagtgcattcttctgcccccctcttttactgggaatggcggcatttctttgcgttttctgtaactagaattctctgtgtggctggcacagtgtgatgagctggcaagcttccccactgtgggggagggcttatcatgaggtctgctggaggaaactaagagagctgagccttaggggcttaaatgaactgcctgaggggaagctgacacccagtggggctgtaaccctggttggagagttcatgtctgcacctggcctcggcctgcgttctcacttgctctgcccaactggctgtgccttcagccggctcatcaccaggagatttgggttggagctactgctcagccaccatgagctacatgaccttgaaggccgatctttgattgtccgcaggataatcctgaaggttctcaggccatggacctgtgaatttcccttctttcagtgtctgcatcattgggaaccaagcccctaaccaatgtttattcattcgctcaaccaatatttgtggaatatcacagccctaggggtggggacacagcagggaacaagaaagacaagaattattgtcctcagtaggttactgtggagtggggaggctggcaggaagccacgtaactagaatacacgttaggtcaaggcagtattcccacagagaagatggaacagggaaggggagtgaaggccaggatgggaggtctacggacttaagtaggatgatctgggaagtagcatttgagtagagtctggaaggagggatgggaaagagtgttccaggcagtgggaacagcaggtgcaaaggccctggggcagaagtgtgcctggactgtcaagactgttgggctgtgtgtctggagcaggtaaaagagagataaggtcagcaaggacctgataagcagagcctcatggtcacgctgaggactccaggacctgtacaccgaagggaatgacaggagctgactcatgccctagcaggacttctctgtctgctgtgttgagcgctggtgatgggggcgtgggaagaagttaggagccattacagaggtcccggtgggccatgatcaggacaccacaatgcaggtggtgagaatggatcggattctagacatatctcaaggtggaggaccaagactttcatctaaatctaaacaatagttatgaaatgttaacttgagatggatctattggaattattcagatacttccaataatggatcatgagaaccaagaaaggccctagaatttatcctgatcttcgtaggattttcccaagggtagaaatgatgatgaactgggtgaccgttcacaaaggagagaggattcccagcccccaagcctgaagccttcccctcaatcaccctcaatcaccatcttctgtgggtcgaccagatgcacggactgttctcagccatccctgtggttcttacggcaatgtctagctgtgggactgcactggtgcttcgatggctcatagaagccccatataaggcactgctcctgtgggatgtgcctgtcaaacctgcttgtccactgccgttcagttcagccagagattgggccacattcagtcctcgcttccctgggagggggaaggtaagtgcgcgcagtccatccggcgaagagcaggtcagcctacggagggctcagcctacggaggggctcagccgacacaggtctgatggggcccgagagtggtcccaggggagtgggaggggccggcatcttcctcatcaggagtggaggagctgccttgtatgtggactagagaac

SEQ ID NO: 19209 - DNA, 2300 bp, Homo sapien
agccccacgtgcattagctatttgtcctgatgctctccctccactccccctaccataggccccagtgtgtgttgttcccctccctgtgtccatgtgttctcattgttcagctcccacttatgagtgagaacatgcagtgtttgggtttctgttcccatgttagtttgctgagaatgatggcttccagcttcatccatgtctctgcaaaggcccttcattcctttctatggctgcaccttgactatttctatggctatttctgttcttagggaggctcctcccatctccagtgcattcttctgcccccctcttttactgggaatggcggcatttctttgcgttttctgtaactagaattctctgtgtggctggcacagtgtgatgagctggcaagcttccccactgtgggggagggcttatcatgaggtctgctggaggaaactaagagagctgagccttaggggcttaaatgaactgcctgaggggaagctgacacccagtggggctgtaaccctggttggagagttcatgtctgcacctggcctcggcctgcgttctcacttgctctgcccaactggctgtgccttcagccggctcatcaccaggagatttgggttggagctactgctcagccaccatgagctacatgaccttgaaggccgatctttgattgtccgcaggataatcctgaaggttctcaggccatggacctgtgaatttcccttctttcagtgtctgcatcattgggaaccaagcccctaaccaatgtttattcattcgctcaaccaatatttgtggaatatcacagccctaggggtggggacacagcagggaacaagaaagacaagaattattgtcctcagtaggttactgtggagtggggaggctggcaggaagccacgtaactagaatacacgttaggtcaaggcagtattcccacagagaagatggaacagggaaggggagtgaaggccaggatgggaggtctacggacttaagtaggatgatctgggaagtagcatttgagtagagtctggaaggagggatgggaaagagtgttccaggcagtgggaacagcaggtgcaaaggccctggggcagaagtgtgcctggactgtcaagactgttgggctgtgtgtctggagcaggtaaaagagagataaggtcagcaaggacctgataagcagagcctcatggtcacgctgaggactccaggacctgtacaccgaagggaatgacaggagctgactcatgccctagcaggacttctctgtctgctgtgttgagcgctggtgatgggggcgtgggaagaagttaggagccattacagaggtcccggtgggccatgatcaggacaccacaatgcaggtggtgagaatggatcggattctagacatatctcaaggtggaggaccaagactttcatctaaatctaaacaatagttatgaaatgttaacttgagatggatctattggaattattcagatacttccaataatggatcatgagaaccaagaaaggccctagaatttatcctgatcttcgtaggattttcccaagggtagaaatgatgatgaactgggtgaccgttcacaaaggagagaggattcccagcccccaagcctgaagccttcccctcaatcaccctcaatcaccatcttctgtgggtcgaccagatgcacggactgttctcagccatccctgtggttcttacggcaatgtctagctgtgggactgcactggtgcttcgatggctcatagaagccccatataaggcactgctcctgtgggatgtgcctgtcaaacctgcttgtccactgccgttcagttcagccagagattgggccacattcagtcctcgcttccctgggagggggaaggtaagtgcgcgcagtccatccggcgaagagcaggtcagcctacggagggctcagcctacggaggggctcagccgacacaggtctgatggggcccgagagtggtcccaggggagtgggaggggccggcatcttcctcatcaggagtggaggagctgccttgtatgtggactagagaacagaaaacggcttgtctgtgttgctgggtcaatcactggaacattctctgaatgctgagttctgccttaaaacagcatgggtcatgctagatgaaagggatctctgttttatactctcatctcttcgctattgccgtgggatgaaagacagcagaaggaaggtgtctaagttcagaacaaagtgagcaagaccagctggctgctgttggtagcagaggcacagccagcctgtcatggcactggg

SEQ ID NO: 19210 - DNA, 2300 bp, Homo sapien
gtgagctgagattgcaccattgcactccagcctgagcaacagagcaagaccttgtctcaaaaaaaaaaaaaaaaaaaaaggaagagctataacccatacggcacacaattcacccgtttaagatgcttctagtgtattcacagatgtgtgcaatcgccgccacagttaactttaggacattccatcatctgtaaaggaaacatcccctacctttagctaccatcctgacatcctgatagacagggggcctgaagacccctcggtgatgcagggcagggctggagtgggggccctgggctgactttattgctcgctattgctgccttgaaattctgaatacgtttttaaaacaaacgcaccatcctttcattttgccctgagctccacagacgatatagctggtcctgaagtggggcagaggatcattctgacttggagtcagactctagcgacgcaggcttctactgggtggaggcccaggagctcaggagccttctgtgggagtgtgcccattggcagcgcatccctggagatggacggacaatttccacatcgcctttgcccctgtgcacgctccctctggctgccgtcataaattaccacaaactgggtggcttaaaacaacagaaatgtatttgctcatggttctggaggccagaagtccacactccaggggtgagcagggccgcacccccatgaaggctccagggagggtctgcttcatgccttctcttgagtttctagtgttgccaccgacccttggcgtgtcactccagtctcggcctctgccaacatggggtgatcatggggtgtctaggcctagggcccttctcctcctcttcttcttcttctttcttttttttttaagacagggtcttgctctgtcgtccaggctggagtggagtggcactacctcagctctgcaacctacacctcccaggctcaagcgatcctcccacctcagcctcctaagtagctgcgactacaggtgtgcaccacaacacctggctaattaaaaaaaaaatttttttaggccaggtgcagtggttcatgcctgtaatcccagcactttgggaggccgaggcaggcggatcacttgaggtcaggagatcgagaccagcctggccaacatggtgaaaccttgtctctactaaaaataaagaattagctgggcatggtggcatgcacctgtgatcccagatactcagaaggctgaggcaggagaattgcttgaacccgggagacaaaggttgcagtgagccaagattgtgccattgcactgcagcctgggagacgagcaagactctgtctcaaaaaaaaaaaatttttttttagcagattttagcagagacaaggtctcactgtgttgcccaggctggtctcaaactcctgagctcaagcaatctgcccgccttggcctttcaaagtgtgggattacaggcatgagccaccacacccagcccttctcctcttgttataagggcacccatccctggactagggcccaccctaatgacctcaacttgattacgttggcagagacttattcccaaatgaggtcctacttacaggtactgggggtcaagacttcagcattcttttgcggggggccacaatcagtgacaccctgactcgcaagcctcaatcacctgttccagtgagaaacaggactgagatcagaaggaatgaggcagagctgccctcgattggttctcctctcctcctcacctgcccaccccggcctctgcgcccgtcactgtcctctccagctgttcttccttccgggcaaggagactcagcagaagggtatgagtggcctggccctgtggggagccgcagacaggcctgtgggtgctttggataactactgcgcctgtcaactctccttggtagtctagggttcaaagcccaggtccattctagaagtctgcttccaagtgctaaggaagcttcaatagttactgggaaaaccacaggggtcaaaggtccgtcgagttatttcccggatccgagtctgacgtcttttccccgccgcttgcggtggttgtgaccgaaccttgagttttggaacaggtcacatggctttgaaatcacggtcaattcacctggtgctgctttgacttcaggctcttccttctgcccagctccgtcccacccagcagcccgcagagaaaggaggcagctggcaccacactgggctttggagacactgcggggactgtggaccccaccctgctgcacggagctcctgcaaaagcaaacctgagaaccttggtgagtacttccggagacccggctcc

SEQ ID NO: 19211 - DNA, 2300 bp, Homo sapien
gttcctctctttagccaccttcatttgggaacagcccacagcctttctttgtctattatgaggtggccctctttaaagcccccaccccttccctttgatgatagacgacctctcatttggggtttgtcttgtgtttcccacatgtatacagaaattatgttctttggccgggaccctgcacagggggtgctggcctgactcagggcatctcctcgagggctctcgaggtcctgtcgcccctcacaggggacgtcacaccgtccaccatttgtcaaggtgcaggccaattgctctactgcagaatggctctttcttttcttccctgcaactgataaatatctcgggtgtggggcgctgagaccagcaagcaccctgctcctggtggacatttcccaggatgtagctgtggtgactctggcgggagctggcccctaccctgggagctgtgaatgacgaccgtgccagtgctccaccttgctgctgcccacggcctctgccttcccttctcccttggctgactttggaccaggccagcccactttgctgctgcccacggcctctgccttcccttctcccgtggctgactctgttcttggcgcagttcatgggttcctactctgcaggggtctgacctctcactgtccttaatgattttggtctcaaatggacccagatgtgaccaatggaacccttcaaccagctccgtgtcctaaaacgggtcccttgtttttggagaaccaactgcttttctggcctcacaagatattccagggtcatcttgtacccggcctaccccaaatccaggctcagcccattctctgagggccccacttcctttttttatttttattttttggtttgtttttttgagacagagtctcactcgcttcccaagctggagtgcagtggcgccatctcagcccactgcaatctccatctcccgggttcaagcaattctcctgcctcagcctcccgagcagctgggattataggcgcgcaccaccacacctggctaatttttcgtatttttagtagagacggggttttgccatgttggccaggctggtctcaaactcctgacctcaggtgatccgcccacctcggtctcccaaagtgctgggattacaggcatgagccaccacgcccggcctcctgcctccttttagagaacaagatgtgggcgtaggtgtgtccatcactactagggtgtctttgcttctcagccctttcaggggacagagctaggaaacacacacacatgtatggacatatacatacacatatgcacacacatacttgtctgtgtacacacacatactcatatgcatggaagtatacatatagttcacgtgcatacttcagaaatcatgggttctcacccatacctctaattccaacccatgccctgcggctttttcttgccttctcctgttccgtacgtgtgtgctccttccccagggggaacgctgctcccagcgtcaccagcaccttcagacccgtgctcagtcctgcagcacatctcaaatcgtttcagaatcactctgcccataccactgccattaacagccccgctaagacgggtgccggacttgtttgtaattcacctccccccgccagccaatcttgctcaaggctgagggtttgtaatcaaacactgtgtttgtgagtcactgtatcttcgttctctctgtccttgtctgtctgtctctctcttcgttgtggttatggcgtctgttggaaatagaattcggttcatttgttctggttcactttcagtctcatgttttccggttcccttccagctctgacttgattttactttttgaatctgtggacggtgacatgcccagcccagctggaccattgcaggagctgggaacttgcgaattgacaatgtgctaaccgggtgtcgggaggggagagtccaggtggaaaggtccttcttggccacagcccaggggtgagcaccggcacccaccccgacgtgcagacttcccgggcttgcctcacggggaaagtcctgcctccccagggctgccacacccaggacgggaagagggcgggcccgtggctcgagctccaagtttctcttgggctgctgtccagaggaaggaggccagcaggacctggtgggatagtccctggaaggccagggccctgcacacagactgcaagtcaacacaggagctttgctgtctgaacagccccggtcccgcgttcccaggcacgtctacccctccgacctgactttcctctctcttacttcttactgatttccatgactccaaattccctttctt

SEQ ID NO: 19212 - DNA, 2300 bp, Homo sapien
cctaagcaactttctagatgcacctcgaaatctagcacttaagagacgagcgaggccgggcgcggtggcccacgcatgtagtcagcactttggaaggccgaggcaggcggatcacttgaggtcaggagttccagaccagcctggccaatatagtgaaaccctgtctctactaaaaatacaaaaattagctgggcctggtggtgtgtgcctgtaatcccagctactagggagactgaggcacgagaatcgcttgaacccgggaagcagaggttgcagcgagccgagattgcgccattgcactccagccttggcatcgcagcgagtctctgtctcaaaaaaaaaaaaaaaaagagagagagagacgagtgagaattgaccttatttcatccctagaactgtctccctccctccacccctgggttccccgacccccttctaaggccagaccctcagagctgctgagcttcacggtccatgtgtcccactctgtccagtactgggaagagaaggaacagaccctgctgcagttccagaagagtaagatggcctgccaactctacagggagaaggtgaatgcgctgcaggcccaggtgtgcgagctgcagaaggagcgagaccaggtacctgagaggccgggcccaccccgccaccccatgcttgcttccccaggtgagggctggttccggggacagtctcgtggctccctgcccttgatggcagctggtcccagatttcagggtctctttcctcggtccacacgaagtttcttcactcctccaggcctgttgtccacatgctgtctctatcatccttcttgctcttattcctggtacatgacactgagaaagtacaccccaaatactgggttttatcaacactgcacatgtgaacacgaattgaaatgaatcttaagtttgcacagctcagcgtgggccatttagtggatgtcagatgagcgcaggctagaaacagggctctccttctctagctgaggctccccggtggtgatggcgcggcctccttactcccgtcgtggcccacaggcgtactccgcgagggacagtgctcagagggagatttcccagagcctggtggagaaggactccctccgcaggcaggtgttcgagctgacggaccaggtctgcgagctgcgcacacagcttcgccagctgcaggcagagcctccgggtgtggtgagtgttcccggctgacccgagctggaggccaggcaggggctgcggtgacagtgggacagagctgggctccagggtggcccatggaggcactgggaggacaggcagggtcccaggctgggccacacgcggcacctgcagagacggcccagtgtcactgtgatgagcgacacactggctcccacgcgtggatggtgccgtgaaacctcgaaggtgcccagtagacaagtagagtctgcctccatatcatcgaatggggagcttagcggaaggttctggaacctgtggagtgtggtgatggatgtggcaggtggcgtttgaagctgtccacaggcagccatttgcagtgtagatgctgtgttcctgaaatgcttaaaagcccagcgtccaagagtggaaagacagacctacatgtaacggagggagcgtgttcccagaaagccagaattcttagaaagcctctcattctgggctggcaggcagctccagctccaggcccccggggaggcaaaggagctcctccctccgcatgcggaacccacccggcccttccttccttaccccctgcatggcaagcatcccacaccgacggtggaaacacacgtgtgcacgcagagaaaaaccctcccggggcaggcaccaacacgcaggctgtgctcattctgggtgtgagatgacgggtggattttattttcttctctaactggttctacttgccttcctccaattttctgtgtgtgtatgtatgtgtgtgtattatacattattcgtaaaactagtaaatcacacatattctaaaagaaatgaaatgctgtgtgtccagctggtttctttcagtctctttgattggcagcgcctgtgatcctgtgatgggctcggaggacagggacacaattgttttccctggaagctgacgagaggaaactgctggggagggtgaaatgggtggtgctgacctggtagaaactccacgggcctcaaagcggaacctttcccgaattaaccagcctgtctggcctgtctttggcagctcaagcaggaagccaggaccagggagccctgtccacgggagaagcagcggctggtgcggatgcatgccatctgccc

SEQ ID NO: 19213 - DNA, 2300 bp, Homo sapien
gcacactccagaggcacctgccgtgggctttgggggagcccaggagccgcttcgaagcccctgcccagcccccagcgtgcacctacttgagcttctttgccatcttctcgttgacagagacgtggatgacgatggggaagatgtccatcctgtgcagggtgcagacactgtccagctggacgtccaggagggcatgggtgttctttgtgggagggagagaagaagtgagtcaagatcacaggcctcagaggaagcaaagggagccaacgcccaggtcagaagggccctccggacaggctgagggcagggcaggagctgggcagagctgaattttgtagaggagatgagggaatagagcttgccactttcttctctcttttttttatttttattttttatttttttgagacggagtctcgctctgtcgcccaggctggagtgcagtggcgcgatctcggctcactgcaagctctgcctcccaggttcatgccattctcctgtctcagcctcccgagtagctgggactacaggcgcccaccaccacgcctggctaattttttctgtttttagtagagacagggtttcaccgtgttagccaggatggtcttgatctcctgacctcaggtgatctgcccgcctcggcctcccaaagtgctgggattagaggcgtgagccaccgcacccggcccacttttaatttttttagcttttaaatgttttgtagagacgggtgtctcactgtgttgctcaggctggtctcaaattcctgggctcaagcaatcttcccgcctaggcctcccaaagtgtggggattacaggcgcgagccactgtgcccggctactttcttctctttttattttttaattttttttagagacgggtctcactgtgttgctcaggctggtcttgaactcctgggctcaagcgatcctcccacctcgggttcccaaagtgctgggatgacaggcgtgagccccaggcccagctgagtttgccactttctaaatgaggctgtgtgctatgcagtattaagagtttccatccctttgatttttcactgggaaaatctagaaattgtgagctctggggatgaggtgaacttggcatggagctccgccagcccctacaggaggcacgcagatgccagactcggcttcccgtgcctgtgcagacacaaagctgtggttcacggggagctgcttttcacgcgtttgcgccttcaaacgtggagagtgttgttagctcggatttattcattctcgaacaaatatctattaaacatcccccaagctgaggaaactgagattcaaggagttgggagacctcacccacagtcacgtggatcctaactggctgagatgagttttgggctcctgctgggctgttgggacccagaggtcggcgacaaggtcacccaggtctcaggtcggtccctgtacctttatctcatccccctcctctgcattcctgaaacccttcccaggacagctcccctgcccaccccgcccttgacctcaccttttccatgagggactccacagcatggcgggtcacccagcagcggcccccggacacctctccctcctggatgatgtcccctctctggctccaggcctcatactcctcctggctcaagtactctacaggtgacattggacggggccatcatagaccagctgtgtgggggtctgggggagtcccatggtaaacacccctgtccccgtgaaccctgccagcactgggagaagctcttcttaggatgtccactttacaaacctgaccctgcacaccccgctctgtgccctgcacctccatcctgaactatctggacacagcaggtgagtgtgggaatgtgcgtggtgggggagggaaggaggagggaggaaggggaggaaggagggaggaaggggaggagggagggagggaaggtggaaggggtagagggattcccaggcaacagcatacctgccaggcacttcttaaacccttggaggaggcacagtttctcgctcaggatcttcccaaccgccctgggcacgaggagcacaggccggggccgggcgggtcgatggggccgcaccagggtatagggcaccagggtgaggcagctctcggcccagaagcacgtgctggagcctgtggaggagaggatcctgagggtgggtgaggctgcggcagcccccagccagcctaccctgccccgggagggactgggtctgctttgctcactgcagcagccccagcacctagaattccaggggcacaggctcagcggtcacaggactcactcccagttcca

SEQ ID NO: 19214 - DNA, 2300 bp, Homo sapien
ccctcctcctgcctcgcagcctccaggagctgctcctctgaggtgcccaaccgctgtaggcccttcctgcacaggccagagttggggggggcgggctcaggggagagcaagggcccaggagccctggctagggtagtgatgacatgcacccaaacacccctaaacacaggtggcctcgctttgaggggaccttgtaaagaaaataggccccaggccccagtggtgggaggcaggttgtctagaacacagccttgcttcctggagtagaaagggcacagtagcaggacatcttggtctgtccccaggaaaccaagtaatttttttactttttttttttttgtccttagccgacaaggattagattgtgctagccaagcaccagtaagtggagggtcagtggagctgaggccgggtggggttctggccttacaatggtcctctgagctgctcttgggggagggagtgccaatttgttaatttacaactttaaatttcaattataaaatgtcattttccagtgactaggctacttttgcccactgtaaaaggcaccgtcatcctggtatcaagattctggagaggccagatttgaaatcaagtttgtttggtaagcgtgaaatcagagcagttgttgttgttgttgttttgttttgttgagacagagtctcgctctgtcacccaggctggagtgcagtggcgcgatcttggctcaccgcaactccacctcccagttcaagtaattatcatgtctcagcctcccgagtagctgggattacaggcgcccgccgccacacctggctagtttttgtatttttaatagagacagggtttctccatgttggccaggctggtctcgaactgctgacctcaagcaatctgcccaccctggcctcccaaagtgctgggattacaggcgtgagccaccacgcccggccaaaatcaggggaatctcatgagcaatcagcggggcccttgtcccaaagttgtgcggaaacggccctgtcagcgcctcagcttcctgcaaaccgcagagcacactccagaggcacctgccgtgggctttgggggagcccaggagccgcttcgaagcccctgcccagcccccagcgtgcacctacttgagcttctttgccatcttctcgttgacagagacgtggatgacgatggggaagatgtccatcctgtgcagggtgcagacactgtccagctggacgtccaggagggcatgggtgttctttgtgggagggagagaagaagtgagtcaagatcacaggcctcagaggaagcaaagggagccaacgcccaggtcagaagggccctccggacaggctgagggcagggcaggagctgggcagagctgaattttgtagaggagatgagggaatagagcttgccactttcttctctcttttttttatttttattttttatttttttgagacggagtctcgctctgtcgcccaggctggagtgcagtggcgcgatctcggctcactgcaagctctgcctcccaggttcatgccattctcctgtctcagcctcccgagtagctgggactacaggcgcccaccaccacgcctggctaattttttctgtttttagtagagacagggtttcaccgtgttagccaggatggtcttgatctcctgacctcaggtgatctgcccgcctcggcctcccaaagtgctgggattagaggcgtgagccaccgcacccggcccacttttaatttttttagcttttaaatgttttgtagagacgggtgtctcactgtgttgctcaggctggtctcaaattcctgggctcaagcaatcttcccgcctaggcctcccaaagtgtggggattacaggcgcgagccactgtgcccggctactttcttctctttttattttttaattttttttagagacgggtctcactgtgttgctcaggctggtcttgaactcctgggctcaagcgatcctcccacctcgggttcccaaagtgctgggatgacaggcgtgagccccaggcccagctgagtttgccactttctaaatgaggctgtgtgctatgcagtattaagagtttccatccctttgatttttcactgggaaaatctagaaattgtgagctctggggatgaggtgaacttggcatggagctccgccagcccctacaggaggcacgcagatgccagactcggcttcccgtgcctgtgcagacacaaagctgtggttcacggggagctgcttttcacgcgtttgcgccttcaaacgtggagagtgttgttagctcggatttattcattctcgaacaa

SEQ ID NO: 19215 - DNA, 2300 bp, Homo sapien
cccagaaaggtgaggtgcagtgcccagggccacacactgggcagcaggaaacagggacaggccgctgaactcctacaaccacaccaagcttcttccccctgctctggagtagaggacactgggggcaccacaggagaggctggtgggaacccccagaccaacactttccccagctccctcagaggcaatgtggtccatggatggacagaggaggctgggcaccttccagttgggcttccatcctccaccccacagtacccacaggtgtgagcacatggcagccacgtaaacctggagggagagcgggatgggctgtgctccgtacccgcaggccaggaagaaagctgcccttctccaaacccagagtgtctcggcacttggctgtgggcctgctatggtctgaactgtgtcctcccagaattcatatgctgaagccctaacgtcaacatcactgtatctggagacagggtccttaattaagggtaaatgaatcataaggatgagatcctgatctgacaggactgtggacttaaaggaaaagaaagagagggccgggtgcagtgtttcatgcccgtaagcccagcacccgggaggccaaggcaggaagattgcttgagcccaggagttcgagaccagtctgggcaacacagtgagaccttgtctctacaaaaaatacaaaaattagccaggcatggtgatgtgcacttgaggtcccagctacttgggaggctgaggcaggaggatcgcttgagcctgggagattgaggctgcagtgagctgtgattgtgctactgtgctccagcctgggtgacagagtgagaccctgtctcacaaaaaaaaaaaaaaaaaaaaaaaaaggaaagaaaggaaaaagaaaggaaaaggaagtgagaccacccccatccgcttgtcatgtgaggaaacagtgagagggtgaccacctgtaagccgaaagtggaccctcactggaacccaaccaagctggcaccctgaccttggattttcagcccacagaactgtgagaaatacatttctgtttaagccgatccatggcagtccgtgctaagaaaggccctagcccaggggccgcatagcctggactctgacagcctcctgtaggaattctgatccgcaggtgagggtccatgcagattctctgctgtgtttctgggaggcgaggagttggcaggagagctgtttatgttacagtgagccgaacccccgcccagagaccacaaaattaatcagaaagagggcaactggcagggcgccagacctcagaaggggaaagaatcgcaggccttgggtttggccttgtcacttgtcatgagccagagccttgattacctaaaccggaagtcttgtgagcagcacggtgcttgctctggaggaacctggggtttctgagagggactggggttgggggagacggtggtgggtgggtggtggagggctgtgcccttgggataagggaaaagacagctgagacacaggctctggggtcggaaatgagagccaggagggcaccctgtctgcagtctctggggaccggagcaccagcccctcctctgggatcccctcccaagagggatttgagatccgtggacccctgagccctggctgggcagggtcagaggagggtgggacaggcggcacgaggtaagtgtaggggtgctggatgctggggctcactcctccagcctttgctgccctctctggggagacacccgtgaagagtctgggggcggcacagagaggaggacgagagggaatggcagcgggggatacaagggcagggcacactagggtcagcattgaccacgggtggggaggaggccagtggccacttccccgggccaccgcaggtgggcgtgggggggcggcgccggcactcaccgaggagcagcagtgcgttccggggacgcgcccggcagagccccaggactagcagcagcgcgcagcaggcgggcacggggcagctcatggcggcggcggctcggactcgggatcgggatccggctccggctctctggtctcccgctcggccccgccccctgccccgaccccggtcacgtgcgcgccagaccccgccccggcctgtccccggcgattcctgcggacccagctgcggcgacgccaggagaccccaagctgcatcgccgagtgggtgagtccgtggcccgcgagggcggcgagcggggaccaggggcagggggagcggacagtggccggggtcgccgggggcagccgacgcgggggccagcgcggagtcctgaagtgcgggggcctcccgtggggac

SEQ ID NO: 19216 - DNA, 2300 bp, Homo sapien
agggtgcagacagccaggcagaggggtcggtgcaggcccgtgtgctgtgtccaagtctgaggaagcattctttttttttttttttgagatggagtctcgctctgtcgcccaggctggagggcagtggcacagtctcggctcactgcaagctccgcctcccgggttcacgccattctcctgcctcagcctcccaggtagctgggactacaggcacccgccaccacacctggctaattttttgtatttttagtagagacggggtttcaccctgttagccaggatggtctccatctcctgaccttgcgatccgcctgcctcggcctcccaaagtgctgggattacaggcttgagccaccgcacccagcctaatttttgtatttttagtggagacggggtttcaccattttggtcgggctggtcttgaactcctgaggcctccatgagtcatctcgctggcccctccataaccagctcagtgtctgtgtgtgccaaacaggcataggagcctgggtcggcccagagacaatctgcgtcacacactgtaaaccaaaggttccttggggcccaggggctggaaacctggaatcgctgatggtgtctgggattgatactgtgtattctgcactgtttctgagatatggctggcagcagggtcagacgcctcacctggggcgggagtccagccacttcagcataggccagcgcctggggaatggcagtgaggccaactgagaggccggcgacgaaatccatcttcagccactgcagggagtagctgggcagccacgccaggatgggcagcctcctctgcagggccgcaggggagcagcagcaggcgctcggggccatcccggggccagaggacctggcctgacccagcgccgtcaccgaagaaggcatctctacggtggggctggggggtgcaggtgacacagaccagcagtcagagcgtggcctttgaagaacccggcaacactggtcagggtcggcgggtgtcaggagaggtcactatgggtctcccctccccaggggggcgaacggctctaagaggaagccaacaatgtgtgcaagatggggactgggccaagactggaaggcccaccccgtccctcatcaccctctctccctgaatcccccccgtgcaaatcctgggtgccttctgtccctccatcctcaactctcccagataagaaactgataagcgattcctcattgagaagtctgaagactaattaggctcaacacttctggcccctggagaaccgacttcctttgcctttttttccgtctccccagggaatttaacggggagcagcgcagagagaagctgggcccgcgggcgcaccgtaggctggcggggggtgcgggtggcagccaggagatccagcggggctccgaggttttccaactgcgcaccaaggcgggctccacccgctacggtggactgcggcgctcgagggagagtgggggggtcctccgctcctgaggccacgcctcgctcagcccccacctgtggctttcacagccctggagttctagttgcttctgggaggacatcagaggcgcccggttaattcaggtgcgcagcatcttccagggccccggcgcccgcgcgcagagccgccaccctcacccccagccccccacgcccccggccgctccgctccgggcaaaatccactccccggcccccggccccgcccacaaggccgctggctccggatcctggggtctccggaggagaccctgcgccacctgaccgtccgcggtcccttggccccgagcaaggccgagggccgcggggacccgggtagggacgcggcgggggagtggtccccacgggaggcccccgcacttcaggactccgcgctggcccccgcgtcggctgcccccggcgaccccggccactgtccgctccccctgcccctggtccccgctcgccgccctcgcgggccacggactcacccactcggcgatgcagcttggggtctcctggcgtcgccgcagctgggtccgcaggaatcgccggggacaggccggggcggggtctggcgcgcacgtgaccggggtcggggcagggggcggggccgagcgggagaccagagagccggagccggatcccgatcccgagtccgagccgccgccgccatgagctgccccgtgcccgcctgctgcgcgctgctgctagtcctggggctctgccgggcgcgtccccggaacgcactgctgctcctcggtgagtgccggcgccgcccccccacgcccacctgcggtggcccggggaagtggccactggcctcc

SEQ ID NO: 19217 - DNA, 2300 bp, Homo sapien
cggggagctggggacagatggccttggtttgggagcatagcctctgatcagcatctctgtgtttggacagaacctgctgggactacagaacatccccaggccgttcttcctgcaggtgtaccacaccttcctcaggattgcagagaccaggtaccccgggctttgttcctccctcctataaggaagctccttcttccacacctcctctcccggcccccacctcagtttccccacccctggtgactgctcaaacaggggtccccagagcagccccatcagcagcacctgcaagctggcaagaaatgagactctcagtcctttgcagacctgccctatcagagccacagttttaacaggaggccggtggtctgcgcgcaggggagagttcaagaagctctgctctggggagctggagcagggcaatgttcctctctccacaaagctttcttgggggacaggaatggggagagtctgtgtaaagaaaaagaaggcagtgtgtctcccccaggctgtgatttgttaaggaggagaacacagggcgtggggagctaacccagacagaacgcaggtggtgcagggacggcaggtggagctgtgatgagagatgaggcgacccaagcacttccctcaggtggtttaaagagcctctgatggccggacactgtggctcacacctgtaatcccagcactttgggaagcccaggtgggcagatcatcttaggtcaggagttcaagaccagcctggtcaacatggtgaaactccgtctctactaaaaatacaaaaattagtcgggtgtgatggtgcgtgcctgtagtcccagctgttcaggaggctgaggcaggaggattgcttgaacctgtgaggcggaggttgcagtgagctgagatcacgccactgcactccagcccgggtgatagagtgagactccatctccgccctgccctgcccccccgaaaagaaaagcctctgatgaggggtacctccctgccagaccatccagcgggaaggcaggatgcctctctacctctctggctggaaggggctggaggaggaaatgatctaggggagctatagagatggctgcccagtgctgtggcctggagggagtgggggcgatcctggaccatcttcccctcccctctgatctgctgccgaagcttcccagcagctgaacccagctggaagccagtgggttctttgctcttcagaggcaccagtgggcaggggtcggccagatgggggagcagtgattacggagcctgaccagtcagagagcgtcacgggctgtcatgtaaaaggggccttactgaccgtttagtcctaagccttctagaatgtctagagcagggtgtccagtcttttgtcttccctgggccacacaggaagaattgtcttaaaatacactaatgatagctgatgagctacaaaaaaatcattgaaagaactcataatgttttaagaaagtttacaaatttgtgttgggccacattcaaagccatcccaggctgcacatggcccacaggctgtgggtttggcagacttgttctagagccacctgcagagagcatcagctgctcaggctggtccccattccctgtggtcactcaccagatcctgttccatagacttgagtcccagagagctacgggagtgaaaatgtgagcacgtcgctctgccatcatcatgacccgggcctctccactgcctgtcctgcccaagcctgtgtacttactgaattttgaattgagttttgaagtagaacagggatgcatattgcttaggagaaaacatctcagcctagtctgtgtttggtcttgcagagtagcttgctaaagttcctgagctttagttaagtgtctgtgaaatggtgaaaatattgaaaatgctttatttccttgtgatactcactgtggtctgggaccagcagcctgggcattgggcctccctgggagcttcttagtgcctctcagcttaagcagcagcaggatgcttgagtcagcagtaggcctgggccgagctgggtggtgaccagtcctctgcctgtccacagggtaggtgacgccgtcctggggctggtctgcatgctgctgctgctggtgctgaagctgatgcgggaccacgtgcctcccgtccaccccgagatgccccctggtgtgcggctcagccgtgggctggtctgggctgccacgacaggtgaggggcctctggctgacatcttatgcaaccttggctgcaggttggggtcacttggggagtcctagtcccaccctagggattctcacgtcattggtctgggtgt

SEQ ID NO: 19218 - DNA, 2300 bp, Homo sapien
ccctggcctttgtgggcctgcaggtgggtgtgcactgggctgccttaggggttagcagctgccggaaggccttcctgtgcctgcctcccatggcgaatgtgacatctctgggctgtgatgctggacggcccttcggccggtgctggctctgcttctgatttaaacagttcttgttcccatctggccttcctcgtccctccctgtggaagggggagcggtggcccccagccctccgaggggtcacgttatggcttctggtcactgccacactgtcctttgtgctggggacacacagtgaacgagggtcagtccctgctctcaggggaattgtattttaggaaacaaaaagagacaggtgaggctaggcgtggtggcacactcctggaatcccagcactttgggaggccaaggcgggcagatcacctgaggtcaggagttcaagaccagcctggccaacatggtgaaaccccgtctctactaaaaatacaaaaaaaaactagtcaggtgtggtggcgagcgcctgtaattccagctacatgggaggctgggagaatcgcttgaacctgggaggtggaggttgcagtaagccgagatcccactactgtactccagcctgggcgacagagtgggactccatctcaaaaacaaacaaacgaaaaaaaacaggtgctcatagaatttcatgaaaaacgtattgtcagggcttccagaggctgaagacgggtttctatggaggccgtcctgttcagagccacaggtaaagtgtaagggctgggtcccaggccctgcgtcttaggcctcacctaggagccttctgagcactgcagggtcaacatcccaggggtgtggccagtgtttgcagagaggcaggggtctctgttgctgtggttaaatgtgcgctctctgccaagtcctagatggcagaacgtgggggactagggcgtgtccccaggcgcccagaggagacattcatgaactagccatggaacaggaggccaagtgacccgtataccccaggtgtggaccacagccgacccttgtcagagtttccttcattcccaacctggcccacgaggctagtgttatcttcatccccatgtccagaagaggtcactgaggcccagagaagccaggtaatctgcccacggtcacacaggatggtgggcccggcttcagatttgggcatgtgccttcagaacttcgctcataagtgttacgtcctgtgtcatatttgcagagcacatgtcttcatggtctttggagatgattcacttaaaaaaatactcctctgacccagacatggtggctcacacctgtaatcccagcactttgagaggccgaggcgggaggtcaagggtttgagaccagcctggccaacatagtgaaactccgtctctactaaaaatacaaaaattagacgggcatggtggcgcacgcctgtaatcccagctgctcagggggctgaggcaggagaatcgcttgaacccgggaggcagaggttgcagtgagccgagatcgcgccattgcactccagcctgggtaacaagagtgaaactccatctcaaaaacaaacaaacaaacaaaaagtcctctgggccaggcgctgtggctcacacctgtaatcccagcactttgggaggccgaggtaggaggatcatttgaggccaggagtttgagaccagcctgggcaacatgacgaaaccccatcaaaaaaataggaaaaaatagctggacgtggtggcgtgcacctgtagctactcaggaggctgaggtgggaggatcacttgagtctgggaggttgaggctgcagtgagccatgatcgtgccactgcactccagcctgagcaatgagcaagaccctgtctcaaaaaacaaaaaattaaaaaaaaaaaaatcttcctctgacagcattcccctggggctgcgtttcttctcaccattcactggtatggaggtgaagccatacctctccgggagactctgagatggcaggtctaccaggctgccgacccgtgtgctacagaggaacatccctgccctggctaaagtctgtctgtctctcaggtccccgttctccgtgtcctgctgtccgctgacctgaaggggttccagtacttctctaccctggaagaagcaggtgggcacagtcagacatcctgtggctttggtgattttgtaaaaatcataaatgcttattgtaaaaaatatgggaaaccagctgggcacagtggctcatgcctgtaatcccagcactttgggaggccgaggcaggtggatcacctgaggtcaggagttcgaga

SEQ ID NO: 19219 - DNA, 2300 bp, Homo sapien
gtttatctaaagacctgggattaatagtaaggaaatgttcaggttaagatagaacaccgtgctgagcagcactccggcccagcactattacgtgggcaagaggcaaagctccaagggcttagtgtacctgctgcagcagctggtaggggcagactgtgatcacagagacagcactgtcccgcagaaaaatcatgcaagccaccaacgtgagccatgcaagtcatttaaacatttcgactagtcatactgaaaaagtcaaaagaaacagttgaaattaactgtttagagacaaagtctcactctgtcgccagggctggagtgcagtggtgcagtcaagattggtgggaggaaaaagcaggttttaattggagacccagcaaagcgagaagatgcccaactagcgttctaaagtgtcaccttggctgggcgcagtggctcatgcctgtaattccagcactttgggaggccaaggcaggtggatcacctgaggtcaggagtttgagaccaccctggccaacatggagaaaccccgtctctactaaaaatacaaaaattagccaggcttggtggcgggcgcttgtaatcccagctactcgggaggctgaggcatgagaatcacttgaactgggaggtggagtttgcagtgagccaagatcacgccactgcactccagcctggggtatagagtgagactgtctccaaaaaacaaacaaacaataaataaagtgccaccctaaaattaaaaatttatcctcaggttttgtgtgtttgttagtttttgaggcaagatctcactttgtcatccaggctggagtgcagtggtatgatcacgactcactgcagcctggagctccctgggctcaaacgatcctcttgcctcagcctcttcaggtgcaccaccacgcccagctaatttttttaaatgattttttttgtagagatggggtctctctatgttgcccaggctgccatcgagttcttctagggaaacttgccgtgggcaccgtggggagtggggtaagggcagggtctgtgtcttgttcccatggctgtcgtgggcagttgtcggttaggaggggtggctgtcgaggatgttggactaattgttggcgaccccccgccccaagcaggagcattcagctggggttccgcgccgggaattgtttcaggatgagggtcccctctggaatgcgcagaggggcgcagtgtccagagagggacgggatgaaggggtgagaggagaaggaagaaaaagaaagtgggtgattttaaaacggaggtccctggtcacaccatgagcctcacagatgggaaaactgaggcacgggggatggtgcggaccgccgtggcccctccatcatcagtgacagagcgctccgcgcggggccgcggaggtcccttaatctgcaaaggcccccacgcggcgcgctgacgacgtccactgcacccgccgggcgccctctgggccgctcccaggctggccgccggctctgcgcggccgcagacactgtccgaggtgctgggcgccggggcggggggcgcgcctgtcccgccccactcggctgctcgggcctgcccggggtctgggcttccgggagacccgcatgcgccccacgcctggcgggaaccgaggcccctcccgcgtctgtacccggcgcgcagcggcccgaggcgcctcccgggggctgggggcccggagtcactgggaggcgccaccggcggggaattccgcacacgcctgcgcggggccggcggcggcggcgggcagggcggggccggcggcggcggcggcgggcagggcggggccggcggcggcggcggcgggcagggcggggccggcggcggcggcggcgggcagggcggggccggcggcggcggcggcgggcagggcggggccggcggcggcggcggcgggcagggcggggccggcggcggcggcggcgggcagggcggggccggcggcggcggcggcgggcagggcggggccggcggcggcggcggcgggcagggcggggccggcggcggcggcggcgggcagggcggggccggcggcggcggcggcgggcagggcggggcccagggccccgtgacccgaggggcgacagcgcgcggcaggcggcgagctcgggggccgcaggtgcgagcgggcctggagagtctcccggggcggggagcgggctaggatacagtgggccccgcgggccggcgggccgggtcccggggagcggcgcctgcgtccggatgcccctcccggccgcctcttcctgccggctccaagtttcggtttcgccgccggggtg

SEQ ID NO: 19220 - DNA, 2300 bp, Homo sapien
ctgtgttccagaatcagcattatttaagggccttcgctgagcccacttgggctgtttgatcctggacactcgttaataataattaagaggcttggctgggtgcagtggctcacacctgtaatcccagcactttgggaggccaaggcaggtggatcacaaggtcaggagatcgagacaagcctggctaacacagtgaaaccccatctctactaaaaatacaaaaaatgagccgggcgtggtggcaggcgcctgtagtcacagctactggggaggctgaggcaggagaatggcgtgagcctggtaggcagagcttgcagtgagccgagatcacaccactgcactccagccaaggcaacagagtgagactccaacacaaataaataaataaataaataataataataataattaagaggcttaattattggggtatatcccttttattgtaaaatatacataatctccagtttaccatgttaactccttttcaaggcacagttccctggcaccaagcacattcacactgctgtgtagccgtcagcaccatccacctcccgaactcagcttccccagctgaaactccatccccatgaaacacgacctccacactccccctcctcctggtaaccactgttctcctctctgtctctaggattttgacttctctggggacctcacgtgagtggaatcacacaggatttgtccttttgtgtctgatttatttcactgagcataatgtcaagattcatccatctcaatgaattctttttgtgtatttatttatttatttgtagagatggaatcttgctatgttgcccaggttggtctcaaactgctggcctcaagctatccatcctcctgctttggcctcccaagttgtggggattacagacatgagccactgcacccagcagtgaactttttttttttttgagacagttttggtctcattgcctatgctggagtacaatggcacgatcttggctcaccgcaacctctgcctcctgggttcaagtgattctcctgcctcagcctcccaagtagctgggattacaggtgtgcgccaccacgcctggctaatttaggatttttagtagagacgggatttctccatgttggtcaggctggtcttgaactcccaacctcaggtgatctgcctgcctcggcctcccaaagtgctgggattacagacgtgagccactgcgcccggcctgattttattactattttttaatattactgctccttgtagaacagggctaccccataggagcatgcccagaatggccagcagtgaattcttattccgtattctgaattctatattaagttaattctccttttttctttccttttttttttttgagacagagtctcactctgttgcccaggctggagtgcagtggcgtgatctcggctcactgcaatctctgccgccggggctcaagtgattcttctgcctcagcctcctgagtagctgggattacaggattacaggcatgtgccaccatgcctggctgatttttgtatttttagtagagacgcagtttcaccgtgttggccaggctggttgcaaacttctaacctcaactgatccacctgcctcagcctcccaaagtgctgggattcaggcgtgagccaccacgcccggccattaagttaattctcagtaggttgttctgtacttttcatttgattcactgcatatttttgttttccacatagcctttattttattttttaaagtagagacagggcctcactaggttccccaggctggtttcaagctcctgggctcaagtgatcctcccgagtcagcctcccaagtattgggattcaggtgtgagccaccacgcctgccctcaagtagtatttaaatcatttttgaattcgggactgtttctgtccctccagcattggtttcctccattttccctcactgatctcactgcgtctcttttctccgtccctatttctcttatgcaggagttccctacttcagtttatgagagagaagcagcatttgctgagcatagacgagcctctcttccggtcctggtttagtctgctacctctgagtcacctggttatgtatatggaaaacttcattgagcacctgggtcgttttcctgctcatatcctggactgtctttcagggatttactaccggcttccgggacttgagcaagtcttgaatacgcaggtttgtgtctgaagtcggctctggagtcctggcttagcaaaagcagactagataactaaacatggaaagctcaggattcttattcctaaaaaacaga

SEQ ID NO: 19221 - DNA, 2300 bp, Homo sapien
ccaagaaagtgacttctaacctatgctcttcacagatttccccagacacggttctgcacttgatccttcctgagagccctggcagccacgaggagtcacgagagtactctttagaggaggtgaaggagcttttgaacaagttgatgctgatgtctggcaagaaggatcgtaacaacacggaagtggagaggttttcagaggtgagggcgcatctttgcagtggcgctaagctggtggtgtcatctcgtccgtgagggctgtgtactcccaagaaaacggaaaggatttgacttgggatttgactgataagaagggctctgctcttaggcccatggagagtagagttggcacatttgtagggtgcatggaactctagtccgcggccccagagaggtcttaaggcaggcaggcccctgggttagcagtccctccttacgatccgtaggatgaacgctgaagctggcagcctgtccaccgcactgagaaggaggttggtcacccagcaaatagcccttagaaagacacttgaattgcctctctcactctgtaaatcagcaagaatccaaataactaagatttagatggacaaaacagaagtaatcatattgagaatggtgtaccggtctaagtaatagtctctcaattttattataggttctttctctaaagttgatttgtactttacaaatggtatcctttatctctgctgggtgcagtggctcacacctgtaaagccagcactttgggagcccaaggtggaaggctcattttagcccaggagttcatgaccagcctgggcaacatagcgagaccctgtctcaaaaagtataaggtttttttttttcccaattaaaaaaaaaagataatttaaaaaaattaaaacagtccaggcatcatggttcacactttgggaggccgaggcgggcctatcacttgaggtcaggtgtttgagaccagcctggcgatatggtgaaaccccatctctactaaaattacaaaaattagccgggcatggtggcacgtgcctgtaatcccagctgctccggagactgaggcaggagaattgcttgaacccaggaggcagaggttgcagtgagccgagatcacaccactgcactccagcctgggcaacaatgcaagactccatctcaaaaaaaaattaaaaaaaaaaaaaaattaaaacaaatgataccatttatctctacaatgactctttccctgatgagagtgccatcttctcaggtgggttgtgtagatgaggagggaggccttgtgagcgcagatcatgcagtgggcctgtggacagggccgtcttttggcggtaggcctgtgtgctgttgcagagtagcgtgttaccctctcgcatggctctgtgagccaacctcatggttctgcctctccaggtcttctgcagtgtgcagaggctcagccaggccttcatcgacctgcactctgctgggaatatgctgttcaggacgtggatcgccatggcctactgctcccccaagcagggtgtgtccctccaaatggactttggcttggacctggtgacggagcttaaagaaggtggagatgtcactgagctgctggcagccctctgcaggcagatggagcacttccttgacagctggaagagatttgtgacccagaagcgaatggagcacttttacctgaacttctacacggcagagcagctggtttacctgagcactgagctcaggaagcagcccccgagtgatgccgccctaacgatgctatccttcatcaaaagcaactgcaccctgagggatgtcttaagggcctctgtggggtgtgggagtgaggccgccaggtaccgcatgaggagagtcatggaagagctcccgctgatgctcttatcagagttcagcctggtggacaagctgaggatcatcatggagcagtccatgaggtgccttcctgccttcctgcccgactgcctcgacctagagacccttggccactgtctggctcacctggcagggatgggtgggtctcccgtggagcgttgtctcccgagaggtctgcaggtcggccagcccaacctcgtcgtctgtggccactccgaggtgttgccagccgccctggctgtctacatgcaaaccccaagccagcccctgcccacttacgatgaggtgctgctctgcaccccggcaaccacctttgaggaggtggcactgttgctgcgccgctgcctgaccctgggctccctggggcacaaggtctacagcctgctgttcgcagatcagctgagctacgaggtggcacgccaagcggaggag

SEQ ID NO: 19222 - DNA, 2300 bp, Homo sapien
gatcccccaggccaccgaccccgacaaaacgtatgagctcacaaccgacaatatgcttaaaatccttgccatcgagatgcggttccggtgtgggatcccggttatcatcatgggagaaactggctgtgggaaaaccaggcttattaaattccttagcgacctgcggcgtggtggtaccaatgctgacaccataaagctggtcaaggtgcacggaggaacaactgcagacatgatctactccagagtcagggaggctgaaaatgtggccttcgccaataaggaccaacatcagttggacaccatcttgttttttgatgaagccaacacaacggaagctataagctgtatcaaagaagtcctgtgtgatcatatggtggatggccagcctctggctgaggactctggcctgcatattatagctgcctgcaatccataccggaagcactctgaggagatgatctgccgtttggagtcagctggtttgggctacagggttagtatggaggagacggccgacaggctgggctccattcctctgaggcagctggtataccgggtccatgctctgcccccgagcctgattcctctggtgtgggactttggacaactgagtgacgttgctgaaaagctctacatccagcagattgtccagagactggttgagtccatcagcctagatgaaaacgggactcgcgtgatcacagaagtcctctgcgcctctcagggtttcatgaggaaaacagaagatgagtgcagctttgtcagcctcagggacgtggagcgctgtgtgaaagttttcaggtggttccacgagcacagcgcgatgctcttagcgcagctgaatgcctttctctccaagtccagcgtcagcaaaaatcacaccgagagagatcccgtcctctggtcgttgatgctggccatcggggtgtgttaccatgcctctttagaaaagaaagactcatatcggaaagccatcgccaggttctttccgaaaccgtatgacgacagcaggctgcttctggatgaaataacacgggcacaggatctttttctggacggcgtacctctgaggaaaaccatcgccaagaacttggccttgaaggagaacgtcttcatgatggtcgtctgcatcgagctgaagattcccctcttcctggtggggaagcccggcagctccaagtctctcgccaagaccatcgtggcagacgccatgcagggcccggctgcctactcagatctcttccgcagcctgaagcaggtccacctggtgtccttccagtgcagcccgcactccaccccacagggcatcatcagcaccttccggcagtgcgcccgctttcagcaggggaaggacctgcagcagtacgtctctgtggtggtgttagatgaggtggggctggcggaagactcacccaaaatgcccctgaagactctgcacccgctgctggaagacggatgcattgaagacgatcccgccccccacaaaaaggtcggcttcgtgggcatctccaactgggcccttgaccctgccaagatgaaccggggcatttttgtgtcacgtggcagccccaacgagacagagctcatagagagcgccaagggcatctgctcctcagacatcctcgtccaggaccgagtccaagggtactttgcgtcctttgccaaagcctacgaaacggtgtgtaagcgccaggacaaggaattcttcgggcttcgtgactactacagcctcatcaaaatggtctttgctgcagcaaaggcttcaaatagaaagccttccccgcaagacattgcacaggctgtccttaggaacttcagtggcaaggatgacatccaagctttggacatctttctggccaatttgcccgaggccaagtgctcagaggaagtcagccccatgcagctgatcaaacagaacatctttgggccttctcagaaggtgccgggtggagagcaggaagatgctgagtcccgctacttactcgtgctgaccaaaaactacgtggcactgcagatcctgcagcagacattcttcgagggggaccagcagccggagattatttttggttctggtttccccaaggaccaagagtacacccagctctgcagaaacatcaatcgtgtgaagatctgcatggaaacaggcaagatggtgttgcttctcaacctgcagaacctctacgagagcctctacgacgcactcaaccagtactacgtccacctcggcggccagaagtacgtggacctcggtctggggacccaccgcgtcaaatgtcgggttcaccccaacttccgcctga

SEQ ID NO: 19223 - DNA, 2300 bp, Homo sapien
gcccagctaatttttgtatgtttagtagtgacggggtttcaccacgttggcctagatggtctcaatccgttgacctcatgatccgctcgccccagcctcccaaagtgctgggattacaggtgtgagccaccgcacccagcccagtcagtgtatttatttaagtcatgttggaactgtttctcatttggttctgtgttgtacagtctgaaattagaatattattgttaacctcaagaggattctttccagatgcaattagatttcttaccactgattaccatgaaaacatgaatcctgggatgggaggctgcgtgcacctctcctggactgactctaggcaagctcctcacctcttagcatgtaggtcacacggcgtggagactcccgactcccgacagacactgtcaggaacgcaccgatacgcctgtttggcggggagggagagtggcgggggtcggactatcttcagatctctttttttccaaggaatggtcaccagctatttatgacatagaaaagttggtattccagaaacaggaaagtaagtttacttgaataatttcgtggagaatggaaggcagaccttgccagtgtcccccacccctcactaactgtgatacagcaaatacaacaatgcatgggtgaaagaaccacaggccttatccatgcgtccttcccacgctggccattgcaggtcttaccgttgctgcttatggtgaagctgtcgatgggcatagaatcgggtcgtgtatagtatcgggttgggtggtttctgcgcaggcccattccagggtttcggcttcagggtgccagtcattcattgcgcagcaagataatgacaagccagggtgtgcaatgtccctgcttagggctgagcagcagccgggaaagacacaaagacagttgtgggtggcttcactcttcacagggctgtggcagtctgtccacatcgatgacctccggagatccaccctcatggtttctgatgtgaccaggctgcagcatgtcaccatcagccagctgttcgcgcccggagacttgcctgagcgtgagtcacgaggcggagcccctgggggagcaggtggtggaagggcagatggcaggtgtggagcgtggcgtgcacatggcactaggagcagggccaccgtgtttcgtccctcggcaggagctcggggacacatctgcagaactgactggtggctcatcatagagcaccagggccgagcaggtgcgcttaccacaggctgaggtagagctctgtgagcaggccagccatggaagtgagcacctagaacacgccagagcccaggctggaaggaaggggctgccttgggggctgatcttcatgaccgtgatctctcatctggggacctagcaccacagcaggggccggggaagcctgcactcggaggctgagcacacagactcccagatggcaccgctgccagtccctgtgccaccttctgagtggtaacgcaatcacgtttgcttcgactgcagtgggcttggaacaccgggcggaagacggccatgaggaggcgatggagacggaggccagcacatcaggggaggtggcagaggtggcagaggaggccatggaaacagaaagttctgagaaggtgggaaaggaaacctctgaactcggaggcagtgatgtaagttctggttcttgggacctccccttgtgctgctggtgatgcttctgagctgcatctttaaacgcttttgcattgggagctagaggagtcgccgccgctgtgcaggggtgaggatggcgccccactttcctcacacagtgacggtcttgttgctggttactgggggtcaagggcatctgcaccggcagtttggggggtgcagggcggaggtcggcgtctcttctttgtccgtgaggaccgccgccctgtgctgtttgctgcattgagaccctcatcgcatacgggcggtttggcttttgcccactgtgtcagtggcagaaacggatgacccaaccgtctccaccaacaggtgtcgatcctggacaccaccaggctgctgagaagctgtgtgcagagcgccgtgggcatgctcagagaccagaacgagagctgcacgcgcaatatgcggagggtggtgctcctcctgggcctcttgaatgaggatgacgcgtgccacggtatgagcctccccacccctcttgcccctgcccccacgtgggctcttcctgaggagtgggcatcatttcactgtgtgttgggggacaccctctcaggtttccatggctcagcagaagcagtgacacagtgggaatctaagagcat

SEQ ID NO: 19224 - DNA, 2300 bp, Homo sapien
ctgtgttacaagttatcaaagccagacaggttcaggaaccagaagacttggttctgcccgagattttgggcaacacacttgacccctgtcagccttggtttgtttttgttttgcctgtgaaacaaagattgcataagacagttccctagttctgtcataacagaaaccctgtactgtgaaacagatcagcgccgtctgcctggcctgttggcccctttgtttttgaggtctgagaagagctggcatcagtggcagatcttatcttgtgttttgagtgacgtctcacaaaccctcttcttatcatccctcaccttattgcagacataaaggtgagatggcctacatcgtggtgcagaaccacatgaacctttccgagaacgcttccaacaacgtccctttcagctggaaaatcaaggactatctggaggagctgtgggtccaggctcagtacatcacagacgcagaaggtgaggctacctcaagacaggtcagattcagcacaggtgaatcacaaagggattgcctgacagtgaaaagcagatgggtggctagaattgcaaggtgaattttggagtttttagttttcacactttgtttgtgcagtaagcgtccaatttacgtcaccgcgtcattttaaagtttctgctgaaggagtgagaggccccggcgggaccagaaacctttcgatcctatggcagcaggagcctgtgagatggtttttagtgccgtgatggccagggatatggcgaaatggggtgtgttctggcaagaggaggactgtcgcctctatcagctggtcattcccattctgggccttctcagactggggcactggactcggaagatgcccccaggagaggcgttctcagaaggcacgagcgcctggagcatcccctactcccaggtgccccatcaggaggcacctcccagctgtgtctcccgagtcacagcccagacacagtgctgagctctgctgccagatgccagaagatttgccctagtccagaaaaaccaacgacaacgcaacacttttacaaaagccatctttcatacatgcaatagtcttttccacgtttacttatcgtaccatttggaagactcagggtggccttcttttctaggttaccattctgccactttttctcaaagcagtctctctcctcatgagcatattcctttctcaggacaataccccaactgaccctgcttttctatgacagcatgcgaattaggggctgcaccccgcccactagaagccagatctttctggcttgcatgctctgtgacccccagcccctgaagagcagcccacttgttcctaatttacttggacccgggggttcctgaagcatgctgtgacctgtagccatgcaacatacaatgtagccatgcaacatacaactcagtcttatctagatgtttctctttggggctagcttggctgtttctgacctaaatttgacactgtttccgccttcctttattttattccactggaaaaatatcctaggccaggcgcagtggttcacaacaccttgggaggccaaggccggcagatcacctgaggtcaggagttcgagaccagcctgaccaacatggtgaaaccccgtctctactaaaaatacaaaaaattagctgggtgtggtggtgcatgcctgtagtcccagctacttggtaggctgaggcaggagaatcacttgaacctgggaggcggaggttgcagtgagcagagatcacgctacccaccgcactccagcctgggcaacagagtaagactccatctccaaaaaaaaggaaaaagaaaaatatcctaaatgtctagacagtgactattccttcaattccctacaaaatcaggcagttggtacccctttgtctacgagctcccattcaacaaggcgtccccattccccttcactccggagccccctggaggcaggggagcgccatgacttagacgcactccaggccgctccttggtttcctctctgcaggactgcccaagaagttcgtggacatctttcagcagactcctctgggcaggtttcttgcccagctccatggagagccgcagcaggaacttcttcagtgttacttgaaggatttcattctcttgaccatgcgtgtgtcaacggaggaggaattaaaggtagatgtttagatactggctaagggtcaggtgtagagcttgcatgatggggactggatgcagacacggagacgtttcctcagctgcctggagctggtgctgtgaagtctgggaacagaacatggtcagcgaagggtgccggtgggtgaag

SEQ ID NO: 19225 - DNA, 2300 bp, Homo sapien
ctctccattcaatgatgttgtggataagactcctgtcatccgctcagtgatactgaaactgcttttgaagtacaggtaagaacaacatggagacttgcttctggaaagccctggctttttctcttcatcgcagcgttttgttaccaagtcttcttgtcgtgactagtagctagtacatgatcttggggagctttttcggtgagacacagcctggttacttgtactggttgtgtattctgacattttcacatataggcacatgagtttagtattcccacaagcacacgcatctagcaagaagccaacagtgccgtgaagggaccacagtggcgtgagggacatggaactcaagaggccagaatctgtggtgctgagcctggttccacagcagcgcaactttctgatttttcagatggtagcttagaatcctgctcaccctgaatgtcctagatgtctcctaagtttctattcccctgaacatgggctctatttccttggaaaggatgttgacatccaagaatagtatcacctgtggtacttgtatggatctaatattgcagttctcaaagtgttggtatggacccttgggtgtgaggtaggtctctgaggttaaaactattttaaaaattagattactaagataaatttgcccttttttaaaaaacatgttgatacttatgatgatgttacaaaaagcggtgatgagttaaactgctggcccctcacgtgaagacacagtagctggaggtattgttttcttcaccgccatgcacacgtggttttcttcatgccagtttcattttagttttactaaatcttgactcttgaggatttgacttttcaacgttttgtggaaatgggaagcacacacaaaacactcccactacacaccggagtagacagttgcctcacagaaaatcactcatgacaagccctgggttatcagccggctgctgtgttcatggaccgccacccgtgctgggaggaaggatgcacatgatacaggtgtccagggctgggcaggcctctcctggaaatcagcaaagtgagccagcctcagccaaacaactgacaatgttggttggtgatgataacattcaagcttttaagctgaaattaaaattttgaaaagcttatattctccactatgagcttgtgagcttttgaatacttaaagacattttggggcaatttgtggtgatattaatgaatatggatttttttttttaaaacgtagaatacaaatgtgtcaacctttacaagacctgcacagcccagtgaaccaatattttccaaatgaccaatgcctgatgtcatgaaatcatgtgggtcaaaaaagaaaaaaatctatttaaagtatgggcagacctttttgattttaacataattgactgaaaaatgcactgatacagtttcaggctccacattgcaactaacctctagacatgaccatttatcactgtgggcacagcattaaggaataatagccacaatcagctgcaaaaactattaaaatgttcctcgctattccgagtatatgaggacagattttcttcatgttctcccatatgctgcagcgatggggagcagggcaggcaggccgctgacttccaggagccaggccccagggccagcacaggaatggaagaccaaaccactcttctcacggattcatgttttggaaaatattttaaatgttatttaacatgtaatagctttattgttattttaaatgaatgtatatttttgaaaccttttgtttttaatgtctcataattcctaatatcataaatattgataatataacccacataaaagctcttcggggttctcaatttttaagactataaaggggtcctgaaaccaaagtttgaggacagctggtctaaaatgtgagttttatattcctccagtattatgctaaaaggttttccataaaatcttagaaaccacgtatatgtatgtatatgtttatacacacacacacacaggacagacgaccgatagatagatgctcttttttttagtaaggtatgtctccagatctgagagaaccaggaataatatttctctttctgcagctttcatgatgtaaaagattatattcaggaatatttgaccctgttaaaaaagaaagcattcataactgaagataaaactgaactgtacatgctcttcatcaactgcctggaggtaagtgaactctctcttccctgaatttcttttggaaactatctgaaccacatggtttaaaatttacagaatataattttagtcagtataattaacgaatgctctgt

SEQ ID NO: 19226 - DNA, 2300 bp, Homo sapien
atgcacacgtggttttcttcatgccagtttcattttagttttactaaatcttgactcttgaggatttgacttttcaacgttttgtggaaatgggaagcacacacaaaacactcccactacacaccggagtagacagttgcctcacagaaaatcactcatgacaagccctgggttatcagccggctgctgtgttcatggaccgccacccgtgctgggaggaaggatgcacatgatacaggtgtccagggctgggcaggcctctcctggaaatcagcaaagtgagccagcctcagccaaacaactgacaatgttggttggtgatgataacattcaagcttttaagctgaaattaaaattttgaaaagcttatattctccactatgagcttgtgagcttttgaatacttaaagacattttggggcaatttgtggtgatattaatgaatatggatttttttttttaaaacgtagaatacaaatgtgtcaacctttacaagacctgcacagcccagtgaaccaatattttccaaatgaccaatgcctgatgtcatgaaatcatgtgggtcaaaaaagaaaaaaatctatttaaagtatgggcagacctttttgattttaacataattgactgaaaaatgcactgatacagtttcaggctccacattgcaactaacctctagacatgaccatttatcactgtgggcacagcattaaggaataatagccacaatcagctgcaaaaactattaaaatgttcctcgctattccgagtatatgaggacagattttcttcatgttctcccatatgctgcagcgatggggagcagggcaggcaggccgctgacttccaggagccaggccccagggccagcacaggaatggaagaccaaaccactcttctcacggattcatgttttggaaaatattttaaatgttatttaacatgtaatagctttattgttattttaaatgaatgtatatttttgaaaccttttgtttttaatgtctcataattcctaatatcataaatattgataatataacccacataaaagctcttcggggttctcaatttttaagactataaaggggtcctgaaaccaaagtttgaggacagctggtctaaaatgtgagttttatattcctccagtattatgctaaaaggttttccataaaatcttagaaaccacgtatatgtatgtatatgtttatacacacacacacacaggacagacgaccgatagatagatgctcttttttttagtaaggtatgtctccagatctgagagaaccaggaataatatttctctttctgcagctttcatgatgtaaaagattatattcaggaatatttgaccctgttaaaaaagaaagcattcataactgaagataaaactgaactgtacatgctcttcatcaactgcctggaggtaagtgaactctctcttccctgaatttcttttggaaactatctgaaccacatggtttaaaatttacagaatataattttagtcagtataattaacgaatgctctgttccgtgcagaaaagaagaaaggtttcaaagacgcggcttctgccttcagcaacgtatattttggcatttacttgcatatacatacaaaacagaacagcctaggagaatatactgccaaagttaacagtggttatcattgagtggggacattatggatactttttatcttcatatttttatatccaaaatttttataatgtaaataaattagataattttttttcctcataggttcacttttcccctccttcttgtccttaaaataaaaaggaatgttaggtttccataagtcaagaaatttacactgaaacctacagtaacattcttctatccttccttctccacagtcacattggcgactgtagaagcttggggcatccatgtttaaaaaaataatatccttttctttcttgttccttgttcctcaggattcaatacttgagaagaccagtgcttactccagaaatgatgaactgaaccacctagaagaggaaggtcgtttccttaaggcatattctccagcaagccggggccgagagcctgccaacgaggcctcggttgaatacctgcaagaggtggcccggatccgcctctgcctcgacagagctgcagatttcctctcggagcctgagggaggcccaggcaagtcttctctgccttgctttcctttgggtttaaagactccgttatttagaaattcaggaagtatgggaaactagttcttcgaatagactactactgggcttttctacatcccctctcccctg

SEQ ID NO: 19227 - DNA, 2300 bp, Homo sapien
gtgggacctgcgtgggggcctcacattctgactgttccctgcagtcacagcttaaaatactttcatgttatctccagaaactgtcacagtgtcctccatcctctaatagttttgccactgagagcatcggccacactgcatctcctctctgccggactttagatcccggtttttcctttggggagatgagaacaatatggacacccatgggatgccgactgtcctcccaaactctagctgttcttagcccaaccgctcctctcctgacaaagacttcagtggaaaagacgggtccaggcctgcgtcttaacaccctgcccggggatcagcatcaataccacacagcgcagccacctgacgctgagaatgcggtcgggtctggtccaccggaaaggcgagtctatcatgagagagactcttaggaacatggtccaggctttgtggaacagcaagtactcttcacataactctcttctcagccgtaagcctcactccaagtgctgagaaagtgcagcgtgccaaagcggccagcctcagcctctgtcttgtgttctctcgttctttccagagacaaggcagacagaacgcagaccggccacgtgctgggcaacccgcagcggagagacgtggtgacatgtgaccgagggctgcccccagtggtcttcctccttatccggctactcactcacttggctctgcttctgggagcgtcccagagttcccaggtataacccagtgctgccaaacaatgggctcagttaagaacctgctttcgcttcttcccagggagtccttttgtcttgagtcctagctgccatctatgcgttttggagataattagtctacaaagtaatatacaagttatacatcttcatgtttccccctgtggcgtatgatggtatggggggaactactccccagattatacagaatccacttcaaattaacactctgtgtctctggtccacatctgggagtagagaggctgacatcttcattattttacctgtgtcttcattgtagctagggaagaaagagcacactgcataaccaagatggccaacagtacaatctggatattctttatctcactgtaacaacagaaaagccagcagccgttccgcttgctagccttcctttcacctggatcactccgccgttttcatcttagaaaccgccttccgactctatgctggtgctccactcccaatggcctctaccaggctcaccatcttctctacaaaccagatccccgctgaacactctgttccgttgcccccacaggctctgataaacatcattaagcctccagtgagggatccaaaaggctttctgcagcagcacatcctgaaggacctggagcagttggccaagatgctgggacacagtgccgacgagaccatcggcgtggtccacctcgtcctgcgcaggcttctccaagagcagcaccagctctctagcagaagtgaggaaaggggcaagggctgggcggggatcacacagcacaacggcagcgcaagcaggctcgctgtcttgtgggccaccccacacacagccagtctgagctctgtctgtgctgttgctggaaagaatgagagaacacacagagagaaaaccgtgtctagggaaggcgatgcctggggctggaaaaaggaagcactctgcttgcccagaggctggaaggagctgctctgttccctccattcacccctgcctggctaagacctgcggtattcgggagcgtctgcacgcaagtgttcagtgtgcatatatggggagtcttcagttccgaagtcagccccgtaggtcattcccctaccatgctgggagcacgtgtcgtccacacagagcgtgcgtgtcaaaggatcaatcaccatcacagttgtgtgctgatttattaaatgtttatatgtccacagttatgttaaaaaaaaaaagctataaaatattgtattcactgagctaactttctattttaaaaatttaaatccatacagaaagaaaaggtctgtaagacaacttagtaaaatggttatatggttatctgtgagtggtggaattaagagtgattttcttttgctaatctgcaaaaatcacaatgaccattgtgaggacaatgttaatttaaaataataacaataatagcaagaagaagtcctgccccatgacaagaaaatctgctcccacctcaggtacttctttgcctgaaactggcattcctatttattttccattttgaacaatctgattttattttaagcctcttattctggtgggatttcagcaaagtgagcacaccc

SEQ ID NO: 19228 - DNA, 2300 bp, Homo sapien
ttatccggctactcactcacttggctctgcttctgggagcgtcccagagttcccaggtataacccagtgctgccaaacaatgggctcagttaagaacctgctttcgcttcttcccagggagtccttttgtcttgagtcctagctgccatctatgcgttttggagataattagtctacaaagtaatatacaagttatacatcttcatgtttccccctgtggcgtatgatggtatggggggaactactccccagattatacagaatccacttcaaattaacactctgtgtctctggtccacatctgggagtagagaggctgacatcttcattattttacctgtgtcttcattgtagctagggaagaaagagcacactgcataaccaagatggccaacagtacaatctggatattctttatctcactgtaacaacagaaaagccagcagccgttccgcttgctagccttcctttcacctggatcactccgccgttttcatcttagaaaccgccttccgactctatgctggtgctccactcccaatggcctctaccaggctcaccatcttctctacaaaccagatccccgctgaacactctgttccgttgcccccacaggctctgataaacatcattaagcctccagtgagggatccaaaaggctttctgcagcagcacatcctgaaggacctggagcagttggccaagatgctgggacacagtgccgacgagaccatcggcgtggtccacctcgtcctgcgcaggcttctccaagagcagcaccagctctctagcagaagtgaggaaaggggcaagggctgggcggggatcacacagcacaacggcagcgcaagcaggctcgctgtcttgtgggccaccccacacacagccagtctgagctctgtctgtgctgttgctggaaagaatgagagaacacacagagagaaaaccgtgtctagggaaggcgatgcctggggctggaaaaaggaagcactctgcttgcccagaggctggaaggagctgctctgttccctccattcacccctgcctggctaagacctgcggtattcgggagcgtctgcacgcaagtgttcagtgtgcatatatggggagtcttcagttccgaagtcagccccgtaggtcattcccctaccatgctgggagcacgtgtcgtccacacagagcgtgcgtgtcaaaggatcaatcaccatcacagttgtgtgctgatttattaaatgtttatatgtccacagttatgttaaaaaaaaaaagctataaaatattgtattcactgagctaactttctattttaaaaatttaaatccatacagaaagaaaaggtctgtaagacaacttagtaaaatggttatatggttatctgtgagtggtggaattaagagtgattttcttttgctaatctgcaaaaatcacaatgaccattgtgaggacaatgttaatttaaaataataacaataatagcaagaagaagtcctgccccatgacaagaaaatctgctcccacctcaggtacttctttgcctgaaactggcattcctatttattttccattttgaacaatctgattttattttaagcctcttattctggtgggatttcagcaaagtgagcacacccagagtcacactgatgaaatgacagaatcctggaagcaggtggacagttcccgcagcactccacatctgtgtggtctgcctcagggtttgggtggcagcagctgagacggctggcggtagcctgggccactcttactattgagctcaagttctgttctttcagtaatttttttcaaaatgggtctaagattacaattatgtaggatagaggaatttttagagattgatgttatcttcaaaaggtcattaagttggtggtaacaacaggaactacttcaaaatacttagattaatttagaaagctattacctcaaaacgagtgttatttctattaaacacttatttagggtttattatacgcagactgctgtgttctttgtgccttgggtaacctacacatttggagtttttttgtagggcttttaaattttgacacagaattgtcaactaaagaaatgaggaacaactgggaaaaggaaatcgcagctgtgatttctcctgaactggaggtaagcagtaagtgctgacagctgggttgctcctcggtccagaaaggaagggtcccggcgtctgctgaatgctccttgcctgttgcccctcgtagcggtgccagcaagagcctttgactgagccccagattccaatgctccccacctcgagtcactccatc

SEQ ID NO: 19229 - DNA, 2300 bp, Homo sapien
ggagcatgggcagatcaaacaaaactcctccctgtgcctaagcatcgaggcgtacgtggaagacgggagtgagtgggtgtgtgccggcggtgctggggtactggggagcagtcaagtgtactggccacatctgttggaattggaaatatactttcctaactttcacccatttgcactttcattttctacaacacattgtctaaacatttctctccatggactattatttgctgtctagcaaggatgaagacgagttggaaacttctgttggtcagttgaggagtatgagttcacaatgacaggaaggacttcctgtcaatactgtggcctctctctcagatgcagtttcactacgtcgaagatgcttagatcctaggtcttcggaaggacacccaggaataaggccagccctcgctgcctaagctctgggtctcttctttcagcagcttctctccgtacccagccagttacatgggcccaagggacagatttccttcatcagcctttgatggacgcggctgatgcgtcagctccatagaggctgggctccctcttcgccgccctccatttctagcacactgcactgtctgtagacttgtgggaagaacttttcccgttttcaagctccacgctgcatcacaggaaatgacactgaccagattaagctacaaatacaagtctcgcagccagtctcaaagtctgtaaccccaataacattttttaggtaaataaaaattgttactgggtggtcttcccttctccaggaagcagagctgaggctggtaaagttcctgcctgagattttggccttgcaaagggatctagtgaagcagttccagaacgtccagcaagttgaatacagctccatcagaggcttcctcagcaagcacagctcaggtgtggctctgctctgacaggaccaggactgtcccgcatttggcggttcgaaaggatcactgcataggggaacagggtggggcggaggggaggaggcgctgatgggtgctctatagcctaagcccttaccatgcggtgaagggtgcttgaaccccaaaaacatattagaagctttcgccacagctgaaaagcacctccctctctagctcctcaaactcggctcactccttcaaacagcacctcagacatgcttgtgactgcacaaagcaggaaagatgggctctcggcagagcatgtaactagggtggtttggccctttcagggggttgctatcatacggttcttaccaagtattctgttcaacagatgggttgaggcagctgcttcacaacaggatcacagtctttctgtccacatggaacaaactgaggagatcgcttgagacgaacggttagtatcctgtcccctgtaccactaagcgttccaggagagcctcgtctgaaagctcttctcgtcagcctgactcggcccatccctgtcaacacccagcactgtgtttgtttgtttttgagatggagtcttgctctgtcgccaggctggagtgcagtggcaccatctcggctcactgcaacctctgcctcccggattcaagcaattctcctgcctcagcccctagtagagacagggtttcaccatgttgcccaggctggtctcaaactcccaagctcaggcaatccacccgcctcggcctcccaaagtgctaggattacaagcgggagccactgcgcccagccagcactgttaacgcttaacttgtgtctcttttgatggtggtgtctggataagtaaaataatgtgtcaggaaaataaaccctcagtactcttcagtccctaaatatggcatcaaaagggagctgaaagcatttgaaactctatcagcatatgagatggggcagaaccgagacccggctcccggctgtgtgtggagctgatggcttctgcatccctcctccccacgcctagattctgtgaggagttggaactcctctctgcttaagcataaccctgtcgtttaaaggtgagatcaacctacccaaagactactgcagcactgacttggatctggacactgagtttgagatcctcttgccacgccgacggggcctgggcctctgtgctaccgctctcgtcagctacttgattcgcctacacaatgaaattgtctacgccgtggaaaaactctccaaggaaaacaacaggtttgtgcacgagccaccaggaagtggtgcctgctcagcccagagtccctaagcccagtggggcagacacaagcaagcttcagccccttccctaacagacactcactccttcagccgcccccaccagtgacccgccccatactt

SEQ ID NO: 19230 - DNA, 2300 bp, Homo sapien
gcccggctgaataaagcccttctttaactcgtgtctgaggggttttctctgcagcttgtcctgctacatttcttggttccctgaccaggaatctaggtgattaatggatggttgaggcagcccctcagacggcttaggcctgccctgtggagcatccctgtggaggactccagccagcttgagcgacatggatcctgagagcgctctcaggcaggcaattgccccagtggaatgcctggccagagcagtgtgtagcaggcccccgaggaggatcaacgcagtggctgaacaccgggaaggaactgccacttggagtccagacatctgaaacttggtaagactggtctttggaacttgcccactccatttgaggggaagcgtggcctgatcacccacggcgtgcctgtactggcactctggtttttgtttttgacttgacttggattgcttgatactttggttttggttttgacctgacttggatatcctgatactctgattttggttttgattttggtttggtgtaaactgtaaaagtgtgtgtgtgccctttttacctgttctttgttttgtggtatgcgtgtagggtgagcgtaatgttttgtcttgaagaagcatgggtcaagcacaaagtaagaccaccccactaggaactatgctgaaaaatttcaggaaaggatttaagggagactatggagtactatgacaccaggaaaacttaaaactttgtgtaagatagactggccagcattagaggtaggttggccatcagagtgaagcctggacaggtcccttgtttcaaaggtatggcacaaggtaacctgtaagccagggtacccacaccagttcccgtacacagacacttggttacagctggttttagactccccacccgcccgccccaacagtggttgagagaacagcagcataagtggctggcagaggcaaggaaagaccagcagagagagaaagaggaagagacagacaaagagggagtcagagagagagagagaaagagacagaggcaaaaggaaagtcaaagagaaagagacagaaaatcaagaggaaaaaaagaaaaaaagagatatatatacaagtagttagaaacaacaacaacactgtaccctattcctttaaaagccaagataaatttaaaacctataattgataattgaaagtattctctgtaaccctgtaacactccaataccactttgttgtcagtgtaaacaagggcatatcccgaaagcactgaggccttcccatcaaaaatccttaacccagtaacccgtggatggctcaaatgcattcaatctgtagctgcaactgctttgctaacagaaaaaagtaaaaaaataacttttacaggaaacctcattgtgagcacacctcaccagttcagaagtagcctaaggaaaaaaaaaaaaggatgatttaactttaactactgaaaattcccttaacccagcaggtttcctaacaggggatctaaatcttaattaccgtacaaaggccctaccatacctaggaggaactcccttcaggaaaggatgatctatggttcctcccaggtaattaaaggaaaaaaaaaaagccatctatacgaattctaagttaattttgacaaaacgaggtcttactaatagcaaaggataattaaaatcccaagcttacaaggttttcaacaaaagtaaagtttgctaaaagttaacagtgtaacatgtattatagtaatttctgatcttgtggcctcagacagtctagtccacagacataaaagaagttcgctttggaaaagaatggttatcatcttcaggaaaaaaaaaaagaaggggcagaatttacataaaaagagtgttatatggtaaattcttgtcctgaaataaattaactggttgtttaaagaaagaaatgtttgtaataagtcagaaagttgaggcatgtcgaagaattgtctgcgaaagtcgtgaaagagaaaaatgttataaaaaattatgcaagaaatgttgtataatttaaaagtaactaggcctcctaaatgtaaaactattgaaagaaaaaaaaaacagtttatgtgcaagtgtcaggcctctgagcccaagctaagccatcatatccccagggacctgcacgtatacatccagatggcctgaagcaactgaagatccacaaaggaagtgaaaatagccttaactgatgacattccaccattgtgatttgtttctgccccatcctaactgatcaatgtactttgtaatctctcccacccttaagaaggttcttcgtaattctttgtaatcc

SEQ ID NO: 19231 - DNA, 2300 bp, Homo sapien
agggagaccacccctcatattgttttacgcccaatttctgcctccaaagagagaagtaaaaactaaaaggcagaaatgaaatccacaagcagacagcctgcaccacaccctgggcctggtagttaaagatcgacgcctgacctaatcagtgatgctatctatagattacagacgttatatagaaaagcaccgtgaaaatccctgtcctgttctgttccgttctaattacgggtgcatgcagcccccagtcacgtaccccctgcttgctcaatcaatcacgaccctctcacgcagacccctgaagagttgtgagcccttaaaagggacaggaattgctcactcggggagctcggttgttggagacgtgagtcttgccgaagctcccagctgaataaagcccttctttaactcggtgtctgaggggttttgtctgcggcttgtcctgctacactctggtgggaaagacaccgcagcaggggagcagggtgcgcagggtgcagtgggtgacgctcattcgctgaaaactgaccctgctttcaaagccttgtcagttcccaaagctgtatgaagcctttcctgagcctcaacctctagagtctaatttcatcctctgtattttcccctttgttagtccaaactgcgtcattttgtaagcccctttccattttgtagaccttggtcaaagtgaaacattccacgggggttcgagccatgagaaacagcctgcctcttaacatattctgctgggacaaagcgccaggaacaccacattctgccggaaccacctcatcctgggaacacgttaacatcttcccggacagcaagccatactgcctagatccctcctgcccaggcctatgagtaccccagcctgtaatcgctggtgggctctggcattaagctggcccccgacaggtgtttgcaatacacctgtgttgctgtagagccgcccgcgcgccggcaatctcactgtgcgtcattctttaaccttcaccttcccttcaaaacctaacacccttgacgtttatattcaggctattatatatacatacacacatacacccttctgaatcctcccaggagaatataaaaccatgggttaaactgctacacttcagcttcagtggctgcctttcagtgcttcaaatacaccaacctctttcccaccccgggacctgcacgagaaagctgctccactcacccgccgtgctctttcactcacccttcaggtgtcttcaatatcgcctctcaggcctttcccaaccaccggtttaaagtcggctccccacaaataaatacatattctccctcacagtacttcgcacaacacctggcacagcgagagcactgaaccaacactcattcaatgaggaacacgaggtaagaaccaagaccccccaaggtcgccgtactttgtctggtaggagaagctttctgcccagcaaggtccgacccagatgaaaccccgtccaagtctgcagcacccccgtgagtccagcccgctaaactgtgaagaatttaaatacacgacacctgccctcaaaagcttgagggcacccctgagctgccatcgaggtgggggcgtcaacgacaggcgctcagtaagtgctcctgaggcaactgccgggctgtcctggacctggtgaatcctttcggggttcagcaaaggcggacgctgaccgggccaaggagtgggacctgcagtgctggaccacccttttccaagcgcagaagtgccgtgcccgccggctctcaacagggcaagaggcccctctcgccgtgcagagcgcagcgcttgcggcggggacagcagaggcgggacgggcgtcacggagttcccgggtcctcgcgcggtcacttacctggcctcagctatccgctgaaaaaggggcggacggcctcccgggatccgagccgatatcgcgcgcggcgccgcggggcaacctgaagccgtgtgcgtgcgtgtgcgttcacgcaggggctcacccagcggccacgggcttctgaagacccgggtgggaagtgcggcccgggaaagcgcaagcgtctccatggcaacgagggcggacggcgtcagagcgagtcgcttccggaagtgacgtgcggaaggggtgcccgggacgaagccatggccctggaggcggcgggagggccgccggaggaaacgctgtcactgtggaaacggtaatgctgtcaggcgacgcgcaggaggcgggggccgaggccgggcggcccttcgcggaccctccgagctcatagtcttcaggctgtggaatcggagctgccaccgcccgagactc

SEQ ID NO: 19232 - DNA, 2300 bp, Homo sapien
aggtgggaagaactgagaatagtggtgagggctgagcctccagcgtcatattaaattacgcaggggacaggtcatgacgggccttgaagccatgccaaccagagtgaactttattcaccatgaggtcatgagaagggcacttcaatgttctaagaggacttgtgggctgggtgtggtggttcccacctgtaatctcagcacttggggaggccaaggtaggaggatcccttgagcccaggagctggagaccaccctgggcaacatagtgagatcctgtctctacaaaaaataaaaaaataagccgggtgtagtggctcacacctgtggtcctagctactcaggctaaggtgggaggatcacttgagtccaggaggttgagatcagatcttgacagtgagccaagattatgccactgcacttcagcctgggcacagagtgggggaaggggaaaggaaggaaagagagacagagagaggaaggaagggaggaaggaaggaaggaaggaagggagggagggagggagggaggggacttgttgcttttgaggaaaatacttgctttttaggaaaattggtctgctggcagtatggaaaagaaaccactgaggaggaacatttgagccagggcacccatgaaaatgctgctcaggaacccacaggagtgatggtggcacagccagggaaggagcagaggggaaacagacaaggggacagattccagcgacatttaagaggcagaataaaagcgagctagtgtgcaactggacgcgagaggaacggaggggcccaggaggatgcagatctccagcttgggcaactgggagcgtggtggacaggtcactgagatgaagaacccaagataacaatcagacttgaagataaagctcatgagctgattcttaatagtcacagaattcccttaatttttgcctttttttcccttccaagactccccagactttttttttttttttttttttttgagatggagtttcgctcttgttgccgaggctggagtgcaatggcgtgatgttggctcaccgcaacctccgcctcccgggttcaagcgattctcccgcctcagccttccgagtagctgggattacaggtatatgccaccacacccgtctaattttgtatttttagtagagaccgggtttctccatgttggtcaggctggtctcgaactcccgacctcaggtgattcccccgcctcagcctcccaaagtgctgggattgcaggcgtgagccaccgcgcccggccaactccccagactattaatgacatcctacaaaacgagaagccgggttctacgcttgcactgctccctgtcccggagaccgcacgcccgagcccaccgaggggcccgcctcgagctcggcgtcctcccaggttacctcgagctcagggaagctgagcaccaccagggaagcacaagcgcggacactgtcccctttcacgaaggacacgtcaacgcccccgaccctctgcagacccgagaaggcggggtctcgctgccacgcctcggtgtcccggtctacgacgtgggccttcagccgagcttgctccctaggaggacagaagcgtcaaacttggtcggggtcacacctcagactctgcctcctccacccgcgcggctgcagcggacagagcgcctctgccgggtcttctcccgcttcaagggaaagcaagggacataccgccgaggccacagtccctaggagcccaggcggcggagacccgcgcaagcgcaggccagacaaactggccggaagcgagaaccgcgcccaccccgcggactacaattcctgagatccctccgcttccgcgccggaaactgggctttgctttggagtctcgggcggtggcagctccgattccacagcctgaagactatgagctcggagggtccgcgaagggccgcccggcctcggcccccgcctcctgcgcgtcgcctgacagcattaccgtttccacagtgacagcgtttcctccggcggccctcccgccgcctccagggccatggcttcgtcccgggcaccccttccgcacgtcacttccggaagcgactcgctctgacgccgtccgccctcgttgccatggagacgcttgcgctttcccgggccgcacttcccacccgggtcttcagaagcccgtggccgctgggtgagcccctgcgtgaacgcacacgcacgcacacggcttcaggttgccccgcggcgccgcgcgcgatatcggctcggatcccgggaggccgtccgcccctttttcagcggatagctgaggccaggtaagtgacc

SEQ ID NO: 19233 - DNA, 2300 bp, Homo sapien
tatgctttcttttccttttgtagattcccagtttattttctaagactgcaaagatcactttgtcaccagccctgggacctgagaccaagggggtgtcttgtgggcagtgagggggtgaggagaggctggcatgaggttcagtcattccagtgagctccaaagaggggccacctgttctcaaaagcatgttggggaccaggaggtaaaactggccatttatggtgaacctgtgtcttggagctgacttactaagtggaatgagccgaggatttgaatatcagttctaaccttgatagaagaaccttgggttacatgtggttcacattaagaggatagaatcctttggaatcttatggcaaccaaatgtggcttgacgaagtcgtggtttcatctcttaaacacagtgtgtaaatttattcaactaacgatgggaaatgtattacttctgtacacagtggactgaagtgcaatttgttgaaagggaacaagtcattgaagagaaaaaaaaagcccaatacttagagtcccaattttgtctcatttgccaaaaaaaaaaaaaaaaaaaaagcaaaccccctatggttgatattgttataatgtatatactgtataatatgaaagagaatcgatgtatctcactttttcattatttgctaaccaaagctgtacatttttcatatgatctgcagccttttgggtatcaaatgggtcaaaaccatgggacctgccacctcccatcagcaattctggaaatgcactatttctactggtattcttgctttttttttttttttcattttcttgctgaaatgacatgaattgttgagtttatttttacacagtaaagagtggagaaagactgtggtctcctcaggatgtctcttcttttccgaggcttgccaatgccacctccccctgcagccacccctcttccccagccaggtgcaggtgaccctcacctgcagggggtgtgtgcctcgcttgtgcattgccctgtgccctttgacaaccccacaccgtctggtgatgctggatgttgggtggaggggtctccatttcccaggggcagctgacgcagaggcagagagtggcccagtgtttccccaactcagtgaggccactcggcctgggatgtggggtcactccgcattccccttcccctcctgggtggactcgcggtccacagctgggtccgggttcgaggtggcccgggcttgtcgtgcccaagcaactctggcagttctctgcctcagcctctgctagcggggccttagccacgtgtggttgccttcccgctttcagagtcccaggccccttccctgcacttgtctgagagtgtctgagagtgtccctacaaagggataaatagccatgggaacgctgggccttgggctgagcttacttccctgtcccccttgtggacctggcttgactctggatgtgtttggagcttgcgagctgttccttccaagggacagagtaaccaggacccaagtgccctggggtgagtgattctagcacacttacaacctgaagtcaggggacatggagccaaaatcacctgcccggtggtttggttggtgccccccacctcacacacacagatgcacacacacacacacacacacacactgggttggcggaagggactggtcactctggcttcctgttggcatcgcccggggattctctgcccggtgctctggtgttcccaggactcaggagcgggggtttagtgggtgtgagtgagccacctgtcacctgggatggtgtggagggagaaggtttggcctcagcaaagcaggcagggaaccccctgtgtccctgcaggaagagccttggtcgggagacagaggccctgccaggcgggaggcccctggcctgtgttcccagagccattctcgctgggtggtgttcaccccagggtgcacgctcacggtcgggcccagggttatgcccgattccagtggctccaatggacacaccgcctcacacctcccactcaagaaagtgcagagttacgtctgtgataacgtcacgcatacatttctaatctctatgtgagagctcattcaaacacttgggttcttaactatcattagatgcaaagtactttctgcacttctcacgcctgattttggctcatccatgaatgccttcagggggccgtggagctaagaacagctgcttggaaagaagccacgggccttgcagctcggtggagtgaggtgggagtctgggcagcgggacacgggcgcaagaagtcaaagccagagggtgtcttggaagtcattaacttc

SEQ ID NO: 19234 - DNA, 2300 bp, Homo sapien
gggccgcggcagctcccagaagggcgggggggacgcgagcggaggcagccccggtggcgcgctcgtgagacccccgccgcgccgcgggcccgggccgcggacaattaaagcgggattcctcccccgctgacgtcggcggctcgaggcccctcccgcggcggcataaaaggcgcgggctccgcagcgcaggcggcagtgggggcctgatagcgcggcggtgtggaccgcgcggccgaagagcgcggcgcccagagcgcgggccgctcgcggagccacagcccgagccgggtcccagccggagccgagccccagccgagccgagccgggcccggagcgcccggtgcccgcagccatgccggccggccgcgccgcgcgcacctgtgcgctgctcgccctctgcctcctgggcgccggggcccaggatttcgggccgacgcgcttcatctgcacctcggtgcccgtggacgccgacatgtgcgccgcgtccgtggccgccggcggcgccgaggagctccggagcagcgtgctgcagctccgcgagacggtgctgcagcagaaggagaccatcctgagccagaaggagaccatccgcgagctgaccgccaagctgggccgctgcgagagccagagcacgctggaccccggagccggcgaggcccgggcgggcggcggccgcaagcagcccggctcgggcaagaacaccatgggcgacctgtcccggacaccggccgccgagacgctcagccaactcgggcaaactttgcaatcgctcaaaacccgcctggagaacctcgaggtccgcgcgcgccctcggctccggttccccctccggctcgctcgcccctctgccctcccccaccccgttccctacccggccaggcatcccccgccctcgcctcagccgcgcgggtgcccggccggtgcctccccgcgcctgcgaggccccgcggcggccactcgccccagctccctgccaggccgcccccgcagtcgcccagaggggaccgcgccgcgggccttccagcacggtccccgcgcctcgcctaacggtgtggtttcccccgcccttgcaccccgcagcagtacagccgcctcaattcctccagccagaccaacagcctcaaggatctgctgcagagcaagatcgatgagctggagaggcaggtgctgtcccgggtgaacaccctggaggagggcaaggggggccccaggaacgacaccgaggagagggtcaagatcgagaccgccctgacctccctgcaccagcggatcagcgagctcgagaaaggtactggggccagggggagccgtgctgcctgcctgcacctgcttgcccgaccctgcctcggtcccgatccctaacagcccagctctgcactgtgcaagcctcaagccgctccgctacccccaacccctgcaccgctttctcattccccgcaccccttcccaggttctgggcttctagtcggtgtttctatcagggctgggtgccttgggctggggctgtctctgggaaaggggattgcatagtgccccctcccccatccagacacactcacacactcgctggatttttcaagtctgatttgtttaatcctcagtaactttgcacagtggctgtcgctggctcaaaccctccctgcttaagaaagcctgtctctccctggtccccagcctcagcgtacagctgggtgcaggctggggctgggcgctctcgttccccgggccgctgaggctgttaagcaggtttcttcccggctgccatgcccccggtgtcctctcaggatctccagctcctccccacttctgtcctgaacccctaccctgaggttttcttttctgagtgacccaagtcctggcatctttcaaatccctgaggtttctcagtcaccaactcaggccagccagtctatcacccagggcgcctggatgagcgctggaggctctgtcttgaagtcgcagaaatcaaacaaggttgtaaaaggggaggggggggggtgcccggtgcggagcaaggccacgtgaccctgctcagaccgcaaaatgtgccggacagatttaaacagtgccatcttaaggcttgttatgtaactgaaaaacagatcagaaggaaggacctcaggagggagggagagggaaggagcggagattggggaatgaaaaacacccggagaaaggccaggggctgggcccctccctatcccccactgcaggcctcaatgggttggggtagccgctggggtgctgcactgagggggcctgccctgctctgctccctgccagttggtttagaggagggg

SEQ ID NO: 19235 - DNA, 2300 bp, Homo sapien
tgggcggctaggaaggctccacggctgctggggatagagacgcggggccaggctaagggttcccgccccgtctaaacagcctgccctgggcagggcagggctcctctcccgcgcccgcgcgctctcggctgggcacggtccggctccaggcctgacgggcgcggcctccccactggacgcgtgcgggagggcggcgaggccaaagcgctggggccaggagggcacccgcctagcggctccctacgggagttggggcagaagacgccgcgaccccgcgcgggtaatttctcccgaggcgcgttccagcccgtggcgctgccggcgcagaccccgcgtggggaccggcgaggctaacccctcctgcggcccggggtcggcagagcacgcaaggggccgcgggccgcgtgggtttgggcgcgccgtggtgggcaagcggggccagcggagcgggaacccgcacaccctccgagcggagccgaggacaggcccgtgcgggccgcggggtccctctggcgccaggaagcggcggccgaaggagacaacgagaacgcagccccggctcagggaggcttaaaagctgagatgctgaacgcagacggcgggcgctcgggggctggggggcgggtagaggccgccatttctcaaaaaggtctccatcgagccggcctctgctcccgcccgaggggcggacgcccgatcccggcacccgggactgcccgtgggtccctgctggctggggacccccagcccccggctgcgcgcagggaaaggctgcagaacgcagagaccagagaagccgggggcggcggggaggggtcggggggccacggctgtagcccggccccgcagtctcggagcctcagtttccttctctgtaccacgggagcgtggacggagggatttccgaggctttgaccgctctgatagccccggggcggggcggggcggggcggctgcgccagccctggtcctgagcccccagcccggcgccggaacccggaccgcgatctcgggagccgagccccgcggtccagatgaaggcgcgagtgcgcgggtgccgggtggggtgtctgagcgagagcggagcttctcaggtggacgcccccagccacctccgggacccttcctgctggcctttgggcctgagaagtgggcgcggctggacagacgggaaacagccccccacgcacaggtggacacccggggataccgggcgcgcgcggcgcctggcaaggggaagctgctggagacgcgggcggctgctcccgcggggcccccttccgaagcgccgctgcgaacgtccagccccggcgacgccgcctgcccgcgatcgggccggcgccgcggacaggaaaggctcgatcagctaggtctgcctccgagaagtccccagcgccccgcccgcacggggtggggactgacagtcccccggggacggggccgggtccacagagcccgggagctgggggaggggaggcgccgggggccccgacccgtgggaagtccctgtacccaggctgcccggcggcttctcaatagcacacggacatctaagaaacgcggggcggcccggtgacccccgctctggacttagtggcgccgcgaggccccactccgagccgttgaccaccgggcactcgggtgttgacgacctgggtccttgggcacccagcccggctccaaacgaccccggcccaagggtgttcagtgcagccaggagggccgaaccgaattctatctcccggacgcggtggtttcccgcccgcctggagccccgtcggaggttcggggacaccacgcaggtggtccatcctcgagtccggggccggagcccgacttccttccccctgagctctcggagccttcggggcagcagcgccggcccaggcgggggcgggggaggagggggccgcggcagctcccagaagggcgggggggacgcgagcggaggcagccccggtggcgcgctcgtgagacccccgccgcgccgcgggcccgggccgcggacaattaaagcgggattcctcccccgctgacgtcggcggctcgaggcccctcccgcggcggcataaaaggcgcgggctccgcagcgcaggcggcagtgggggcctgatagcgcggcggtgtggaccgcgcggccgaagagcgcggcgcccagagcgcgggccgctcgcggagccacagcccgagccgggtcccagccggagccgagccccagccgagccgagccgggcccggagcgcccggtgcccgcagccatgccggccggccgcgccgcgcgcacctgtgcgctgctcgcc

SEQ ID NO: 19236 - DNA, 2300 bp, Homo sapien
ttttagtttcctgggcgattctgaccacctggtgggtttggacttcaacgtgctcactgacaccttcgtttagaatttcagatacgaaaaatggatttcccaaggtcacacacgttataggtgaggaaactgagtctcacacagattcagtgggctttcccaggtcacagagctagttagggatgaatgggtttagcgttgctgcttttctgtaactgtgacttcctgcaagagctgctggaatgcagctgtctacagccaccggaggtggggagcaaggtgacaaggcagaggacaggagtgattttgttgccttcagatgagaacggggtcttcctaagaccctgcatccctgaagcctctgctggtaactgtgaggatagtctctgccaacagagagggtgccctgagtttcaataggagaattggctccatggggtgtaataaccaaacgaatgtgcggaatgacaatgatttaatcctgtagcctttattaaaggcttgctttgtgctgggtgagaaaggtctgggattgtattcttcattctcattttgaaaggaacacaaatgccatcaagattttgatatggatggccacatgtgtctaagccccggaaaaccatcctgagagatcaagaccatcttggccaggatggtcttgaactcctgacctcatgatccacccacctcagcctcccaaagtgctgggattacaggcgtgcaccaccacgcctggcctcgttttattcttatttatttatttatttatttatttatttttgagatggaatctcactctgtcacccaggctggaatgcagtggtgtaatctcggctcactgcaacctctgcctcccaggttccagctcttctcctgcctcagcctcccgagcagctgagactacagacgcacgccaccacgcccagctaatttttgtatttttattagagacggcgtttcaccatgttggccaggctggtctcgaactcctgaactcgtgatccaccctcctcggcttcccaaagggctaggattataggcgtgagccacggtgccctgcctacatttggttttatagtccaccttacacagttctctatacattgtaaatgagccaaatttcctgaattgaaaaagagagtcacacaagaggcttgcctccacgcacagacatgtagttttagatgtctgcacgtgaagctatatcaaaataagaataaactactgctaccaagaagtgggaaaaaaatttaaaaaggataaactgctcagaaaacgaaacagattaaacaaaaaattgtattagatgaaattttttttcatcgaatcttgctccagactcttcttctgttgcttcagacccttcttcatctgaagagtcttgctctgtctcccaggctggagtgcagtggcacgatcttggcccactgcaacctccgcctcccgggttcaagcaattctcctgcctcagcctcctgagtagctgggattacaggcgcgcaccaccacgcccagctaatttgtgtatttttagtagggacggggtttcaccatgttggccaggctggtctcgatctcttgacctcgtgatctgcccgcttcggcctcccaaagtgctgggattacaggcgtgagccacggcgcccggcctttcacttggttctctatgaaaaaattaaagagaaaatctgattgacactgtggaggacactacactccaaaaaaaaaagtactatattttctaatattatcagtgctttttaatattttctaatattatcagtgaagcttttgccgctttttcaaaatctggaagaaacaaggcggttgattcctttaatttcaggagcatgtaacttcatttataatgacaatgtttttgaaaaaataaattaaaccgacagtttcatttgtaggattgactttaataacacgcctctactgaacaaatggcgattaactggggaaaacggaattatggtaaccgaggtaacggggtcggggactctttctccttcgctgcatgctgggtggcggggagagaccgctctgaggaggtttggtctgtcggccacgccgtaggccgcggtgcattctgggtcctggcaatatggcgtcctccttgatgggctgatgagatgagtttcactgtagctccaaaccagagggcaaagctcccatgacccaataagcccacattgtccctttcctccgtggttccgtgtcgcccgtttctcaggactcgttctcaggcaggagagagcctcggggctgaaggccaggaccagccaggccgcgcg

SEQ ID NO: 19237 - DNA, 2300 bp, Homo sapien
tagaatagcgcttggcccacactgggcactcagctgacccctgctggcttggctaatgagcagagtaaaaacactcctccctggcagtgtgggggccttccgagtggagggtggtgctggtgtgggggccctccaggtggagggcagtgcaggaggccatggcaggcagtggcagtgcttggactaaggtggtagatgttggcaaggcaattgtttgcatctggggttcgttgtgaaggaagagtgattcgctctggatcagatggaggacttaggcaaaaggagttaaaggcaacaccagtgttttggcctgggtggaatggagcagctgtctcccgagccaggaggaccatgaggctggagggtggatggaggtcttggggtgcaggacacaagagctctgctcaggcaatgtggggtgtggggtcctatcagagatgtttgttcagcatctcctgtaaattaggaagggtgacagggcatacagcagcacgcaagtggacaaaccctggctctactttcctgagaatgcatcagaaggtggtcggtgtcatcctagaacagacaatggctgaagccacgggatggtgacgagcccccatgtggttcgtgtggctggagaggagaggccagtcgaggcctgcgttcggtggtgtgtgtagagtctgggaaaaggagaggcactgacagaccagaccagagaagtagccaggcagttggagggtaaccaggcactcgtggcatcaggaagtcaggaaaagcctcaggaaagccttctagaagtagggacagttagctgattgctgtgctgttgagcggctcacacgaggaggactgaggatggaccgttgtatttgtgcacacggggccattgctggatttaacaaaagcagtgtcaacgcagggtggtgggctctcatgtgattctaaactgttcaagagagggtgggcgatgccatgtggaagctcctgagggaggtttgttttcgtcacatggacattatgagagcatgtgtttgtgctaatgggagtaacctggcagagagggaaaagctgatgtgtgggagggagagagagctcctgagggcggcccttaagtaggtgtgaagggaacaggatccattacacaaggggaggagctggctggaggcggagcatcgacggtggtcattccagaaggggatggcagcacatgcatgcagaggccaggtttggaggaaggatgcagacgcacagcacaatcaagtttaggaggagcaggtacacacacacacacacgtatataagcacatgcacatacagacatgtacacatacacatgcacatagacaacacatgcacacatgtacacgtatactcacctacatttacatacatgtatgcacacacatagacatatatgcatatagacatgcatagatgccacacacatacacacgcacatatacatacatgtccacacatataaacacatgcacatacacatacagccatatacacagagacacacatagacaccatagacacacccacacacatacacatgcatgtgcgcacacatacatgcacatatagacacgcacatgtatacatgtgcatacacacatgcacacgcctatatacacatatatacatgcccacctatacatacataaacatacacatatacatgtgcacacagaaacatggacatatacacacatgcacacatacacacaggtacatgctcatacatgcacatctacacactcacctatacacacacacacacacagcttttggtgccatgccgcagcacattcctagtgcttcacatatgttcctttctaattggtgtttgttttagaaggtggagtgagtacacgtgtctggatccagccttattagattgtctttgcgcactgggaataacacccactttatgctcagctcttactagtgtctccagctttccctctcctccttgttaacagaattggaacccttcctgtcttcccgtctctctcctgaaattagccaaggctctctctcttatgactcagttcattagagaagtaagcagaaacacagcagctgatgatgaacaaaatgtttccgggggtgaaggcacccatctggcagggggcagggcgctcttgcaggttccgccgtgcagagaagaagccacaaggaccgagggaggcctgaaggagatgtctaacctgagccgtagaacgtaagaagttgccagcataaagacaggtaggaaaggcatgtcagtgacagaggcaggagaacacgtgacccacttgtgtggggag

SEQ ID NO: 19238 - DNA, 2300 bp, Homo sapien
aaaggtgtaataaaattgctaaatcaactcaaaagatggtaagggaggagaaaaaagaaaagttaaaaaaaaaaggggcttggccgggcacagtggctcatgcctgtaaccccagccctttgggaagccaaggtgggcggatcacctgaggtcaggagttcaagaccagcctggccaacatggtgaaaccctgtctgtactaaaaatacaaaaaattagccaggtgtggtggtgtgtgcctgtaatcccagctacttggaagtctgacgcaggagaatcacttgaacctgggaggtggaggttgcagtgagcttgagatcgtgctattgcactccagcctaggccacaagagtgagactccgttccccccgctccaaaaaaaagggtggtggggtggctagaataaaaagcaacaggaaaaaaaaaggatgaagcaagtaggaggcagacttaaacccaaatatatcaattactacactaaatgtaaacaaactaaatactttaattaaaaccaaaaatgttctgtctctattttaaaacaaaactaaataaaagctaactatattgccaaaaagagatctaccttatatacatatggataaaaaagatgcattctgcaaacactaaccaagagacagttgttcagctacgatactttaaaaatgtggactctaaggcaaaaggcattaccagagataaagggtgacatatcttgatgataaaaggtttgcttcattctcccaagaagggtgagttggtacggttaatctggccttcttcagttctgagggttaatgcatgtggtcaaaagggaaatgagtttttaatttaaagtaaaatgtaaaaacttgtcaaaattatttcttcaacaagaaaagaagaggctgttaagatatatgtataagcaaaagagaatttaaaaaaaagaaaaaatcaaagaaaaaagatatacgtataagcaatattcctaattaaaaatgggacagattataggaaaccataatatggcacaaggctgatgatggtagagcagggatttggggcaaggttgttcttggaaaacgactaagtattcacaacactgatggtaactaaagtataggcaattaaggtggtcagtgtgtctaggtccccaattaacataagagtagagatcatttaaataagaagctttccaacttgtttgatcatgagccctaggaatatttttggtgaccagacaaacacacatacacaaccacatataaagatacatattcacaggttcgtaccctgtccatgcctccaaacaacagaaacaaaaaagcaaaccaaaaaagagatacatgttcaagcaacaggaccacggaacacttatcttactatgaaaacaatgacattttcttcttttttaaaatgctggctgtgacccacctaactggtttcatagccactaatcaaccatgacttgaactttgaaaaacattgacttaaaggaagcagttgttaatttctccaggaggatatactggctcagggttaccgaaatggtttggagtgaacatggcacccgagagacaatagaaactagaaagttccataattccacccctgcataagctgactggctttttaaaaaccaccagaggcggcttgttttttaatgatttttaaaaatctctgctcggtttctaaatcacatggttcatatgcacagtgctgccatctctttggatcctgtccttccgtatttaatggttcccctagtacagacttctgctcatctttacttgtgaagtaaatgtagggttgaactcgggaggaagtttccctgacttaacagtaagcagagttaatattacaggagataattcaccttttacctgacttactatagaacgacaaattattgccccttcctggagtcagtcaacaacaacaatggacaggaatggccactctggaggctgcaaacaaaaaccacagggagagatggggccacagcgaggcgaggggtaattccccattttcttattcaacatgttgatgacataatgaaaagcagattcttttttattaaacaggcagattccaaagcccatcagaaagacatctgagcccatgtttatttttgaagcacttctgcaaaacagattttctgtgggcttcccggtgtcagggccgaccttcagacagacctttcctgagaggcagctgcaggagtcacatgggagaagccacctccaagcagagtctcctgagaagctgctgaaaggcctgccacatcgagaaaagcagctcctaaaataaggggaagcagg

SEQ ID NO: 19239 - DNA, 2300 bp, Homo sapien
gctccgtgagcgtctgagcatgtgtgggttttgctaaaggcttcatttcaactccagaagttttctgtcttccccgtcacctcccactgtttttccagacattttgagaaggcacatataaagttcacagtcgaaaacttgcttttctctttttagacttttgaagggatcatatgtctggcaggttctgtgggatggttgtatgtgtctagggctggccgaatagtttaataccaaaacaaaacaagctcagaaagaacatgtattactcttgtcatttaaaaaataggaacgttgcttaaagacaagttatggttccattttcttgctatttgcgttttgaaggaaaggacaatctgggaagcgtgggtgttacatgagtgaagacttcaggatcgttttgttttccttggtgttctgttggctgaattgcaggttcaaggttcctaaattctaagtgaataattaaaagcatgagacattgcaggctccacgcggatgcggacctgaaggacagggttctgtctggctggagcgcagcctgggatgggccggcgctcagggaatggcttgtgcctgcgggatcagtgggcaccttcatggagcagctggccccatcctcctgacacagatgaggttgccccagcaccatcaggccccttctgaacgcgcacagcctctggagtccagaacccagcgggacccgcattccccccactgagcagtgtactcagaacaaaaccaccccgaagcacctgggccctcgcgaggtcatgtcggtggccgggcagcgcacgccctgccttgcgtggtttctcacggctgctcactaacgccgacagctggtctccagatccacagaaaaccctgctttaaaaaataaaagcaaaacctcttgcctcctgaatgccagggctcaagctggtacaaatctttttctgtggtagaatttcaagccctgcaggtgtctgtggcaggaggctctcagagcccagggtcttggcttcatccacagacggctgggttgaaggggtggtttggagcctcatgctgcccactaggctgtgccagctgtgcaccaccctgctccccaccctccgggagcagccatccccttcccctgccagtgcgcccctccccagggcaggtttcagccatgtctgccctggagatgaaggttccccgtccatgcagtgcacccagcaccacctgcgtgcgcccgtgggaaaggatgaccacagcccctcggccaggaggatgttaagggcggtcttgagttccaggccccgtcacagtccaggcagcagagcccattttgccactggagagagcccaagccccctgcagtcattctctgacagtttctgtggcctcctgaagcacacgggggtgtaaacagtggcctgcgtggaggcctcaggctgctggtggctttccaccccgtgcccaccggccaggtcccgggtggatgaagcactccctgaccctccgtgaatgccacatcgcccggctccggaaagagcatggctggtggattcttcccgggcctcaactcgcagcctctgacccgagagctgaggtgttggggagaattggactcaaggctgggacagtgtggaggcccagcctcaggcaagggggaggacactgaggccgccaggagccgcccctctggcagggaaggtgaggagggtgggccgtcatccatctcagaggcttcaggccctgacccctcaggagcctcaggcagagcttcctccccagacatcccggctcacacggccacgccagggctagcccagtggatgcatgtccaagagtaaagaataccacttgagcttcaggattgcctttgcgggggatccagctggggccttccattggtgttggtgcttcctcggccaaaggccttttctgtgattctgaagcggctccacgccagcctctgcttcgtgtggcggcctccgcggagcacgtcccgtctgaccttcacacccccattcctttgcccctaggccaccgtgaacgcccggccgcagcgcgtcctggacacctcctccctcacgcagtcggcccccgccagccccaccaacaagggcgtgcacatccaccaggcggggtaagtgccgcccgctcagcctgcaggtccgtggtggtgaccggggccccacgggctgagctgtccctgagccggcctccccatcctcctccttccccgccctgtcttggcttcgtctcctcccccctctccagcgggcgttctttccctctccctcccggacaccccggtacccgcctga

SEQ ID NO: 19240 - DNA, 2300 bp, Homo sapien
agtctttccaccgcgggttttttcttattactgttctatgttatttaccatttgtcatttcttttctaataagctcaggattgtcgtcaagtgaaactggttgctaagaatccacagtctatcccatttgccgttgcgggattatttctaaatcagaaaatgtgcggagggagccatttgacaccttttgtggttactgtttccgggtttggatgtcttttttgctgtgttgttgctgttttatcgagtgtggttttgtgacttttaagaagaaaaagaaggaagcagagcaatcaaatgctaggaactgagccacagccacccatgagcacggggtcagacatgaggtttggggcttgcctgtttctgttttgtaatcagagctgacacaaagcattcgaggaagagacacaaagaatgctctgtaagcatttgcacatgataaccacctacaacgaccgcctaaaactccacacggagaaaccgttttctttctccgccacatttacgtgcaaggacgcaaacacggccatgcgccatagtctttattcccatttcttctatcagagaaagcgactttttaataactaatgcaggctctctttttcctttgtcgagacagagttgcttttagccaaaaggaattagggttcttaccttgtttatttcatttattttatattttgggtcttcacaagtcttagtttcttagcaaggaacagaattagccagattgactggacggcatgtatgcttaaggaaatgcatctgcgtaacccagacaagtggccatcctcccgcggaaagtcaattaaatcctagttagtatttgccaagtgtggacctctcctagacgctgaacgtgcacaccccaacccacatgtgcgtgcacacacacagacacatgcacgcactcgcacacacgcacacacacgcatgcacgcaaaggccctgaagtgaatgaagacctttgctcagggaagagagggcagcagcatgtctagcgtctgcatatttcaagtgaaaataaacttggtctttctgaagctgtctcattagggaaggcactgaagttctcacgagttagtttaaccccagccaggcttgcagctcagcaccctcctagctcttccaccatcaggagcccagtggcaccccctctgctgcccaggaaggtcccacactctctcggggcccggcctggcctctcatgaggctgtcttccttctgtctcgtaagctccctcatcttccagccagctgcctggttccctttggcattagagagagaataaaggcagtgtctcctcaagcgcacctgcctcctgattgtgttttcagtgtttgaagcggcattcggtgcccccctgccctgctgctcagtgctgacctcagtgccccccattccctggggaggcgtttcccaaggccctggtccccatcatacacctgtcagcctcacaggccactcactcaagggtctcagagcccccacactagtgaacacaggcgtggagagcgcctctcccagctccggggagggaccagcgatgtgttttgtagcagacacaggacccacaacagcccgtgcctctggtgcactggccagacgagaagcccaaagccttcagcctttgagaaagaggtgccttcatctgaaaataactacagccaaccctccatgtccacaggtgctgcatccgcagattcaaccaattttggataaaaaaacaaatgtaaataacaaaaataaatttaaaataacaatacaacaagaaacaatccaaattttaaaaatacggcatagcagctatttacacagcgttgacactgtgtcgggtatggcgggcaagctagcgagggtttgaggtgtgccggaggatgtgttctgcttgtacgcagatgccacaccctttcgtattggggactgagccgcgcaggttttgctatccgaggggtcctagaacccataccccattgataccaagagacaaccctgtttcatcgctgggcttaactgggtgttttctgttgttgaagatcccagaagagcacgacctggagagtcagatccgcaaggagcgggagtggcggttcctgcgaaacagccgtgtcaggaggcaggcccagcaagtcattcagaagggtaagggcacccgcacagccagccaggggctcattccgggggtggggcctggggcgagggtcccctgtgagcaggccccccgcggcccacgcacaaccttctccagccatccactgtcccacgacagacccgccccgcaccccacctcccttgca

SEQ ID NO: 19241 - DNA, 2300 bp, Homo sapien
ctgctgacggccacaggtgagcggggtttgcacagccaggattggaagccagggtctggaggagtggcggggagggtgtgtgatcctgagatgtgtttgtacatctgtcttacagaaagccctgctcacacgcgagggccactgtcattcagaagtggggaggtttatgagggaaagggcttcagcagcagagacaggaaagcaaagatgaccccatccttgagggttccagggacttgtcttctcatctcagtcctctagcccttccagcaccaggaaaagcctctgacagcctctgtccttaaacccctgtgagagacccggtgggtcccacgtgacacccgagaatcagggaaggatgccccaagccacaacacgtgccaggtcctccccggccagggtctcctggcatcgctggctcatttgccagttgctgtccccactgggagctggcactcaccctcctccagtcccgtcctgcacctgaaaggacatcgttgaccatcatggtcgctgaccagtggttcattgccgtagtgggtctcactcaggttttggttttcttgggttttcggggggttttttggaggggtccgaaatgtcttagtttcatcttcactttggaacaatcgtttgtttccatgtcagttaccccacgttgacagtcattttcctttagcgctttgaaaacacgtgtccattgcctgttgctgatgagaagtcgctgtcagtcccactgcacttcctgtggagactagagagcgctgggcgggaggcaggcgggggaggccagcacggctgagagaagtgaaggccgacacccggatcccacccagcctgtccctgtcggccgcagcccctggacacctgagcctctgagagtgtcgagtcggttgtgctgacaagtgcgcagccctctcaacgcggttgcgggctcctggtgaggggcgtggccatggggacgtgtcctcgtgcagcccctcctccgagcgctgccccctcaggaccaagtagcatcaaccgatgtcgaaagcccgtctttgtccctgtagctgtcagacgtgaccgggaggagatgcatagtcggggcaggggccggtgggggcaagggaccagccaggctcagccagcggtttcggagagaccagatgtgagcatctcccaacaccagagggagagggcagttccttggctgagagagcgagcactggagcagggccagggtcctttgcagaacgggctccagacagcagtagaagggctccagctccaaaaccaggaacgtttggtgtatgcgatggaaagcagagagcgggacaggcaggtgggtggaggtgaggccgtcgtccaccagggcaatcagctggggcttgaagagcgcctgagggtcacgcaggaggggctggtgaggccagggggtgcggatgtggttcccggaaggctcagagtgcccgcatgctttccccacacccaggccgacctccctgcctgtctgctggaggatgcagagggccgtttcctccattctaagccctgaagagcagggcagtgcgtccctgcccacgtcttaggcggagagcccagacgtctgcattgtcccttcaagtcaaggctactctctctgtggagcacagagaggaatggggcggagggtgctggtgtcctctgtgaagctggcctttcgttctgctccctggcacaggctggctcaccagagggtaaaacgcagccccacccacccaaccgagcttcacccgcctgcctccctccagggaacccgatgccctggagctggagggaggaagggcagccccggctcccagggcagccaaacctcagagttgagctctgtggccagggtgggacaggattgtggtctcccatcccctgggctgcgactcctcctgctggctcgcccagatatggatctgaggacagagtccagtcggtgggcacccagagatctggaaccacgggtagtgagtcaggctggccgcccagggtcactgcagcacgtctgccaggaagggctcttaccaccacgcacagagcacaggccaggccatcgaggggcctggttcacatcctttcctctctccctccccagacgatggtgccatcagggtctggaagaattttgctgatttggaaaagaacccagagatggtgaccgcgtggcaggggctctcggacatgctgccaacgacgcgaggtgggtccgcccggctcctccccagagcagaatgtgttcccggggctgcggacgcactcggaattccaaggcccttctggggctgtct

SEQ ID NO: 19242 - DNA, 2300 bp, Homo sapien
agtagtgtcttctctctgcaaattaaggaatgtcagaaatcagtagggtgaccaattgtaaattagaatgattaattatttggaggcgtttttttttttcttttgagatggggtctcactctgtcaccctgcgtcacccaggctggagtgcagtcgtgcaatcacagctcactgcagcctcaacctcctggtccaagtgatcctcccacctcaccccccccccccaccaccaagtagctgggactacaggcatgcacccacacgcctggctaatttttttaactttttgtagaaacaggggtctcagtatttgcccaagctggtctcgaattcctggctccggcaatcttcctgccttggcctcccaaagcactgggattataggtgtgagccgctacagaagacagaagatttttgtttctttttttttttttttttttttttgagacagagtcttgccttgtcgcccaggctggagtgcagtggcgcgatctcggctcactgcaagctccgcctcctgggttcatgccattcttctgcctcagcctcccgagtagctgggactacaagcgcccaccaccacgcccagctaattttttttttgtatttttagtggagacggcgtttcacgtgttagccagaatggtctctatctcctgacctcgtgatccgcccacctcagcctcccaaagtgctgggattacaggcgtgagccactgcgcccggccagaagcctctttgcttcttaaagcatctgctattttcagttttgacaaaaagcggagtacattggttttgcccaagacagcctggaaaagtggtagagacctaagcaggccgcgctcagcagaaatctaactgcattgacttcatttggagcagaggcgagaccacagatactgtgaggggcagcgcctgaggtggctttagagccagtattcccttcctctgggtccccagggagaggtgtggcacagaggccatacccagcctctctcccgggcaggccatctggtgtcaggagggatggctcagccctgctgccgtagagggcggtgtggagcaggcccagcagaggggaggcctgggcaccctcagctgctcgaagctgctgtggttgctctgggcagcagcagcccgagaacctggcccaggccttcccgtgtgggcagcctcccctctgacgtgaccgtggatccctcgaggcaccagcagctttcatggcaccttctttggggtgggggggtcttgcacctgtctggagctgtggctccacacgagacgtagccctcagggcacagcgtggacaccctgatcctcagggtctggtcaccagtgggggcttagaggcccaggtggcctgcggggcaggtgctgttcctgcagaggtgggtggaggcacagagcgcagcaggtgctcccagagccggctctgcccctcgcaggggtctggccccatcatccccacgcctgtgtttcctcctggagtgcacaacccagcaccgcccatcgtgcgtggaaagcgctctccctctcgtggcccttttcctcctgcgtccctggcaggtgccatcgcccccgcccccgcttctccagcacttagagcccccgagggagccagatgacccctcctggactcatcccatagctcattagaagttctgagacgcagccagtgaggagtccttgccaaaatgtgctttgctttcctttttaggaaacagagagaggttggaagtttaattggcactgacagccagtccttcccagaggcgtttgcaggcctccgctcggggtggggctggcctctgcctcactggctgggtcccaggcgcctcagggcctcagggctgtccctccagggccaagggataagggcgtgactcattgtcctgccagcccctgcctctccctgggactcctgggctccccaggcctttgatgcttccctggatagagagaaaggcccctgcagccagggagggtgatccccacagccaggcaggcagcaagaggggtcctggcgctgcaggacagcagggagggtggctcggtgccccggtcttcaccgggctgcctgtgtttggctctaggacatccctacgggcgcagacagctgtgtgacgagtctgtcctgtgattcccaccgctcactcatcgtggctggcctcggtgacggctccatccgcgtctacgacagaaggatggcactcagcgaatggtaccttgaccctgtcctctccctccccgagtgctggcagggtaccttccaggtggtagggccgtgtcactgccatttg

SEQ ID NO: 19243 - DNA, 2300 bp, Homo sapien
tcagggtctggtcaccagtgggggcttagaggcccaggtggcctgcggggcaggtgctgttcctgcagaggtgggtggaggcacagagcgcagcaggtgctcccagagccggctctgcccctcgcaggggtctggccccatcatccccacgcctgtgtttcctcctggagtgcacaacccagcaccgcccatcgtgcgtggaaagcgctctccctctcgtggcccttttcctcctgcgtccctggcaggtgccatcgcccccgcccccgcttctccagcacttagagcccccgagggagccagatgacccctcctggactcatcccatagctcattagaagttctgagacgcagccagtgaggagtccttgccaaaatgtgctttgctttcctttttaggaaacagagagaggttggaagtttaattggcactgacagccagtccttcccagaggcgtttgcaggcctccgctcggggtggggctggcctctgcctcactggctgggtcccaggcgcctcagggcctcagggctgtccctccagggccaagggataagggcgtgactcattgtcctgccagcccctgcctctccctgggactcctgggctccccaggcctttgatgcttccctggatagagagaaaggcccctgcagccagggagggtgatccccacagccaggcaggcagcaagaggggtcctggcgctgcaggacagcagggagggtggctcggtgccccggtcttcaccgggctgcctgtgtttggctctaggacatccctacgggcgcagacagctgtgtgacgagtctgtcctgtgattcccaccgctcactcatcgtggctggcctcggtgacggctccatccgcgtctacgacagaaggatggcactcagcgaatggtaccttgaccctgtcctctccctccccgagtgctggcagggtaccttccaggtggtagggccgtgtcactgccatttggttgggtccaggtttctcagtgagatgcaaagcttccccaggagcctgcagtggcgtatttaggccagtcctgggctccccaaagccgccaggcccgtcccactgaggcccatcccacaaaggtctgccccacagaggtccaccccacagcctatggaggagcacaggggacaggccatgtgggatgagccagtggactggaggcagaggctgtcggggtgaggcagggccgcagccaggcacctgccacctctgagctcacctgaacagaatactgccactgcctgccacctcctgggtcatgcagcaagtgtctggggagggatgtctgagggcacacacgtgggcacagcagccctgggcactgcctccactgagcacccctgtgggcaggtgctgtccgcgtctggcagaggacagggtacacgcatgggcacagcagccctgggcactgcctccactgagcacccctgtgggcaggtgctgtccatgtctggcaggggacagggcacacgcgtgggcacagcagccccgggcactgcctctgctgagcacccccgtgggcaggtgctgtccgggcctagcaggggacagtccgtcttggcccacacggctcatgcagcagaagtaaatttcacccagcacagagcgaggattcccagaaggtccttgtgcctccagcttcatcagctttaggtctgggattctcattcctgaccctccagtctgcacagatcggggagacacaatgaggagttttgagggaagcaaagcaaagggtgggcagggcctgggagcgctgcgatggccgcctggcccccgtctctgggcagcttccatgtggctcagacagtcctccagcggcctgacggtgacctagggcccagccctgagccagcctggggaggacacagggggtctctgctggagcaggtcacctggagggggctctgaccctgcgtgagcactagcccctcgtggggagcggacgggcgagggcctgcggacccgctggcacaggcagacctgggcagctcccggtgagagccccgaagggtggggacgtccttcagggaagccccacgctgagcgtgccccctcccctacagccgcgtcatgacgtaccgggagcacacagcctgggtggtgaaggcctccctgcagaagcgtcccgacggccacatcgtgagtgtgaggtgaggagcgccgatatttagcagccgttctgctgtaaaaacattattttcccctccatttaaaatacgtccttggtatttaaacagctggaaggggatggcatttcgggcagtaattaact

SEQ ID NO: 19244 - DNA, 2300 bp, Homo sapien
tgccgggcatggtggcgggcgcctgtagtcccagctactcaggaagctgaggcaggagaatggcgtgaacccgggagtggagcttgcagtgagcggaggtcgcgccactgcactccaacctgggcgacagagtgagactccgtctcaaaaaaataaaaaaacccaaaaaaccacccatgtgggtcccactttgcctttgattgtggttgttggcctctgtcaccttccctgcagagcctgggggtggtcagtctcctcccttttttttttttttgagacagagtcttgctctgtcgcccaggctggagtgcagcggcgcgatctcggttcactgcaagctccacctcctgggttcacaccattctcctgcctcagtctcctgagtagctgggactacaggtgcccgccaccatgcccggctaatttttttttttttttgtatttttagtagagatgggatttcaccgtgttagccaggatggtctctatctcctgacctcgggatccgcctgcctcggcctcccaaagtgctgggattacaggcatgagccactgcacccggcacggtctcctccctttacaggctgtgaggatgggcatcctgcacgtggtcagggctttcatagccagttgggttgacagcagtgcctcatctgggtcttccagttaggggagaagctgggctcagagtatgaagatgggggcggctgtgttaccgcccacaggcacctcctcctgcaaggcaggtcatgccactgtaccagcgacaaactctgtggctctcctgcatccagcccctccttgctgctatggttgggagcctttctgggagcccttaagctcttgtctcccacgtggatggggtgcgcagcccaggaaggctctgctggtccagatccccatgcccacctgggcctctgctccatgcaggtggtggctgctcccgctccacagtctgagtttgctgccttttcttctttctttttctaacacagagggcatggagggggttgtggttggtaaacccagtgtgccttgctcttggactccctggcaccttggatcccgggctgcttgctgggggcctgtgacaggccctgtgctgccctggggctggtgctttcagggctggctcccccatcgctgggtttggaggagcccctggctacagggtggaacctggttggcccccagcagctgctgaaggtggaagcagctggcagttgggggctggttctctgtgggggcaaactgaccacggtgagccaggcaggggccaggactggggagcagttggtgagggtgtgcgggcagctctctgggcctccccctgctgggaggtgagcctgggaccccatgtggggagcccccagcccccagctcctgccagccctgggttggaggctgcggagcttcccggccgcgcagcttgtcctccctggagggccctgggggcttacaccctcaggcaaagccttcccatccacccctccagctcgcctgcggtggatggtggatgaccctggagggcagccgggagagcctccaaggggaggccagaggggaacccacagctctgagtactcctgcgcctccccctgcagatgcggctgtggttctgtacctcaccaggctgtggggatctgagtgggggtcctggggtctgggcagttcttctgacctcatcagatggcatctgccctccgatgctgagccgtgggtgacatcagccttctgggcccaggaggccacctggcaggatggctcaagcagccttgggcagtgaccttggtggctgtcgctggtggccatgagccctgcatgagtgtccctggcctcagcactgggggctcctcacttcctggcccctggaagcaaactcagagcatgcctgtggggccacaggctgtttggaggacgctgcagtgatggccttctggggagtgagggctgggtttcggatagggaggtgggagatggggggtcctgaactgcctttcccgccacgtcaggacccagggccggggacagcgggcgtctggggggctgcatggacgatgggggaggatgtgcaggctggcgggggagggggtggagcgcatgggctgcctggccctgtcttggggacatgaagcctggtttgccaagtgggaaccgagggacatgtgctccaagagacacatccagggactgcaatcaatttccaaagggccttttctcctttcagcgatgctgttaagaaaggcaatgaatcatgtgccacaagaatcttgagagaacccacgagcttgggagctggt

SEQ ID NO: 19245 - DNA, 2300 bp, Homo sapien
agtggacagccacggcctctcacctgtttccaggctgagccaattcacagacctggagcccttgagttgggggccaggttccttgagggagacccctgaagcattgctgcaaggaatacagcagcaaagccacgggaagagtcccccaaagggacctgtacctgtttaccaaagtaactgtgtaacagagggagggaaatactcaagcgtctcaggaatgacaagacactggcatcaaatggattccaattccttttctttttctttttctttttttggagacagagtatcacactgtcgcccaggctggagtacagtggtgtgatctcagctcactgcaacctccacctcccaagttcaagcgattctcctgcctcagcctcccaagtagctgcgattacaggtgcatgccaccatgccccactaacttttgtagttttgtagagacacggtccactatgtgaggccaggctgatgtcgaactcctgacctcaggtgatccacccacctcagcctcccaaagtgctggtattacaggcgtgagccaccacacctggccagatggagtctgctagagtctcggggattttatagggacaggatgggggcgtggcaggccagggtggtctttggaaatgcaacatttgggcaggaaaacaaaaatccctgtcctcacctaggtttgtgggcacaggcggtggggggatccctagccaaggatcacgccttcctctacccagctcttccttcccccttcatgaggagcagggagtagcaagtcttttttttttttttcctcaacgtccccatggacaccaaggaaaaaagtacttcagatgtcttggtgagacaaatcagagggtgggagatgaaccccacaaaaattcaggggccccctcacctcagtgaaggttctggagtccagaggtttggaacaggtgataattattctccttttgatgttatttgttatattttttgtagagacgggggtcttgctatgttgccaggctggtcttgaactcctggcctcaagccatcctcagctgagtgcttttctttgacacttagtgaatgctcaggaaccacagtcaggatactcaggcgggaaccggggtggcttctcccttttaccctttatccccattcatgtgtttcttagccccccagggaagaatgcttctgtgggggacgcagccacgattccttggaaggagaagctgagcccagccatgctggtctcctcctggcactgatctacagacagggagcagcgcagtggaagagggaagatcccagggctgaaaggctgggtggagggcgctgctggtcgcatttcagggaacattttaaagtgcaaagcgggccgggtgcggcggctcacgcctgtcatcccagcactttgggagcccgaggtgggtggatcagaaggtcaggagctcaaggccagcctggccaatatggtgaaaccccgtctctactaacaaacattagccgggtgtggcagcaggcacctgtagtcccagctactcaggaggctgaagcaggaaaatcacttgaacccgggaggcagagtttgtagtgagccgagatagcgcccctgcactccaccctgggcgacagagcaggactccatctaaaaaaaaaaaaaaaaaaaaaagtgcaaaacgttggatatcacatcattaatgcggcattttgtgttcagagccagtgggacagtgattcctgcacaagattcctgaaagcctggggagactgaattatgttaatctaaaaggatcccacctaattaggagataagaaatttttgccttcacctgcacaggaagggtgcacggaaacacgtcatttagaacatcccgggcccgaacatcgcgggccctaacatccaggtatccgtgccacttctccgtaccggtccaaggaggccgcggtgttcgcggcggtcgccgagaccggcgggctgtggtttcgaacccgcggcaacggcgcgcggccggaggcggcgctcggccttcgcgttccgcggcgcctggcccggcgcggccgccgtagcgggaggacccgagctacggtggccgcggggcggcggtggcgattggacttggtgggtcccgggccaggggcgggcgccgccatgggtaacctgttcggccgcaagaagcagagccgcgtcacggagcaggacaaggccatcctggtgagggcccgggcccggggtcagggctggggccgggacaggcgacggggccggggcgggcggcggggccggaagagccccgcgccctcggcccccc

SEQ ID NO: 19246 - DNA, 2300 bp, Homo sapien
agcctgactactactcagccgtgttctgtgtaccagtgttcctccctggacctcgcaagagtctgcccggacaacccagagtgaccttgagctgattcccaactctggcattggtgtgtcctggctggccggctcctggttatgtcgggctggtggcagcccctcctgccagcaaggtacagagcccagtgctggccggagcctgaccaacctgatctcctaatctaggttggggacacaggagcatgacaatcacaagtcaaaattaggtgtggaacctcagggcggagctggtgtcctgccagagatgcctgggggccggcgggaggacttggaggaggagaggctgcagagggcagggacacagagtagggggccacacaaagggtggctcagagtggaggaggggcataaaggaagagccatacataatcagcagctttgaagggtgttggagcctgccagccacagaggacttcccagggagggaatggggcatagtgtggaagtggtgccctcattttcagaggctgcagacacttcgctggaaggcacacttgccacggggcaggcagtgtggcagtcagaaatgtgtgggatggaatgggcgcggtggctcacgcctgtaatcccagcactttgggaggccgaggcgggcggatcatgatgtcaagagattgagaccatcctggccaacttgacgaaaccccgtctctactaaaaatacaaaaattagctgggcatggtggaacgcacctgtagtcccagctactcgggaggctgaggcaggagaatcgcttgaacctgggaggcggaggttacagtgagcagagatcatgccactgcactccagcctggcaacagagcgagactctttcaaaaaagaaatgcgtgggacagaatggcgggtccatcctggacgggatggggcccctgacccctgtgtgcctgcgctctgccagctcctgcgcagagcaggtactcgggggagggaggatggtttgctccaaactcaggtcccaactggtgtctgacttggccgcagaatcctttgggtcctggtttcttcatacatgcaatattgggggtttggccttgggggtctcttccagctgagtccacttctgtccccagcctgtaaactgtctgcacctattgactcttgatggtctctgagggactcaactttaggaactctgtccgttttgtgctgctgtcacagagtgcttgagactgggtaatttataatgaacaatcaactggctcacggtactggacaggtgccagcatctggcgagggccgtccagctgcgtcatcacatggtggaaggcaggaggggagccaccccacccttttataaccaatcccagccgttagggcgcagccttcatggcctaaccaccctctgaaggtcccactcgatactgttaaaaggcaatgaaatttcaacaggttttggaggggacaaacattcaaaccatggcagaaagtgtggaaggagcaataaccacactgaacagaatgaccatggtaattaaaccccaagtgaaaccatgacctgttttacatcatcctggagagaacagtgcagctccagtacttgctgagctgcagagacagggtccatccaactcgacagcatccagcagccactccaggccgccagcagacagatgttgggagcagcactgatagtttgggttttcgtttgtttttttaagacagggtctcacttgcccaggctggagtgcagtggtgtgattatggctcactgcagcctggaactcgggctcaagcgatcctcccacctcagcctcctgagtagctgggactacaggtgtgtgccaccaaatccagctaatttttgttactttttgtagagatggggtctcactatgttgcccaggctaatagatttttttaaatgatcatacaggacggctgggtgcagtggttcacgcctgtaatcccagcactttgggaatcccagtactttgggaggccgaggcgggcaaatcacctgaggtcaggagtttgagaccagcctgaccaacatggagaaaccccgtctctactaaaagtacaaaattagccgggcgtggtggcgcatgtctgtaatcccagctactcgggaagctgaggcaggagaatcgcttgaacccaggaagcggaggttgcagtgagccgagatcgcgccactgcactccaacctgggcaacaatacaagactccatctgaaaaaaaaaagatcacacaggaaaacagaagttcgattttacgtcgtacactgctgtaattt

SEQ ID NO: 19247 - DNA, 2300 bp, Homo sapien
gcccgccgggcgggcggcgaccccccggccggcccctcggggcagagaggagaaccctgggggagggggtgctgcaggaggaccctggagagagctcggccctggagtgggggacgacttggagaaggaggatttcgggggagcatcgtgaggagaggacttggagggaggatcctgcagaaggtgaactctggggaggaccccagacaggcagacagcgcttgggggcttggggccgggattctggagaggggaggaccctgggagaggagggttggggaagaggatcttggaggagggccctgggaaggaggatctggagaggggacaggggagtgtcctgctggaaggcctggggacagggcgacccttagggacggggaggaccctcctgccgtcagaagattctcgttggaggcagtttactgagagagagaggtctcgggaaggaagggtcgagggcagtaggaaacgaggggcccggaggactctcatgcggtggaaagccctagggggtgggggaaccttgtaggaggaatggaggagtcagagctgcctccaatttttaggaagggtcctgcttaagggtcctcccaaggggagattctgccggggaagctggccgagttggcacacaggtctcccggtacaattcccgtggagaaatatttacataaattaggctaacatagaggaattatttgttttacgttgtgaaacaccagatctgagcgtttccgtttaatgaaacctctcagtctcccagcctcccatccctgcaaaatcattcattcattcattccttcaacgagtcaggcccctgggggagacgcagttgtgctggctggccggcagatccccagactggcacgggctcaggccgatggaaagaccagggaagtaagattcaggaagcattgcctccctcccaccacagccccgcgcctcctctcctccggctgaatttccttccagctactggccctggctgcttcctttttctttattgtctccagtgtttgggggtagatccctgtgtatttattttctaggattcttttggtggtaaatgacagaaagctcgctcaaactggccctaacaaatgagggcatttacctgaaggtaggagcatctccactgaccctgacccccttcttctaggccagcttcctgctgtgttccctgcacccaccgatctcacacgcagccctaggacagacgtccactggcctgagttgggtctggggccaacacggagcaggtgggggtagagcagctctgctcgcctggaggaaagttgaatggctggaaccaagatgacagatggaggctggcaggcaaacacgggaggcctcctcactccaagaggggagtcagcctggggacagttcttctccaggccctgctgctcccatcagctgcaacacaggagaggtaggcttctccggaaaagctcccacggtcctggatcccgctccaccttctagaagctcccagcgttacttcctgagctggcctgcacatcgttgcgctactcccgtccaaggggggacatattcggtgaccgactcagaacgcagcctgcttcccgggtggccagtggctcagcagtctcggtgcctgagcctgctccctccgcccggcggctgggcaggtggctgaatgcgggctggaggccttccctgagaagacggttatccatgctgtacatggaagtgaccagctcggcacctgaggagacacaccgcggccgatgacaggcgcagagcaggacgtggtgaggtcctcatacctaggaatgcagaacaagggcaagaaactcggtgcccgcctggcatctgccctgcaccagtggcctccaggaagttctccaccaaggatgttccccaggcactctgtgctcgccttcaccagcgtcctgtgaggtctttcacactgatggggaagcctttctaaagggtattagggggcttgggggctgggggtgctgagtaccaagggtcccaggaagagacaggccaggcttatgggctgggcatccagagatcgccctgacgccagctccaggtggagttaggagggcactcttgtcccgacgcatttacagaccactccctcttcttgttcccctcgactctgagagtgtggtggggtagctgtggaacctgactgcttgcctgaaggttgggcagcgtggctagaaattgcggcccagacctgggatctcacccacacctctatgagacgtcctgaaggaaaccatcgactgagcggagaggcttcgccttgcccgcctcct

SEQ ID NO: 19248 - DNA, 2300 bp, Homo sapien
caggaagtaacgctgggagcttctagaaggtggagcgggatccaggaccgtgggagcttttccggagaagcctacctctcctgtgttgcagctgatgggagcagcagggcctggagaagaactgtccccaggctgactcccctcttggagtgaggaggcctcccgtgtttgcctgccagcctccatctgtcatcttggttccagccattcaactttcctccaggcgagcagagctgctctacccccacctgctccgtgttggccccagacccaactcaggccagtggacgtctgtcctagggctgcgtgtgagatcggtgggtgcagggaacacagcaggaagctggcctagaagaagggggtcagggtcagtggagatgctcctaccttcaggtaaatgccctcatttgttagggccagtttgagcgagctttctgtcatttaccaccaaaagaatcctagaaaataaatacacagggatctacccccaaacactggagacaataaagaaaaaggaagcagccagggccagtagctggaaggaaattcagccggaggagaggaggcgcggggctgtggtgggagggaggcaatgcttcctgaatcttacttccctggtctttccatcggcctgagcccgtgccagtctggggatctgccggccagccagcacaactgcgtctcccccaggggcctgactcgttgaaggaatgaatgaatgaatgattttgcagggatgggaggctgggagactgagaggtttcattaaacggaaacgctcagatctggtgtttcacaacgtaaaacaaataattcctctatgttagcctaatttatgtaaatatttctccacgggaattgtaccgggagacctgtgtgccaactcggccagcttccccggcagaatctccccttgggaggacccttaagcaggacccttcctaaaaattggaggcagctctgactcctccattcctcctacaaggttcccccaccccctagggctttccaccgcatgagagtcctccgggcccctcgtttcctactgccctcgacccttccttcccgagacctctctctctcagtaaactgcctccaacgagaatcttctgacggcaggagggtcctccccgtccctaagggtcgccctgtccccaggccttccagcaggacactcccctgtcccctctccagatcctccttcccagggccctcctccaagatcctcttccccaaccctcctctcccagggtcctcccctctccagaatcccggccccaagcccccaagcgctgtctgcctgtctggggtcctccccagagttcaccttctgcaggatcctccctccaagtcctctcctcacgatgctcccccgaaatcctccttctccaagtcgtcccccactccagggccgagctctctccagggtcctcctgcagcaccccctcccccagggttctcctctctgccccgaggggccggccggggggtcgccgcccgcccggcgggcttacctgcgaagcggcggggtcggggcctctcccacctgtaagcccggcccgcggcgtcctgcgtccgagccgctccccgccccgcagcgccaggccgcgacccggcgggccgcccgccccgaagtgccacttcgcgaagtgccgcctccacgcgcgctgccgccggcgccccccgctctcctccccgcaccttctgctccttcttcctgcgccaccccgcccccgcctccccgcccccagcccggctgttgcccgggccccctcaggctgctcccagggccccagcccgcgccgcgcctcccctctcctcccccaggatcgacgccgccgcagaccaatcgctgcctggagtcggccactaggccccacctccgatcccgcccccctcccccttctccggaacccaccaatggaaagggcggtgcgggggcggggcctggcggttgcctagcagcggcagcgccgggcgggggcgggtggtcgggggcggtgatgcgggcgcaacgggggcgggacgcaggggcggggactgccgcggggcggggcctgaggcggctataaaggtggccgccgccggacgccgggctctgtggttcgggtccgctttcgtctccgtcctgctgccgttaccgccgctgctgccgccgcttgcgtcccccgctccggtctgtggtgcagccgggacccaggaccatgtctctgtctcgctcagaggagatgcaccggctcacggaaaatgtctataaggtgagcgccccccggcgccgagctgagcccgctccgtgtgcg

SEQ ID NO: 19249 - DNA, 2300 bp, Homo sapien
ttgacaacatgtgcttccacagagcaacaaggccagaaccgtatgccacagactctgtgaaaccaaacctaacaaccccagggcctgtgcctttcccaagccgactcctcaggtcaccctgaatcctgtttcccagtggctccgacgtggctttaggactcatctagtcgaccgcacacccgccttcagaaaccttccagactgacgcggccccaacttcacaagctttattgaaagctgtattcaagtgcaatcggccccctgcactccagctggaaccagaggggccacccctgaagcctccatctggctctcccaagcctgagagctaagagggcttcccaggcccctggccaggcacgccttggccgcctaccacaatcagaaacagttactctgccgggcagggtgcaagccggttaggaaacatgaaccagcgactgccgggtaaatacccactccactcatcgcccagcctgtcactgaacctgcagacagttttgaaacaaagcacatctgtaagagatcgcccaggacccagggacacccagagcaggggtttctcctctgagaaaatgctccccggcagctgccgggctcaggcgtgggggtctggaccgagaacggatgctgaagaaagagaaaaccaagggcctgtttgtcggtatcccagccacaaaaacgactggggagggggcggcaggggaggcttccagcggtgctctgcggcccttggatgtgaacctgtcatttcgcagacgagaacgtggatgccactcttaacacatctgaagcaaaggcaggcacgtcagcctcctacacaattagtcttctctctccgcggttacataagatgatagattatccgtccacccatccagcctgcccgcgctccgacctcccaccttaggccccagcatgggcgccgggcaggagttgtgggaagggaaagcctgttgagaatgaagtgcccgaggctcgcgcaaccgcgcctggaggagccccacggtgccaccgcgccgaccgcggccttcagacagcccccatgccgtcctggccgccgcaacccctgggcccgccgcccccgccgccccggccctgcccgggtgtgctacgaccccgaccggtccgagggcttccggggcccggcgcgcggctccgttcccgccgacgccaaggcgagcgcgcgggggccgagcagggccgtcggagcggggagtgctccccgggcctggggctggggactgaccgggccgcggcgcgcatgggatgggggggcccgggcgggggtggccacctgtgagcggccggcgccgggctcaccaccccagcagcccgggtcccgggtggccgcgccgggaagacccccaaagtcccagcctcctggcccggcgcgcggccccggggccgccctggtcgggctcgggcgcgcgggcggcgcgcgacccaggcgcacacggagcgggctcagctcggcgccggggggcgctcaccttatagacattttccgtgagccggtgcatctcctctgagcgagacagagacatggtcctgggtcccggctgcaccacagaccggagcgggggacgcaagcggcggcagcagcggcggtaacggcagcaggacggagacgaaagcggacccgaaccacagagcccggcgtccggcggcggccacctttatagccgcctcaggccccgccccgcggcagtccccgcccctgcgtcccgcccccgttgcgcccgcatcaccgcccccgaccacccgcccccgcccggcgctgccgctgctaggcaaccgccaggccccgcccccgcaccgccctttccattggtgggttccggagaagggggaggggggcgggatcggaggtggggcctagtggccgactccaggcagcgattggtctgcggcggcgtcgatcctgggggaggagaggggaggcgcggcgcgggctggggccctgggagcagcctgagggggcccgggcaacagccgggctgggggcggggaggcgggggcggggtggcgcaggaagaaggagcagaaggtgcggggaggagagcggggggcgccggcggcagcgcgcgtggaggcggcacttcgcgaagtggcacttcggggcgggcggcccgccgggtcgcggcctggcgctgcggggcggggagcggctcggacgcaggacgccgcgggccgggcttacaggtgggagaggccccgaccccgccgcttcgcaggtaagcccgccgggcgggcggcgaccccccggccggcccctcggggcagagaggagaaccctg

SEQ ID NO: 19250 - DNA, 2300 bp, Homo sapien
cagagggtctgtggtcatggtgagaagaaccccgcagctcctggaagggcgagaggacccggagaggcttcctctgccagactcagctgtgctttgaggaggggaagtgacccaaggccagcccagccgtggtcctgggaggcagcatcgcccggttagggcttcctgcgtgtcaccgggggccttgctctggtttctggctgaacttgttgggcactgggcgatcctagtgggggttctgctcgctggagcgagaggaccctctggggcgtgggaccggcggtggcctggacgtcagcagaggaggaaagtcctgcttcaggcagccattcagggagggacaggaatcacccgagagtgacctgccagcagcaggggcggccctcctgctctgtttgtgtccgcagcacgtggtcagtgcctggcactggaaacagtagctcagcaaatatttgtccgtcaaaggagtacgggggccggaccacccagttccggcccctcctctgcagaccaggaaatggagccatttgccgcaggggtgggtctctcgtaccaactccagggttagcgggaggacagccctgaggggctgtggcatgcttctgtcccatgtggtgctgatggggggtgggtctcgggctctgctgatgagtatcagggctgggtcctggaacccaggctggctgcactctgggggcgcttctggggacggctagccagccccctgggctgatggtgtggtcgcacctgctggccttggcggtcatgtctcaaatgggatcacagctccgagggagctttggcagaggaaggtgggaaacatctgggtgaaaaggaagtgggccgtgctcctgtgtcttcgaggcctcggcccctcagctcctctctctgtgcccctctctttggtggaagcaggtagggatgcagcaatgtggtgaggcccttacagagtgggggactcagacccacatcagggtagcccagacacctgcgcccctggggctgcccccccgcaggtggacttgagccgggtctcgttgatgtccaggctgcaaaaggcctctgacggcgcttaccctgtgccgccacgattttgatttcttaatctgcattttgcacacgggccgaggagacatcagtgtccccaagcgctgcccgtgtgtccccagggccctcagcgatggcaaggcgagcccaggccagcgtgcaccagggtggctgcctggtgagcctatcccatggggccaggtctcctcagaccaccgcgctcctctggggctcaaagcggagatgttgggtgaaggtctcagaggtgctgtgggtctgcagcctgggtagtgaggtgtcttggagtcagagaggcttgtgaccagcgtgtgcccatgggtgtcccccagaggaggtttgtgcgctgtggtgtggggtcagcagactgtccacctggcctgaggtaggaggttcggagctcttgggtctctgcgaacgacagccggatgcgtatgaggacgcgtgtttgcgctcactgtcactcactgtcacgcctggggtgaagcacacacgggctcttcctgtctctcgcctttgcagagactcaagttccctcccaaagatgccaggcgtgctgtgcatttgaggtctggagtcccttctcattctagaattttctgtttccttttggtgtcccctctccgccctcccttctggccctgacaccccgggggccctgctgcctgtggtcacagggcttccctgggtggctgtcagcccagagtgggatgacggtggtgactgcgagcacctgactccctccccttccttctgctgttctgcttcccaggagacgttctcttccagatggctgaagtccacaggcagatccagaatcagctggaagaaatggtgagtccacccccagcgtggccctgcgaggaggggcaggtgcgacgggagagctggcgccacaccttggccgtgtgtccacttgggaacagtcccagttgtccagccacactcggaggcagggagggaccctggctcagcacacaagccacactcgaaggaggacgtcggagaaaagggcacaggccagaccgcggccgcatgtttcactggctgcagtggcagccatgacacgctgggctccagggagagtcctgatcgcagccccagccagaccccactcctggggttcacaaggttgcaaggcacacttcccctggcctctccgactgtaggcagaggcagaccccacacaaccagagcacgttgctggcggctggtttgcagcatcctgtctaaag

SEQ ID NO: 19251 - DNA, 2300 bp, Homo sapien
gtgctcagctggtctgtgtccagcaggccgcagagtacgcccgagggagcgcgggctcttgggcccaagggcagtggttggagcagtgagcctcagtgtgtctgacggggctgccttcctgccctcggcagccaggcctgacccccactgggcagcaccaccccctcccccggccatctggggcgccttcctggcactttggggtttgcccaccggagtttgaccttgtgcgtccctgtccgttcctccttcctccaggccctgatgggccccgcgggcgttgagcctgggtttgctctcatccctggaggtcccccgactgcatggcttgtggtccatccccggccctttaccggcagccgcttctgtgggttggggtcagaggctcacgggtggcctgtctcgccgagaggtaccacctggtgaagagcagcctccagccccagagagtgctcagggagggccctcagcgctgtgcctggctgcaggagactgagccggccctgacccctcccttcctgctgcttccacttcagggcaaggagctgctggcgcagaagctgccgctgtggcaacaggcctgtgccgaccccagcaagatcccggagcgcgcggtgcagctcatgcagcaggtggccagcaacggcgccaccctccccagcgccctgtcggcctccaagtccaacctggtcatttccgaccccattccgggggccaagcccctgccggtgccccccgagctggcaccgttcgtgggggtgagtctgtggcctctggaaagcttcacgggtgtgggtgggagggcagcttgttgtcagggcggggggccgccagggtgcagagtccaggggcccctgctgagggggcggagggttctctttccccctggtcttgcccggggtgggctccagcaacagcctgctctgcctgcttccctgcagcggatgtctgcccaggagagcacacccatcatgaacggcgtcacaggcccggatggcgaggactacagcccgtgggctgaccgcaaggctgcccagcccaaatccctgtctcctccgcagtctcagagcaagctcagcgactcctactccaacacactccccgtgcgcaagagcgtgaccccaaaaaacagctatgccaccagtaagggctccgctggggtgttgggctggggtccctggacgtgcctcctcagaccctacagtcatgccacaaccctcaataggggcctgggagaccctgaggctcacaattatgtgaccgtgtgtacctacatgcatgtggtacacacacgtgtgcctgcccagcatccagctccctcttgtcaagcctctggtgctcagtgggggcatgagtggggtacagggttaggctcatgcaggcagcagccacttgggagcaggtagctgctgctgcggagagcttagccagcccacttacccacctggggcacaggcggctgtgctctcagcacctcaaccagactccctgggctttgctgccccgccagccaggggcagtccccttacctgtcccttgtcccagcagccgagaacaagactctgcctcgctcgagctccatggcagccggcctggagcgcaatggccgtatgcgggtgaaggccatcttctcccacgctgctggggacaacagcaccctcctgagcttcaaggagggtgacctcattaccctgctggtgcctgaggcccgcgatggctggcactacggagagagtgagaagaccaagatgtgagtgtttctcgggggcgggctccaggcagccgctgccttcagcaagtgtgtggggcagcgacactcaagtgcactgagaccttgtgtttagagtggctgtgcaggttgcgggtcctcgccgtagaagacctgggcagtgagagcaagcgtgacctggggtcttcgccaccaacaggcgtcttctcccctggcaggggtcttcgccccaaccacctccctgcaggggtcttcccctacaggagggatctccccccaacagcagggatctccccccaacggcagggatctcccccaatggcaggtatctcccccaatggcaggggtctttccccatggcaggggtctccccccaatggctcgggtctccccccagcggcaggggtctccccccagtggcaggggtctgccccatggcaggggtctttccccacggcaggggtctccccccaatggcaggggtctccccccaatggctcgggtctcccccacatggctgttgtcttcccccatggctggggtctttcaccacagagtctagtgaccacct

SEQ ID NO: 19252 - DNA, 2300 bp, Homo sapien
actgactcagctagacccgtaagcccacccttcccacagggaacaggctgctcccacctgggtcccgctgtggccacggtgggcagcccaaaagatcaggggtggaggggcttccaggctgtactcctgccccgtgggccccgttctagaggtgcccttggcaggaccgtgcaggcagctcccctctgtggggcagtatctggtcctgtgccccagctgccaaaggagagtgggggccatgccccgcagtcagtgttggggggctcctacctacagggagagggatggtggggaaggggtggagctgggggcagggcagcacagggaatatttttgtaactaactaactgctgtggttggagcgaatggaagttgggtgattttaagttattgttgccaaagagatgtaaagtttattgttgcttcgcagggggatttgttttgtgttttgtttgaggcttagaacgctggtgcaatgttttcttgttccttgttttttaagagaaatgaagctaagacaaaagaaacctttgtgtgttgtcttctgaggtctgccgatgataaagtcctggacaggaggggctgtgccaggaacccgatgccagcccttcctggggccaggaggaagctgcccctctcctctcctccccactgtcctcggcacaccccggtggaggggatggtgttctggccctactgtgtgtgggggcgcaggggtagcgccctgcaggtctcccttcctgcaggccgagttggcctggtagggacgggtgaagaatggacctacaggcctctccaggacagcctcctccctgcccttctgagggcaatgtctgtctgtccctgggcccagggtggaaggcggaggcaggagagttgagcacagctgggcttccctgcaccctccgctggccagctctcaactgccctcctggcccgccaactctacagcttcctgtccccggggtgtgagtggctgtaggcgggagtgagctctgctggagacacctccccagccaggtaagggctgttgtcaccagtgcagctcaccacactgtatttcacctaacaaacaaacaaacagtatggaagagcacaaatctgctaatgaagttttaaaacccccaattccagcagagctccccagtgcctgcaggagtcagcggaggtgggggggggaggtccacccaggagtcctggggcagaccccggaagcggggaagcccccacctgccagcgggcactctgctggtgaccccgcatagcacctgacagctggcctttggccgcaggagcgagctgggaggccctggcagcaaggttctggatgggaggttgggtaaggaggagggctggggcctgcccgaggcaggaggggcctggggaggcccttgtgacattgccagtgggagtgaggggcccaggagagccccaccgaggggcatggggagggaccaggccccacactccaggtgtagctgccggacctgcagggaattacgtgcttacgggaagttcatcttccagccagggtgcgggcgctcccatccccgtgctcccggccttctggcccttgggcggacagatcacacctggtgcaggagaagcctgtttattaggcaggagaagcagcagggcagccaggctcccctcccagccaccagctggccaaatgtcctcccttaactcaggggtacccaaggctccatggccatgtgaccagaggcgtgtaccctcaagaggcggcccctcagccctgggcagcccagccactgggtctcgcccttcaggggcctgcgccccactctgcccggccctgcctagaacagctgggatccagtccaggccagactcaagtggggcaagaccaggcagccggggcctggatgttctctacacaggaacgcacagatgatgacagaacaggctacatgggaagggcgggggaagccaccagatgggcagcactgcagatgtggccatcagctgaggaggggggcagacctgtcgttggtcactgtcggcttcagctggacgtgggcaaagggattcctgaaagagaaaaacgtggttttaatttttagggcggaagccatgggtgaattgtgccacctgggctgcccgatgccccagggattccccagtgctggatgcctacggtccgatctcagggcacagagctcacagacaatatacgctgctttgcggggcagggaggaccaggcgctgtctgcaaggctgcctgacccccaagtccactatgtgccctagacaaggcagggtgcccccaccccgatcca

SEQ ID NO: 19253 - DNA, 2300 bp, Homo sapien
ccctccagctcccccagggcagctcccacaccgggcagtgtctggtcttcagtgcatcagtgaatgaatgaatgagtggacaagcagatggattcggccagcccggcctttatgtgcaggctccacaggtgctgggcttgggcctggcagggtgcacattgcctgctgaaaggacgcgctgtcctcagggaggggcggctggtatggtaccaggccccggtcctgaggcactggcgtgatggcgggagctgccccattcggcgccccggggatcctgcgcggtccttgctgtggcaggctgtgcccagccctggctcacggctgtcgccccacaggtccctgggcgtgaccatctgggagctctttgagctgggcacgcagccctatccccagcactcggaccagcaggtgctggcgtacacggtccgggagcagcagctcaagctgcccaagccccagctgcagctgaccctgtcggaccgctggtgagggccccactgccctgtcccggacagccaggccgagatggggtatcctgatccccaggcagaggcggctcaccctgaccccctggcgttccagccctgcctggtctcccctcccctctggtagggcctccacccgccacctctgcacccctgtgtacagggagggaaggcttaaggatagtgcccagcccacctcctgctcccacgctgctgggcttgccttggcagatttggggtgtcaattaagtgggagatacccttaatgcccccaagacactgggagttaggggaacccccatccctgctccagggacgcgttcctggccagcgttgcctctgacgtggcccccgggggacctcctcgcaggtacgaggtgatgcagttctgctggctgcagcccgagcagcggcccacagccgaggaggtgcacctgctgctgtcctacctgtgtgccaagggcgccaccgaagcagaggaggagtttgaacggcgctggcgctctctgcggcccggcgggggcggcgtggggcccgggcccggtgcggcggggcccatgctgggcggcgtggtggagctcgccgctgcctcgtccttcccgctgctggagcagttcgcgggcgacggcttccacgcggacggcgacgacgtgctgacggtgaccgagaccagccgaggcctcaattttgagtacaagtgggaggcgggccgcggcgcggaggccttcccggccacgctgagccctggccgcaccgcacgcctgcaggagctgtgcgcccccgacggcgcgcccccgggcgtggttccggtgctcagcgcgcacagcccgtcgctgggcagcgagtacttcatccgcctagaggaggccgcacccgccgccggccacgaccctgactgcgccggctgcgcccccagtccacctgccaccgcggaccaggacgacgactctgacggcagcaccgccgcctcgctggccatggagccgctgctgggccacgggccacccgtcgacgtcccctggggccgcggcgaccactaccctcgcagaagcttggcgcgggacccgctctgcccctcacgctctccctcgccctcggcggggcccctgagtctggcggagggaggagcggaggatgcagactggggcgtggccgccttctgtcctgccttcttcgaggacccactgggcacgtcccctttggggagctcaggggcgcccccgctgccgctgactggcgaggatgagctagaggaggtgggagcgcggagggccgcccagcgcgggcactggcgctccaacgtgtcagccaacaacaacagcggcagccgctgtccagagtcctgggaccccgtctctgcgggcggccacgctgagggctgccccagtccaaagcagaccccacgggcctcccccgagccggggtaccctggagagcctctgcttgggctccaggcagcctctgcccaggagccaggctgctgccccggcctccctcatctatgctctgcccagggcctggcacctgctccctgcctggttacaccctcctggacagagacagccagtagtgggggtgaccacccgcaggcagagcccaagcttgccacggaggctgagggcactaccggaccccgcctgccccttccttccgtcccctccccatcccaggagggagccccacttccctcggaggaggccagtgcccccgacgcccctgatgccctgcctgactctcccacgcctgctactggtggcgaggtgtctgccatcaagctggcttctgccctgaatggcagcagcagctctcccgagg

SEQ ID NO: 19254 - DNA, 2300 bp, Homo sapien
gagaccggaagactcagctctggagtgggggcagcacagggctgggagtggcctgtggggtagacgcagtgtgcagccctggactccctgtggctgcgtcacaggccgcactgtggggccaaaggtgcatgtacctctttctcctgggcctgggggccggccaggggttggcagggtccaggacagccctcggcctccagcctcccctgcccaaggggctgctatgcacagggacaggggtgggcacggggcaggggtgggcactggggcaggggtgcgggctctctggtcctggacatggccatgtgctgggggcaggggctcttctgcagtccagggatgcttgaccccagattcctgcccccttgagcgccagcccttcagggacacgggttccattgtgcatggcaggaggaggggcgctggtggggcccgtgtgggcgggtggtgaattagcctttcactcaggctgcgaggaggggccgaggggtggggctgacccaggagtgcaggtgcaggcagggcctcagccacagcctcatctgcccccatcctagggtcctaggccgaccactcacatggggcggacgtgctggggagtttgggggtgaatggccaggcttcaggacctcccagttctgtcttggagcctaggtggtgggtgcgggtccctccagagctatcagatctcaagccccctcccaggaagcttccagcctgaggcttcccccatcactgcccacccccagctcctctgggaacacagaggcaggaggggtatcaggccagtgggaggggcccctgccagccctgttggggctctgttggcaccagggcctgttactgcggtgccatgcaggccacctcacctgctctgagccgtgcctggctggaccctgagagctggctatgaactgtgcctggctgggccctgagagcctagccttcatcgtgggctgagaggcccaaggcactggtctgggacctagagagggcccccagcccccagctttggagccaaggcctcaacgcctgtcctactctgccccatctcctggaggacaggttcccagttcggcaggaatcagggctggcacttgagctcgagtacatctgtgggcgggcgcggaggactgcagccacccactcagagcgtgaggccctcggaccttcccggatggctgtgggggtccctgagccctgtgctgaccctgctgggagctgccagggaccatccgagggggtactgcccttgggtccaggggcaggtgtgtgcctggcccccgaagattctcagagccacctctggaggattgctgtggggactggggttggcgaacaggagcccgaaagaaggcactggttacctgtctctctacttttgcagctctggtttcagttttctgggggaggaatgtgcttctagggaggagagagattggggtgaggtcagaaaagtagccccagaggtcagcggggagaaacctgggcaatggccccacccgctggggaccgcagagaaggacggctgcctgctgcctccggcagtgcccagggcctctgaactgtctcagcacccatggtcaggacccccacacttgctcagggacagtgtgggcctgggcgccccagggtgagagagggccgcccagacaggctgggctcaggacacagcacccggtgggcccacacgctcaattctgccctgccccgcctctacattctctgggtctccaggccctggaaggagccccctccccctgggctctcctggcagccaggctcagacccaggcctgtcagccctctgggcagttgacgtgggagcagaattcggggaatccctcggggcgtgggcaggcatgagtgggctctgccagcgctggccccttcgtcccgggcctcactgacccttcctcccgctgacctcacccggcctggccctcggggagaatgggccagtgtgctccgtgcggggccgtgccaagcagcccccaacaaaggagcctttggtgcgcccggcgtgggatgccagcctgcggcagggtgggggtgggccgctccagtgccctctctgtgccgtggccccagcctcttgctcagccacactgcctgcctggtgcagcccatgtgacgggtcgagctccgggccctgctgtccctggccgggctatcccagtggcttcaggcaccttctccagacctacccagaaagatgcccggatggatcctgcagctccgtggcttttctgggaagcagcggcccctgctctcaagagaccctggctcctgatggtggcc

SEQ ID NO: 19255 - DNA, 2300 bp, Homo sapien
agctggtgtgggagggggcttgcctccctagaggcccgactcctggtggaggagctgcctctgcaaggggctctcacgtccctccgaattcaatctgcaaaggggagtccgggctgcccagacaagcttcccggcacagggaccttcttgccagttggagtcaccttgcgcggggtatcttctgccttctggaggggacgatgtgtgatgctagagcccagcctgctggttagggagccccgccaagggtgaggcctggcctcactaggctgcccctctggaggccaaggcccctggccaaggacaggtgccaagcactgctcctccccctgcaaacccccagcccacctccagctgtaactctgagcagcagggagggccaggcagaaggaaccccggccagcatcgcctccccctcccagagtctccatgggtcccattcctgctgatgagcaaatgacaccctggcctggacctctggtggttcacacgcccacgggggtcagccccacccctgggccagaggtcagattcctacgccaggagaagtcagggagggaggagggtgggaggaggcattctgcagcgcgcacagcaccctgtctgtatctcagggtgccttcctactaagtgacccatgactcagctggcgccacccccatttgggagacagtcccagagtcctccctgcccctggtatgtcatgacgcagaatgggccaaggagctggctctgcccacctgtcccgctggcctggcaggtgacggtgctggatgtggcctttttgccttttctaaaggccacattttccagcccattcaaccttccagagccctctgaagtggccacaggccccatcaaccagtgaggagctgcgtgcctggggggcaaagctgtggccccaggctgtggggtctgcactcctgcccagagcccccaccctgctctgggatgtacccctgacccgctggcaccaggggccaggccaggccgcgcaggcgccttcctggggatcccgaggccagagcctcaaggtcttggcgggagcaggagtggaggtggggcctgggtgggacgagtggggctattgtataagtggcccctccttggggcactgtaagaacaaggccccaaacaagggctggccatagctcctcctcctgcgccctcctcacctccttgggaacatggtgcccggaacattccagcaccagtgtgcccctgggaagtcctgcctccacactgggctccctcctgggatttggggacctgcgctgggctccctggtggggagctgtgctgagggaaggggctgggcaggcccccaatgctgaccctgtgctacctgattgcacgctgtatcggcaggacccggctggcccccgggcagcaggtaatgcctggagcccgggcccgaccccagggagagacagcatctgtgtcctgggcccctctacaaagcccagatgggtggggccaggccggggctgggattggagggcccaagagggggcttctggggtggtcttctgggtcccggggaggggaagttgcccacgcagcacctgcgtcccccatccctgagtggctgtgtgctccgaaagggcaggctgggcctggcctgcgggaataccgacagagccacctgcccctctctttgcagcccagggaagggaggcgtccccagggtcacacgtcgtacttgaggagcccaggcctcccctcccactgcacctgcctgtcctcggactcaccagcccgggtgctggccagcatccagctggaagtcccttgactcctctgagcctcagcttccccaccagggcactgggggttgtgaggaaggacagaaaggctgtaccaagtgctcagggattggggctgtcattgtgtgcctggagcaattgctttcagctgggcccaggactttggagactttggctctcagcgcaggaatgtgccctggacttgggggtggggtatcccctatacaggtgcagcctctacatttcaaaatagcagcctggcagggagtggcccagccctaggctgcacggggccaggctcttaaggagttctgggagctccggaggtggtgtggccaccaggtgaaggtccaaggctgctggggcagatggcggtggcaggtgggctgcccagggtaaaggtggccggttggctctgggctcccagacatccaggaatgctccttgtcccggcaggggtgggggcacttaattgcttctcccacaggactgtggggcagggggtgatggaattcctgtccccgaagctgcgcc

SEQ ID NO: 19256 - DNA, 2300 bp, Homo sapien
gtcacccccatcaccctgcttttcctggccgccatgcccacactagtctccccagagcaagatttcacatgtgcagaacggatctcagagaggctgggtgagtagtccgaggccacacagcacagaggctggaaggctgcagctgccaagaaatcccccagccacgctcccgagtgtcagggagatgggggaagagctgggctccagaggaggcggctcttcctggcactcaagcaggctcctgggccgggtgccccctgccctgcccgcatctgcctggtgcggaaggtcaggggcccaggcagcccacagtctgtgcccacagcctccactctcaggccctgcactatcgggcgtctctgccccctgtaccaccacaactgccgtcacctctatggagactggcaccagttcctgcgatgaacaaggagccggcccggcagcggggcagggcctggcaactgaggtgagacccccatgtcaggtgctagcactgccccagatgctgagtgacacacaagccaactgccagagccacaagcgtgggcccctcccctctgggtgcccccccacagacacaagcagcctcagaaggaaccagctcgctccaattcggggatggcaaggagccagccacatgctgtaggaagcttgggccctgggggtctctgtcccagcaccaccactccagcacagacagccaagtgctcaccaagcactgagcccacccgggcctgccacaggtactgtcggcccatgtcatagatgggaaaaccgaggttcacagaggcaaggccaggcagagggactgcagcacaggacagccaggcttggaaggctgggctaagtttagcgggagggcaggagacccctctctcctccctaaccctctcatgggggctggtgcagagcctagacccagccccttaatccgaaggagggtctccttcctcaccagcaccagcaccttgggcagcccctcctggtaggtgggccccagagcccagcaggtgcctgcagctctggcccagcatcttgcagaggagagacgccccttgcctccaacaacttcttttcctctaagtcattaaacggacacattagaattattcagatcacagctgtttacccagagaagggcagagccggtgctgctcgaaggcgggggaaagggcctctcatggccaaggacaaggctgggccccgaggcagggtatgggccgagggtcctctctgttctgggggcagaaaggaccaagcaccgtgggccacgcctggcatggagatgtgatgaggacctgccccaagcctcctccaccccctgcccttgggccggggagacattacagctgttgccgtggctgttgggctctgagccttcacctgcccaccccacagggacttccgagccccaggggtcactacaggaagtcatttctgagcaagtgacacccacagccctaagcccagcagacagacctcccaccagctcccttcctccagggagcaaatgccttcagaccgagatctgccccggggacccccgtgcctccctgccaggctgcgtgcactgggccctgctccagggaaggagacacaggagatcacgtcacatgcaaacaggctttgtttgggctggctcagcctggtgccagagccccagtgacgtgtgggtgggacttggccctggggccatggatggcacagggcagggggattatctcccactcaggccaagcaggggccggatctggagaagcagaggttttagaaagcccactgcttcctggtgacagatggggcttccagctgtccccagccccctctgcctatcccagctgtccaccacagccaggaggccaggcagccatgggtaatctcgccctgcccggtgcactggccatacggggtaagaggcctggcctcaggtcccctgcagccagcttgacagcgtcacctcgggcccccactgtcaggggatctgggcacccaccaaggcccctctcttctgagcctctgcccactgggctctgtaatgtggactggcccctgctccccccacatcccccgccggctgctggtggctgggcagggctctgagaatcgctcccagcctgggaagaagcctcccacgccagggccccggacccaggagaggccatggaaagcctgaaccccagctggctgacaccccccacacccccaagggcccttagtctgagaccaactctcctggacaccaggggcccacgcaggccctccgtgccccagttacctgtgccctggaggcagccacggag

SEQ ID NO: 19257 - DNA, 2300 bp, Homo sapien
atgccaaccagcaaccacccacggccactggccacctccccctgcctaggtccaggtgtctagggcaccttccaggctgggcagaggagggcactccctcctgagctggggaggggaggccctgacaggggacccagagtggagactcatgagggtatgccataccctctgtccctcacactggagcactccaggatcacagcctgctggcaccaaccatccctgccactgggtgggcactgatcctcccagccctctgggctccctgaagacacagactgaacgaggtggcccaaggcctctgagtgcctcctgcgggcaaggcccccttcagccactctacccacgcggcttctttacctgcaacggcagcctggcggcagcgccccttagaaccttggctggccacatgatcagggccaggaagaaggctctgggtgccctgtctccttctgccccaggtgcagttggtgtcttgtctcctacagccagggacccctaaggtctgagggcacagggtggaggccccttgctttgcctgttaggaggaaacttcctacatgagggacccccttaggaaaagaagggtgggtcctggtgcccatctgccccgtggcccaagcatcctgtcctggtctctgcaggtccctctgccgggaacaggctcctttctctccctaaagtcctaagagccctgttggagtgggcgcctctcacctgctccacagcccccaaccccaactgggccttgccaaggggcttagccatctggtcccagaatgagtgagtgaatgaatgagtgagtgaatgaatgagtgagtgaatgaatgagtggatgagggtgcatcaaactcaactgcaagtctccaggacactttttttgagacaagatcttgttgtcacccgggctggagtgcagtggtgccatcttggctcactgcggcctctaactcccaggctcaagtgatcctcccacctcagcctcccaagtagctgagactacaggtgagcgccaccatgcctggctcatttttctaatttttgtagagaaagtgtcttgctatgttgcccaggctggtctggaacccctgagcacaagccacccgcctgccctggcctcccaaagtgctgggattacaggcatgagccactgggaccagcttccactgaactttaactctcccgactcccacgggggcaggctggggggaccctgccccgccccaaccctgcaaggtggcactttgggcggggatgggggatcctgggagaaacataggggaagggatggcccctcagcgcccaggccaacctgctgccctaagcacctggtacagtccacggcaggtggagactcagccaggttcttccttcatggctgtcgcagcacggtacaggagcaggcctgtgtgcaaagccagccacccccactccaccagcacaggtgccacccaaagggcatggggtgggggggcggctgccagccgcctcgaaacctgcaagtgaggcgagggcccctgagcaccaagacccgccctgggtgtgctcccgggttcccccacctgtctccctgaacctttccacctaggagtaccccctcccccaccccggcgttccctccgtacccactcacgacttaccattcacgacttccgtttcccccccccccgccagcctccgtgcccccctcagccccaggccgccgtgcttcccgctccggaccatccccccactccgtgccatccccgctccgtgcacggccccccgtcccccctcctccatgcctcccctccgtgtcccccctccaagcccccttctgtgtcccccactccgtgctcccctctgtctccccctccgtgtccccctctccgtgctccccccatgccaccccggccgcggagggcccccccctcccccgcgccgctccgcgcgcgctcccgcccgcgttttcggactgcaccagcggagccccgcggcgccagggccgggcggagcgcctcgtctgtcgccgccgcccccaccggtgcgggctctgcggctgcggcggggggcgcggggcgcgggggccggcgcgctccgcacctgcggcggccgctgggtgatgcggcggctcgggccggggccgcgggcgtcctgagcgcagcgccctcccgggatgcccgccggccgctggcccggccatgtcgtcgtccttcttcaaccccagcttcgccttcagctcgcacttcgaccccggtgagtccctggcggcccggcctgcgcgccgctgcctccctccgctgcggacgtgatgcccctgg

SEQ ID NO: 19258 - DNA, 2300 bp, Homo sapien
tgggccctcccctcccatgagccggccaggtgtggggtgggtgctgcggccagggcttcttttgagagagccataacttcaggcattcatgtagtccgagaccttcctgggcagaggtgaacactcatgccccaaccacccccgtcacggcctccgctgcggcttctgccgtgacccggggggcaggtgggctccacacaggagcctggcccagcccccagcatctaggcagttgcctgaaacgagggggctcagtgcctcacttcctcagggttgggctaggggagattgggagtttgtggacgactgtggcacgtgggccctgccacgggaagcagagtgagccacaggaggaggcaggggcaggcaggcggatggggcaggaggctggtgggtgttgtggtctgaaggggcctcggacccttgggtgatgtgcagggctccccgaggcctggtcctctcgctctggacacctgccagggtgcctgggagccgtcagtggtagcaccaggagtgtcaggagccctgagccccacaggctgggagaggcgccgtggccctgtgggggtctcttccccacctcgtgggcgtcaagactcagctgtgcttcgggttggatccaaggaggccctgggtgggcggggtcccctctgggcctgagacaggctggtcttgtgccagggttggacttcccgggcccaccctagctggacgtggccctagctggtgccccgcccccaggtctggagcccgagatccagaagctgattgcaaggcacaagcaggaagtgcggaggctcaagagcctgcacgaggcggagctgctgcagtcggatgagcgggcctcgcagcgctgcctgcgccaggccgaggagctgcgggagcagctggagcgggagaaggaggcgctgggccagcaggagcgcgaacgtgctcggcagcggtgggtggtggccccaggccggtggggccaggaccctcagggcggggagtcggaatcctcgaaggctggagtggagttcccatgtagaggtgggcgagggtcttagtgcagcatgcagggaggacgcagggcccttggccctggagtggcccttgggggcccagcctcagccgggccagtgtcctcgggcttgtgtctgcagttcatgcccgccgaggtctgcaggttctgcatgggtgcacgggtgttttcccagggtcagggctgggaacccccaccagacatccactctttcacaactggccccagagcagcaacccgtggataggcggcctcgaggcccctccagctctgaccttggggcccagggacggtctctctcattcactcccttggcctggggtctgaggggtgactgctgctcttgcgtcctgagccctgggggctggggacgtgcccagtggtggtcaggatctgcgggccacagggggcagtggcagcccctcctgcactgtctgcgccaccaggacagcctggaagccaccctctcctatccaccctgttgcctgtcgtggctggtcctccccagatgcagcttggctggtcccccagtctctcctcgaaggtggggtcaggacgaggccctggcgcgagcttgctcaggtcacggagccaggcacctggcaccctcaggccggaggcaggggaggtggataaggccccacgaggcacctgcctcccgccctccatgcccgtggggcaatgctgaacagggtgaggccggcacacgggctgagggaaaagggggcctggacgcggctccacagccacttcccaaagtgccacgagggcctggagctcagggaattgctgcgcttggctgatgggcaagttcctcgtggccttgcctgcccccgggcggtggctttgaggggccttgactgccgagggggaggggcagggccccggagggctgctctccagctgtgagtcaggcctgtggtcggcccgtgcccctgcggtgggtgggtcctgggaccgcccgtcccggcccccgagagccagtcctgaccgtcccgcaggttccagcagcacctggagcaggagcagtgggcgctgcagcagcaacggcagcggctgtacagtgaggtggctgaggagagggagcggctgggccagcaggcagccaggtgccgcccgggggcaccacgccctctcccagggacccctcgctggctgacccctcccccccgccccctcacccgctgacctctcccatccctgactccttactcgatgacccctcacctgctgactcctccctggccgcaggcagcgggcggagctggaagagctg

SEQ ID NO: 19259 - DNA, 2300 bp, Homo sapien
ccgtgtttgcacacgtgcccccccactggccccagggtccatccacaaacctaggaggggcagccccaggggagggctgctgttagcctccctcggaggctgggagggtctcctccatcaggggtcctgctgggctggggccttggtgtagcacctcacctccggtccccaacacagctgattgaggacaagaaggtcctgagtgaaaagtgcgaggctgtggtggccgagctgaagcaggaggaccagagatgcaccgagcgtgtggcccaggcacaggcgcagcacgagctggtgaggctttgctccctactgcacggcgtcccaagcccggctcacaggccaggctcagctggcacagcccccagaacaggaccggacttggagtcctcattcctgtctcggtgtgtcagggccacagcggtgggtggggctgtctgggggagcaccgtggcaccgagctggtccactcctgcctctctagctgccaggctctggggcggggccgtgggcctgctgtcacagatgtggacgcacagtccctgcccggccacagcacggtagccgtggacccaggagcctctgcctggtctgccccactgccaggtccttgggccatgggacctgctctctctactgaccaggtgtcggtggagcattgactccccgccccttcccgctgtgtgagctccctgggggcctcagcctccctggctatgcttcccaccagcttgggcagtgatggtcccgagcccaggttctggagtggggcttggcactggcattttaaaatccctgcacgtgactgtggctgacagccggggttgaggactgccagtcccatggaagaatgcaggctctggggccgtcccgacaggcagcagcacccctctctggggcaaggcctctgcaggctgatggctgccctcccatgtctcaggccaccaaggtgtgtggcagggtgggcctgggcctccagcctggccccgggcgctggggagggcagcagtggctctgtctcggggcagcacacccaaccatgagtgccggccttgtgctggtggacctggaagcccggccctgactgtgcccacagggtggcaaagggacgggggtgtccttcgtgtcgtttcctcctgccctgttctgctcgtaggagattaaaaaactcaaagaattaatgagcgccaccgagaaagcccgccgggagaagtggatcagtgagaaaaccaagaagatcaaggaggtcactgtccgaggtgggccctcccctcccatgagccggccaggtgtggggtgggtgctgcggccagggcttcttttgagagagccataacttcaggcattcatgtagtccgagaccttcctgggcagaggtgaacactcatgccccaaccacccccgtcacggcctccgctgcggcttctgccgtgacccggggggcaggtgggctccacacaggagcctggcccagcccccagcatctaggcagttgcctgaaacgagggggctcagtgcctcacttcctcagggttgggctaggggagattgggagtttgtggacgactgtggcacgtgggccctgccacgggaagcagagtgagccacaggaggaggcaggggcaggcaggcggatggggcaggaggctggtgggtgttgtggtctgaaggggcctcggacccttgggtgatgtgcagggctccccgaggcctggtcctctcgctctggacacctgccagggtgcctgggagccgtcagtggtagcaccaggagtgtcaggagccctgagccccacaggctgggagaggcgccgtggccctgtgggggtctcttccccacctcgtgggcgtcaagactcagctgtgcttcgggttggatccaaggaggccctgggtgggcggggtcccctctgggcctgagacaggctggtcttgtgccagggttggacttcccgggcccaccctagctggacgtggccctagctggtgccccgcccccaggtctggagcccgagatccagaagctgattgcaaggcacaagcaggaagtgcggaggctcaagagcctgcacgaggcggagctgctgcagtcggatgagcgggcctcgcagcgctgcctgcgccaggccgaggagctgcgggagcagctggagcgggagaaggaggcgctgggccagcaggagcgcgaacgtgctcggcagcggtgggtggtggccccaggccggtggggccaggaccctcagggcggggagtcggaatcctcgaaggctggagtggagttcccatgtagaggtgggcga

SEQ ID NO: 19260 - DNA, 2300 bp, Homo sapien
cacacaactctagatttgctaaaaatcattgacttgtacactgaaaatgggtagattttatagtatggaaattgtacctcagtaaaactgttaattaaaacaacattaaaggcaaagaagatacagaactgaaaaaagccaacaacacccaaagctccaggggctgtgggcggagcctcctgtgatgatgactgttgggggctgtgcccctgccgcttgcccctggggagctggaggggctgtgggcggagcctcctgtgaccatgacagtcgtttcttgtcaggacagtcgcgggggtacctccctgcctggactttcggagcctgctcctggcggagccgtcacctaccctaccgcccagttagggctagggagaccaggcctgtagacgcggtgggtggcacgagggaagggggaccagaagcccgcaaccccttgaagccccccagttctgcccggggcagactgctcccgagctagggctcacacgttctgggttctctgttagtgcctttgctgagagaatccacacatggtcccgagagccaaggtgaagcatttttttttttgcttaatcagttttacttagtataatttgtatacaatagaaggtgcccattgtaagtgtgcagttccatgagattccaccagggtgtatagtgctgtctgtggacacagcagaccaagataaggaaacggcccagcaccaccaggcttccctcgagctccttccccgcccagatgccagcagccaccagtctgttccctcatagccctgcctgttccgaccaccctctctgtggagccacggcctgtggtctgcactggcctgagtcccgggcctgttgcctgtgggtagggtcccgccatccagtattcacgctgtagccaggtcatgggcatttgaactcttcccacttcctggcaattgtaaataaggccacacaggcctgcgtgggtaggcgtttcctctcccctgggcaccttcccaggaagaaggttttgggttttagtggagctggtccaggcggctggtcctgccatgtgaaaatggtccaggtgggctggtcctgccttgtgaaaagggctacttgagtgcagccgccggcttctctcttccccggctcgaccttccaccagcagccagctgggtcctgccggggcgctggtcctgtcttggccctgagtcctgctctccgggcaggtttatccaccaggtgaaccaggccactgtcaccatccagcgctggtaccggcaccaggtgcagcggcgcggagcaggagctgcccgcctggagcacttgcttcaggccaagcgggaggtcagtgtgggcgtctcagtcactccatgctcccccggggggtctggcccagaatcccaggggtttgagtttctgggacaggtggaatcaaagcctaggattgctcgtgggccccgtctctgggtgcagcatccttcttgaccctgggtccccgcggacagtcagggtggtcctcactggcggtcctcagggcctgggtgtcaggaaacgcctgctgggtccatcccaggctggagagtctcaggaggacgttctgtgggggcagagctgtctcccccacgccagaactgttggccacctgcgacgtagggctcatcctctgtagagcagagaaatggcaggttcaaggtcctggtggggtttcactttccctgctggccctgagattccacgaactctaggggactccagggcgttgtggggaaacctctggtctgggtctggattccgtcttccagatgtaaacgccacatggcaccggcttctttggcaggagcagcggcagcggtcaggcgaggggaccctcttggacctgcaccagcagaaagaggcagccaggaggaaggcccgggaggagaaggcacgccaagccaggcgagcagccattcaggtgctgaccgcgcagggaccactgagcagcaccgtggcccaggcctgaccgtgcggggctgctgctggggctccctgggccccgggacacttagcctcagggcagcttggctgtggagcctggggtcgtcctctcccagggacagtgctcagcgatgctcccactgcaggagctgcaacagaaacgagccctgagagcccagaaggcgagcactgccgagcgtgggccacctgagaatcccagggagaccagagtgccaggaatgcggcagcctgctcaggagctgtcccccacaccaggcggcactgcccaccaggccctcaaggccaacaatactggtgagagtggctccacgcccgccctgctc

SEQ ID NO: 19261 - DNA, 2300 bp, Homo sapien
agcttgcagtgagctgagatcgcgccactatgctccagcctgggcaaaaatgcgagactctgtttcaaaaaaataataataaataaataaataaataagtaaacaaataaaaccaatccctgacaataccaagagctgaggaggatggggagcaactgcaacacctgtggcactggtgggagcgtagagctgtacaacttctttggaaaatagcttagtaggccgatgtggtggcccacgcctgtaatcccagcactttgggagaccgaggtgggtggatcacctgaagtcagcagttcaagaccagcctggccaatatgacaaaaccctgtctctactaaaaatacaaaaattagcctggcatggtgacatgtgcctgtaataccagctactcgggaggctgaggcaggagaattgcttgagcccaggaagtggagtttgcagtgagccaagatcatgccattgcactccagcctgggcgacagagggagactccatctcggaaaaaaaaggaaaaaaaagaaaaagaaaatagcttggcggtttccttttttttttctttttcttttttttgagatggagtcttgctctgtcgctcaggctggagtgcagtggtgatctccgctcaccgcaatctctgcctcctggggtcaagcgattctcctgactcagcctcctgagtagctgggattataggcagacgccaccaggcacgggtaatttttttgtatttttactagagacggggttttgccatgttggccagggtgatctcgaactcctgacctcaggtgatccgcccacctcagtgtcccaaagttctggaattacaggtgggacccactgcgcccggccggcagtttcttataaacaatcatttgatccagcaaccccactcctgggtatttacacaagagaaatgaaaagttgtgtccacacagaagccgatgagtgaatgtttatggcagcgtcattcataattgccaagcaccaggaacaatctctgcgtccttcatttgatgaataaaaccatcaataaataaaaccatctgaaccggtggttcacaccggttacaggataccactcagcaataaagaggaaccagcatgaatctcaaaatgcgaagtggtagaagccagacccacaggcgcgctgcgcgacatcccttttgtgtgacattctggaaaaggctgcctctagggatggagaacagagagaactgagcagccgccaccagcagtcagcaggtacgggatccggagggagaatgttctgtaactaaagttacacaactccactgcacaccaaaaaatgtggattttactgaaaccaaactttttattttacagagcactggactttttaaaaagcgggggcaggggagaccagtgtgctgtgacttttaggggaaggatggcttccctggagaggacctgggcggaatccccagggctcccggagagagggggagtcacagagcggctacgcacggggcgcagcgttaaaactttggagaaggaaaaaaaacaacaaagcagcgcgaagggaaggaggtcagggaggttagcaaggcgcccacacgccctcgcagtcgtactgagtaacgaggggagtcgcgcacgtgggtggggacagagcggcctaggacactgggggagccccgggccgcgggagtgcggcggcctgggggtgtcggggagccgagccgaggccgcgtgctcctcgcgccctccctggtgtctcctccccaggccctgcgtgccccgcccacacctgccttgccccgcccacatctgcctcgccctactcgcccatcacacccccacctcacgccccgcccacaaccgctggggccccgcccctgcccggccagctcctcccgccgccctcggtcccccgccccctatatgacccgcccctttccagccgcgtccaatcggccgctctctgtagtcgcgtccctcagccatccgccgctcctcccacgcttgaacttcccgaaggacagccgagcggcccaatgagctcccgggacggcctgagcgggagcgtgaagggccaatccggagtcggcgcgcgcaggaaaggcgggccggcgtgacgggctggggaggtggtgccaggctggttgctagctgccgccgctgctcaccccggccgtccggccgcttcattgtcaccgggcctcggggcagtgttgggggtggcggggcgccaggtcgccgacccgaggtttgggcgcgactggttccgcatcccctccccgccggccgaatctgcaggccccgcgcgccaggca

SEQ ID NO: 19262 - DNA, 2300 bp, Homo sapien
tgtcatcctaatactttgggagattgaggtgggagaattgcatgaggccaggagttggagaccagcgtgggcaacatagcaagagctccatctctaccaaagaaaaaaaaggccatgtgtggtgactgaggcatgaggattgcttaggactgcttgaactcaggaggttgagactgcagtgagctgtgattgcaccactgcactaggtgacagagctagagtgcagtggcacaatcatggctcactgcagccttgacctctggagttcaagcaatcctcccgcctcagccacctgggtagctgcgaccatgcctggctaatttaaattttttttttttttttttttgtagaaacggggtcttgctatgttgcctaggcttgaaatctttaaacaatataacagaaatcatataaaatatgttctctgactatatcagaattaaatcataacacaatatgctttaaaataacccattggacaaaacggaagtctcaagataaatttgaaaatattttgagctgaataacaatttaaatgtaccaaaattcataggatgcagccaaagcagtgttcacaggaatgtttatagcattacaaggctcacattagaaaataaaggacatgataaataatctaagcttccaccttaagaaactgaaaaaggctgggcgctgtggctcatgtttgtaatcccagtgctttgggaggccgaggagggtggatcacaaggtcaggagatcgagaccatcctggctaacatggtgaaacccaatctctaccaaaatacaaaacattagccgggcatggtggcatgagcctgtaatcaatcccagctactcgggaggctgaggcaggggaatcgcttgaacccgggaggcagaggttgcactgagcccagattgcgccactgcactccagcctgggtgacagagtgagactctgtctcaaaaaaaaaaaaaaaaaaaaaaaaagaaactgaaaaaataaaaataagcccaaagcagaagaaaggaaataataaagaacagaaattagtgaactaggaaactgaaaaacagaaattagtgaagtacaaaaaaaaaacaccaaagtttgttctttgaagtaactaataacattaataaactgtctgaccaagaaaaagggaaaacaagtgaccaatattaggcatgaaaggaagagtgtgatagtgtgactacagccccacaggcatgacaggaagagtgatagtgtgactacagccccacaggcatgacaggaagagtgatagtgtgactacagccccacaggcatgacaggaagagtgtgatagtgtgactacagccccacaggcatgaacggaagaataaaggactactacaaaaaacggaatcacaaattcagcaactgatataaaatggaccaatcccctgaagacacaaactgctgaaattagaaatagataacccaaatagtctattatttattgaagaaactgaatttcatagtttaaaaccttgccattaagaaggtgaactgcaaggacagtgccagtgggaagttctaccaaacgtttcaggaacaccgcctgtccctcctttgaggaaagcagtcctctgtgtgtgccccttattgatggtattttcattaaaatgcacatacacaaaaaaagaaaaataagcggcccaggttcatgtaaacagtagtgtttattcagaaagcataaaccccagcgctcttggaaggtttttctgagatggaccagaggctccaatcagaggcttcgtgtgtaggaagcaattacagcctaaaggagcaggtgagagccagggaaggatcacgtagggatctgagacttgaaatggcctcaggccagacagcacaaggcagcccggacaagacaccctcaacccacatgcaccaaacccagcctcagcacctagcccaccccgatgggacgggggagcagtggcttgttgctgctcatgacctcctggggaaggagggagctgagatcaaaatgaaataaggaacctggtagtcgcttccgcattcatacaagaaacctcatgtctgagagcaagacaggcagggactgccccctgagagccctgagatcgacatttctgaagccctgccacctgccatccctcgtagggattcaagtccaaatagccagagcctctggcagaggagatgggggaaactgaggtagccctagggtcgtcctctcaagtcaagctgcctggagactgtagcagctacggttgaggctgctcaggaagcacagaccgccccagacagcagctgaagctgaaga

SEQ ID NO: 19263 - DNA, 2300 bp, Homo sapien
ctgcctccttgagtgtcctgggtgtctgtgccatccgtgggcagggccgagggtgggggccggcttgctgctaacggaggaccctctgcaggcatgggctcccaggccaggccgcacagcaccctccagggtttcggctacagcaaggaacacggccgcacgggtgagtggggagggcctgcatgggctctggcatctcagggtgtggggatgaggaggtggtgggggccggaccatgccgccccatctagtagctgctgtcccccgtcccctcccctacatggcctcaacccttcctggggctgtccccactgtctctctctggctgctgacgtgggggtggggcaggtgtggccagggctgctttatggacagatgagagaaaccaggccgagcaagaagtcagggctgggccccgtggcaggggtgagtcccactctgagaggggccgagggctgtgcccctggctgtggtgcaggtgactcaggcagtcccgtgtggagctgttatgaggtggggcagtaccagtggacaactgctcaccagcgccaggagagccacaggtggcaccactgcctgcggctgggacccagcccccagcccagctgtgccctgctgccgggccctgggcggtgtgtagctgctcaccgttaggctgtgtcacgccgtcctgcgcacagcctggggctcctgccgacactttggtgtcggggcagcttctacagggaactcacacaggaaaggccggcccctccccgagccctggacacaccctccctgagccaaggccaagcccaagccccttaggacaccttcacccccagaggacagagggacggaggcataactctgcagtgagctttggtgtccaggcccactgggagtgggaatgccaaagcggagtccactgggagcttccagagggcctggggcccaccaggaggcctccctacctgcagcatgtaccccgacctctccaagcttgagcagggagccgatgcgggcaccctgctcccagagaacgcgggtgggggccgcactgggcggccgtcccatctccctctcctcgggtacaggctcggcaggcgaagccttcctctccaccatccagaaggccgcagaggtggtggccagcgccatgcgccccgggcccgagagtcccagtacccggaggctcctgccgcggggtgacacctaccagcctgccatgatgccttcagccagccacggtcccccaaccctggggaacctactccccggggccattccaggtccccgaggtatcgaggcgagggctcctccccttggggtctgggtcactccttcctgtcaccgctggggctttgcggccacggaggcaaatcccagggcctcccacacagcaggaggggtgggacccgcggcggaagcacatgcccatggggctggtgtttgctgaagctggagccaaggtggccacccatcctcagctcaggactcagcccccgaggcctcctggtccagggccccgggaggtgggcatggggctggcctgaagccccagggatctcaccggctgtcctgtttcctccagctgtgaggcatcagcctgggcaggccggagggggctgggatgagctggacagcggccccagctctcagaattcctcccagaacagcgacctgagcagggtctcggactcgggcagtcattccggcagcgacagccattcaggggccagccgggagccgggtgacctggcagaaaggtgagcgggagctgccagatatgtgggagaggtctcggaggcaccacactgtccccctcccagcgcggctcctgctctccaggttctcccccatgcgagacaggagtgggggcatggcctccactcacccttgacccggccattccccctggcagggtcgaggtggtggccctgagtgactgtcagcaggagttgagcttggtgaggactgtgactcggggaccacgcgccttcctgagccgcgaggaggcacagcacttcatcaaagcgtgagtgcgcccggacccgccctgctctgcctcagccccaaccgtgggcgagggaggagggaacgggccgcacccgccacccaggtgtcccctctgtgcaggtgtggactgctcaactgtgaggccgtgctgcagctgctgacctgccacctgcgtgggaccagtgaatgcacgcagctggtgagctgcacacgcgggcgggagggcgtgactgtgtgcatgtgcctgtgtgcgtgtgtgtgcgtgtgcgtgtgtgtgcacgtgtgcctgtgtgcacacctgt

SEQ ID NO: 19264 - DNA, 2300 bp, Homo sapien
cctgtgtcatcagtattgcagccttcagaccccacccatgcctggttacaataataaaggagccgtgcatccccctagggacagcagaatccccaggaaccctttgcaccactctgggaccctgccatccgctctttccactacacggggacatcaaggaaggatactagcaatctcttcaaacaggtagcccggacacgggacatcatcatcggacgtccccttcaggagaatcgggagctgaaagggaacaagagcccctaccatgatgaggtgccatttcccacaggggtgaatccgcagccccccaaaggggatggaaacgacccacctctcactgttgacatggccggagagaggactgggaagggatgagaactgtgctactggccacagggaggctgcagcagggtcctctctcaacagtcagggatgaacagcctcggagaagaggcaaatcaatggtggttctccacggaggagctgcgccacttgggttaagaagggacacagcccccagcctccctgcacttaccagcatgtaaggctatttgaaggtacctctcctgtacctacctactgactagcaaagccaaacaaggcccaggcaagccccttttccacacaggggactatgaatcgttccacctccccagaggccggaatggcagagtgacagccgctcagcgtgactagctccatcgctccccgagaaccgactgatgtcgtgtgttttacgttcgcttagcgcagacgtacttatttgtttcatgcttacttactggcacaaagatgtacggtttatagggatgaaaactggaaccacccattcttgcattattcagtatcaggacagaatagagttcaagagtatttaacaggacaagcatgggacccaccgcgtgaggtgccgaagcctttcggtcggaagggccgagatctagtgacaacatacgaaaacgtggacctgaagtgtttcccgaggctgtggacacgcatcactgacactgtttgcccaccacgccctaaggggagctgctgaggtttgcaggtgacagctgacaactgcagaacgcagcacagaacgactatgtcgaaaccttgcactgagagccttgaccaaccctagcgtggcttctggcagcccaaggtcgcgccctgggaccacccagccccctctgaggtccagcccaggaaagctcagggctgacaaaagagggcagtttgctcaggacgacacctgggaactcgccccggcctctacttctcagagggtttactaagaggggcttacaatggtgcgtccttctctgtcccttcgagacgtctgtgttctctgcaacccaggggtgcctctccaggaccggagtcctctgaaacgccaccgtcagggaggacggcgggctgccagcccacctgggcgccagcagcacggacacagcggctccacgtccaccgggtccgccgctccttccctcccgtcggaggccactgaatgctggccgaggcctgttcgttcccccagggtctggctgtgcccatcgcccttgcgctcggcgggtccggcttggaaggcccggcttggaaggccccgggacggcgcggcgggcgggcagctcaggggcgtcggcgcgggcgaaggggccaggagcagctacccggcgcggagacgcaaggtcaatggctccggcccggggcgagtccggggaatgcggcgctcgagaggagccgtgggaccggggcccgggcggaccgccctcactcacccggtgtagaaagctcaggcggtcccgtagcggcggcgcggcagccatgatccaggtcccctcccggtctgccccgcttccgccaggcccgggccctccaatcactgcgcgggtctgggtccgccggccaatccctcacggtagggcgggccctgaggttggcttcgtaaacaattggagcctaggccaatccgaagtcccagagcacagacagactaggacaagagccaattgcgggggctcgaggccaggcaaagcctggccaattaagaagttcaggaaaggttatgggcggaagcgccgacctatcaagctgtttgacaccggaagaggacggacctaagatggcggcctccagggggctgggaatagccgctcatgtcggctaacggagcggtgtggggccgcgtgcgaagccgcctccgcgccttccccgagcggctggccgcctgcggggccgaggtgaggagccgcgggcgggccagtgctgcggggcaggaggagccgcgcggggaggtggctgggagggaggac

SEQ ID NO: 19265 - DNA, 2300 bp, Homo sapien
agacggggtctccatatgttgcccaggctggtctcaaacttctaggcctaagcaatccacccacctcagcctcccaaagcggtaggattacaggcacgcgccaccacacccagcaaaaagtgcaacttctgatgagttgtccacccctggatccaaggctgctggggccgggtagggatgaaggccgtggaactcttgttcaaataccctttctctggtccaaatctccggattaacagctcccagtaaacagagtcagcactggcatcaaggcctacccagatacactgaggtggtacccggtgcggctgacacttagggaaccagcctcagaatgacttaaagccccacgggcaagaagccctatcgtgccagttgtgagggtggctgggggttccccgcaggacacgtgctgaaggaatccaccactgcaggtgcacaggggctgcaagtgccagggaggtgaagacccggaaggtgctgggcactttccgggagtcctgtgttgggtcaatcctggcatgacaccccccggcggcagtgctaacacgaaagcttacgcgttttacaaggcgcttttttgcacacatctcccatcctttctgaggttggtgccagtcccgctttacaaacatgcagggacaagcccaggacggccgaggtttcgcgggctcgtcgatggctcggtgattttgtcagccggcgtctaaagcacgcggcaggcgctcaaaccttgaaccaacgggaaagcaaaggaaagccggggcccgctggctcttggaggggaagggctgggaaggggggaaggggcccgcgcccacctaccgcagcggcgaagcagctccgcagggcctcgaactcccgcgcgcagaagtccttactcaggcggccgcccggggccgtggaggcctgcacgcacctgccgtacgccgcggcctgcggaaaggacgggcgtgggtcgtggggtcccctgaccccgtcaccgtcctccctcccagccacctccccgcgcggctcctcctgccccgcagcactggcccgcccgcggctcctcacctcggccccgcaggcggccagccgctcggggaaggcgcggaggcggcttcgcacgcggccccacaccgctccgttagccgacatgagcggctattcccagccccctggaggccgccatcttaggtccgtcctcttccggtgtcaaacagcttgataggtcggcgcttccgcccataacctttcctgaacttcttaattggccaggctttgcctggcctcgagcccccgcaattggctcttgtcctagtctgtctgtgctctgggacttcggattggcctaggctccaattgtttacgaagccaacctcagggcccgccctaccgtgagggattggccggcggacccagacccgcgcagtgattggagggcccgggcctggcggaagcggggcagaccgggaggggacctggatcatggctgccgcgccgccgctacgggaccgcctgagctttctacaccgggtgagtgagggcggtccgcccgggccccggtcccacggctcctctcgagcgccgcattccccggactcgccccgggccggagccattgaccttgcgtctccgcgccgggtagctgctcctggccccttcgcccgcgccgacgcccctgagctgcccgcccgccgcgccgtcccggggccttccaagccgggccttccaagccggacccgccgagcgcaagggcgatgggcacagccagaccctgggggaacgaacaggcctcggccagcattcagtggcctccgacgggagggaaggagcggcggacccggtggacgtggagccgctgtgtccgtgctgctggcgcccaggtgggctggcagcccgccgtcctccctgacggtggcgtttcagaggactccggtcctggagaggcacccctgggttgcagagaacacagacgtctcgaagggacagagaaggacgcaccattgtaagcccctcttagtaaaccctctgagaagtagaggccggggcgagttcccaggtgtcgtcctgagcaaactgccctcttttgtcagccctgagctttcctgggctggacctcagagggggctgggtggtcccagggcgcgaccttgggctgccagaagccacgctagggttggtcaaggctctcagtgcaaggtttcgacatagtcgttctgtgctgcgttctgcagttgtcagctgtcacctgcaaacctcagcagctccccttagggcgtggtgggcaaacagtgtcagtgatgcgtgtccacagc

SEQ ID NO: 19266 - DNA, 2300 bp, Homo sapien
atctaacaccgaggaatgtcacatcttcgccattcccacttcctttctgccctaggcattcgatatgtgccaccaggggccatcaggactagggctctgcacccatggcagcagacaggtgtgaagctcagagtccctcctaacagcctccctccagcgtcttcttggcctgcaagataaagtgttttgtctgaatggcttgcttccaagttagatacgcctcaaaagcaagctaccacaccacacgttgtgttctaccaaataccttacagagaacttgggtgctggcatatggtgggggctcgactggttggagcctggggccccatgggcaggttctctgggtcacttgtccacgggacaagggcctcatgacactatcacagaactcactgctgccccctcctctgagcccccacgagatgccacatttggtctcaagctctcatagagggaaagcaggagccccccccctttttttttttttgagatgcagtctcactttgttgcctaggctggagtacagcagcgtgatctcggctcactgcaacctccacctcccaggttcaagtgatcttcccacctcagcctcccaagtaactgggactacaccaccatgcctggctaattttttttttctttttttttgtagagacggggtctccatatgttgcccaggctggtctcaaacttctaggcctaagcaatccacccacctcagcctcccaaagcggtaggattacaggcacgcgccaccacacccagcaaaaagtgcaacttctgatgagttgtccacccctggatccaaggctgctggggccgggtagggatgaaggccgtggaactcttgttcaaataccctttctctggtccaaatctccggattaacagctcccagtaaacagagtcagcactggcatcaaggcctacccagatacactgaggtggtacccggtgcggctgacacttagggaaccagcctcagaatgacttaaagccccacgggcaagaagccctatcgtgccagttgtgagggtggctgggggttccccgcaggacacgtgctgaaggaatccaccactgcaggtgcacaggggctgcaagtgccagggaggtgaagacccggaaggtgctgggcactttccgggagtcctgtgttgggtcaatcctggcatgacaccccccggcggcagtgctaacacgaaagcttacgcgttttacaaggcgcttttttgcacacatctcccatcctttctgaggttggtgccagtcccgctttacaaacatgcagggacaagcccaggacggccgaggtttcgcgggctcgtcgatggctcggtgattttgtcagccggcgtctaaagcacgcggcaggcgctcaaaccttgaaccaacgggaaagcaaaggaaagccggggcccgctggctcttggaggggaagggctgggaaggggggaaggggcccgcgcccacctaccgcagcggcgaagcagctccgcagggcctcgaactcccgcgcgcagaagtccttactcaggcggccgcccggggccgtggaggcctgcacgcacctgccgtacgccgcggcctgcggaaaggacgggcgtgggtcgtggggtcccctgaccccgtcaccgtcctccctcccagccacctccccgcgcggctcctcctgccccgcagcactggcccgcccgcggctcctcacctcggccccgcaggcggccagccgctcggggaaggcgcggaggcggcttcgcacgcggccccacaccgctccgttagccgacatgagcggctattcccagccccctggaggccgccatcttaggtccgtcctcttccggtgtcaaacagcttgataggtcggcgcttccgcccataacctttcctgaacttcttaattggccaggctttgcctggcctcgagcccccgcaattggctcttgtcctagtctgtctgtgctctgggacttcggattggcctaggctccaattgtttacgaagccaacctcagggcccgccctaccgtgagggattggccggcggacccagacccgcgcagtgattggagggcccgggcctggcggaagcggggcagaccgggaggggacctggatcatggctgccgcgccgccgctacgggaccgcctgagctttctacaccgggtgagtgagggcggtccgcccgggccccggtcccacggctcctctcgagcgccgcattccccggactcgccccgggccggagccattgaccttgcgtctccgcgccgggtagctgctcctggccccttcg

SEQ ID NO: 19267 - DNA, 2300 bp, Homo sapien
accccccagcccaggtggcagcccctcagggaaggaaagagaaacttctttccccagaagcctcgcagacccctgggtggggcttctcagaatgttacagaggggccccggggccaggctgcgctttctgacgacaggctgctcctgtctggtcagtcctggtgcaggtcgctgggttgtggagtctgcctctgggggctcagttccagagcagggatagcgctgtcccgtcgccggtgtgtacttctgcgcgggaacagacttgcgcagcacgctggcccagggacggattgagcggagctgagccctcaaagaactttgggtatctcctgagagccaaggcatttgctgtggtttgatgtgtcccctccaaaattcaggagttgcctaagtgacagtatcaagaggtgactaggccgagggctccttcctcgctcgtacgattaagagccttataaaagaggctgcacctccgccttctgcagtgtgaggacacggcacaaaggccctccccagacaccagtaccaatgcctggatctcgggcttcgcagcctgcagagctgtgaaaaatcaggccgttctttgtaaatcacccagtctcaggtgctttgttagggcagcagggacggcccaagggcacctgaagcagttagagctccacactgtccctgcggtgcgaaaacagcagaacccccacaacctcccctccccctcccccccgcctcccccccccccacccgcccagcttcctgagctgtcaatcgatgtggtgctgaaatccagtcactcagggaggaagggcagagcaaaggtgggaggtttgcaaggaaatttggggtggcagaaaagagggtgtaccccggaggcctgagagctgagtttggaggtgtgggccacgctgggccacaggaagtggcaggtctgtcaccacctcacacacagggtgaaggacagcgagggggagtgctggcaagacaggtctgtgggtgggatgggaggctggatttggagggagaagatgcaggaagctctgccaatgagctgccagagaacggagagggcgtgacagggctaagaaaaggacgtctgcacactgaggctcgctcatggatgagtgctgggcacaagaaggaggaaggcaggggtggggggcagccggccctgcacgctggggaggcgggtcgggtggtttgtgccagcgcagggcatctgagtctggcatgcacagggatggactgcggtggcttgaccccaggagtctggtctggatttccgtggttcccaagatgtgacactatcctggcccttgggacaaaatccagcactctggcctggctcctgcagacccaccacccagatcagacccttaggggaaaccaggttaattctggggcagcatctggaggaggaaacatggaggaacagacctcagcccacggggtcagccgctagcacgggcctgggggcaggcgcaggctgcagccccaggaaagtgcagcctctgcaccccggagcaggggggctctcaaagcagtccccgccacgccctgcaggtggcgctcaggccccatggactccggggtctcaccatcaacaagtgcccgggcagagtcaggatgtggcccttctcaccttagttttaggtcaagtgatgtgatagggagggggaacgagagggcaggcgccatcggtgaagtacctgggctgccgagggggcgaccaaccccacacaggaggggcactggctgctggtgctctacgcaggcccctctcggagactcaggcccttttgtgaagagcctccgccctgccccgtgtccaggaaagccacctgcgaggaccctgccccatggagtgtcccctcgtggtgctgacgtccttgtctttggtgtgtgctgtatacccacagcaaggtctgcaggcttcaccagattcacattaaataccttagtgagagtgttttaaaacggggaccttgaggcagggtgtccccaagtcccagccctgccagctttgggggaaaggctctgggccccattccatctcagagaggccaagacccacatgttgcagtctgcacacagtaagccccaggctgcaggatttgaccgagtctttatcgtggcttccgttacatcttattctaactcaggtttacggacacaatgctggaaaaccaattcctgctctacccacgcctcaacttgttaagaaaaaacaggatctaacaccgaggaatgtcacatcttcgccattcccacttcctttctgccctaggcattcgatatgtgccaccagg

SEQ ID NO: 19268 - DNA, 2300 bp, Homo sapien
gggccaccttgacagatctgcatgggtctcaacaggtgggtggcttcgtgccttctgcagcccagtccccgtggtcttggtgggctctggctgtaggaacagcctgtctcctccacggtgcttcacatgtgtcccacgtggcttctggctggacgtggcatggctccttcccccctccccctcttttttcctcctcttcctcttccttcctccctcctcttccctcctccctccttctccctcctcttctctcctccctcctcttccctcctccctcctcttccctccctccttctccctccctccttctccctcctcttccctccctccttcatcctcctcttccctccctcctgctcctcttccctccctcctcctcctcttccctccttcctcctcttccctccttcctcctcttccctccttcctcctcttccctccttcctcctcttccctccttcctcctcctccctcctcctcttcccccaccttccttctccctcctcctctttctccctccctcctccccctccccctcctcccttctgtctcctctttcctcctcttcccagcaccaggcccagggctagtcctttgaggagcaagtgaggccatggtgcctgctctttcggaaccctgccctggagtatggggaggtgtcaccagcacatgggatctcgtccttgtaccattgacattccgtggttgagccccgcagcacccagggcgagcacgtggcccacggccgaggtggctggtctgccacctgcacttcctcctgtgaaaggaggtgtgcgggagacctgctctgcccgtcatggcctttccctgcaggcaggcgtctggcccggggtgctagcagggagcaggggctgctgcttgagggccggccccatggccctgatctccttggagccagccctgtcccccacatccaggggtctgggcgaggcccagggctgcgttcctgggagaatgctgaccctgcacttctctggctggtcatggtgtcaccactggggaggctgggccggcacgtcagtctatgcctggcatgcagggccgtccctgagatatttgctctcaccactcacaaaacatccttctcgctcctggattgaacttttatgcctcacagccctaacccatcatttttcaaagcttcctataataatttgaaaacatcttgtaaaaatgacataagtcacagccgcttgcggcaaataactggccagtgttgaagcgagtcagaccgggtgctcctgcaccaagtgtgtgccagccgtaacccgggcaggcctgtcctctggcccttgctgcaggcaccagctcttaacacggggtgcactggggctccccatcacgcaggacctgcccagaatttccacagtggatggtgttcaggagcggtggttaggatggctggcgggggcctcactgacgctccagctcccatgctccccttagaagacagcttttggccgggtgcggtggctcatgcctgtaatcccagcactttgcgaggctgaggtgtgcgaatcacgaggtcaggagatcaagaccatcctggctaacacggtgaaaccccatctctactaaaaatacaaaacattagccgggcgcggtggcgggcgtctgtagtcccagctactcgggaggctgaggcagaagaatggcgtgaacccgggaggcggagcttgcagtgagctgagatcgcgccactgcactccagcctgggtgacagagtgagactcccgtctcaaaaaaaaaaaaaaaaaaaaaaaagacagcttttgtttgtttttaaaattctcatctcggaggaaactttctagaagtaccaatattcttttcaaaacatagcttacagtttttcttttctttttttcttttttgagacagggtcttgctctgttgcccaggctggagtgcagtggtgtgatcacggctcactgcagcctcgacctcctgggctcaaatgatcctctggcctctgccccccgagtagctgggagtacagacgcctctcaccataccctgatcatttttatttttttgttttttttgtttttgtggagatgggggtcttgctatgtttcccaggctggtctctaactcctgggctcaagcgatctgcctgcctccgcctcccaaattgctgggattacaggcgtgagccgccgtgcccaggcttattttcttacgtgcttgtcctagaacaactgaatgtgtaaagtggaaaaaacaaaaacaaaaccccacccagcccagataaccatctctgacattctggcacattc

SEQ ID NO: 19269 - DNA, 2300 bp, Homo sapien
aagcagccgggcagcactgagcccaggaggccctggaggtcagggtctatctggagaccagggtccccatcctcacagtagggcagaggggcacacacccaagagctgcatgtggatggctccatttgactctggtaggccctgaggctcagaggctgccttgcaaggtgggcgggccagggatgctccgtctggggccatgggccagcgctcagcatgtcccccatctgtggagctcctttgcaggtggccaggaggttttgtggctcctaccttgtttctttccagggatgatcccgggggtccctggggtaggtggtcaggattggagaggagcctggggcttggccttccaccctggccaccccgtgtgcgtgggacaccccttcccacagtgtccgtggcttccttgggggtcactccccacagggtgtattgggggctgggggtaagcacgtgtcatggggcaccaacgctggtcccctcaagccaagactccctggtgtggactcagctgtggcgagaggacagtttagcactgggaagttcatgccgcaacatggccttcttctgtagctgtgggtctagggccgtggagacctcttgggtgtttctcctgattctctgccagcctcctggggctgtgtgcacaggcgttggccacttagctcccttctagcctgggccgaggggaaggctcatgtcctgcggggtcccctgactgctgctgatggcactccatgctgagggcggcctgatgggatggtgtgctaggacctgggcaacgggacaccagcagctgctggcaggaccttctcacttgtcagtctgctgggttttcttttttttggagatggggtcctgctgtgtcacccaagctggagtgcagtgatgcgatcacagctcactgtagcctcgacctcccgggctccagtgatcctcctgcctcggcctcccaaagtgctggtatttgggtgtcagccgctgtgcctggcctggtttgctttttaataaagtcaggatgtcctgtgttttctttcactttcttcaaggcggtttgggatttggctccgctggccgctgtgctggtgatgtcctgtgttttctttcactttcttcaaggcggtttgggatttggctccgctggccgctgtgctggtccatttactggctgctggctttctgcatcccgccctcccccggcccacctagcttcctttgtgcccttgagcccctgccctgggacagccatggccatggccacctggacaccctaggagcacccccctggactcccactccagagtcctcgttcagccccatggcagagcagctctcacctgtgctctggcgtgtgcctggcccaactcccttctccccggctgcacacagatgctccatggccccagcctctcccttgtcgtctcgcccacccctttccagaggcccaggtccctgtgcaggtccctcggatgcgtctgctgcctgtgcagggctgtcatgtccttgcctggctggtggcttgggtccctcccacccctagcagcaccacactcctggcaccaggctgtgggaccgaagccagttttctcatcacacaagtgagaggctgcagtggggaatcgcgccccaggccgcctccttgtctgtgccgactctgatcatgcctgtgcggaggcgccgagatggaggcgccgagatgggccggccgcccaggccagggtgtgtttgtttaactttccctcctcttgacagcgattctctgagcagcctcctccggctgcttgccctgtaaactggctgctttgactctcagcacccgctccctggcgtggagcagcagcctgtcgttctgtagccttggggaatgttcgcatggtgcacgctctggggggtgtcctgagtgggggctgctgcaacgctcctgtcctcagcaacaccaagtcctggcctcagcgctgggacttccagtgtgcagagaatgttgcatgaaggaaggtcagagactctcactgggctgcagagaggtcctagaagtggagccgctggggagggcgtgcctctctcaggtccgctgtgaaatggcctgtttctatacagccaggtgctgcccacctacgacagcctggatgagccgtcagtgaaaaccatgagctccatatttgcttcctcccttaatgtggtcaccaccttctacgtcatggtaagagccttgccacgccctctccgcccctgtgtcatgccagcatgatgtgccgtggtgccccgtgggactgccacaggcatggccctggccctgt

SEQ ID NO: 19270 - DNA, 2300 bp, Homo sapien
tggggaggcccccatttctgatagccagctgtctattcattcaaagtccctgaaaagtcaaaccagtttggctacatgtgaaggactggaagaaaattgccgggtgggtgctcttctgtgctgcctggaactcctgcctgagcttccaacctttacctgcatggggtgaccgcagtccacttctgcctgccagaaacaaaaaagattccaaaacaccaagtgtgtctcaggttatgcctttgacaccaaacacggtggttccactgcgtgagctccggacagaggcccctgggcccagctgctccgcgtcagctgcagtgtgccctggctcgtcttagaagtggggagacccgcgctgggagaggcgtccctggggagggtaagatgagactctcctggagctgaggcgaggcccttgtgcagagtggacagcagctccacactgcagtcttcaggaggcgccgggctgggtcccgtcctcgcacacagactgactttccctgggacggctgggtggtttcctccgaatggcatctgcccccacccaggcataggtttgcggtgtaatggttcctcgggttggttagcctggggaggtggccgctgatcgctttaccctccccgctgtcctccagtgccatgtgccagcctggagaggtgtcgttttttgttggtgtttgtatatttccctgtcctatttgctgttgctggttgcaggtggtttttgtcgttttcgtcaccttctcacttgctgcttccttgccctgcgtgtcttgcttggacatggacttttctaaatcccctcttcagaagacacacagatacatcagtcattcagcctccttcagctgtcgcggcttctcatgaagctgttctgagccccagaccctgccctgttgagagttgtgcctgaaccctggcatgcgtggtctgggctagaaaccgcctcccccagcagcagggactgtttggcccccacgcggcctctgagttctcggttgtgagcagcggtgtcaggagtgctgcccgcgtcctttcgttgggtggtccaggcttctgtggctcctgtgctggctctgggggagatctgactgcacctggggtagggtacaccctgcatggaggccgcgccctcagagctcgccgctcacagatacctccagcctggcaggggctgggcccgcactgggagtccacactcgggggagggctgggtccccgggaccttgctgggcgcttcagcctcttcctccctttctctgtgccagtccacgcaggatgtgaaggagtggggtcagtccaactggggctggtgtttgaacctggggaggagaagttgccgagggattgacactgggaatggcgggtgagggtttggcccaggtggggaaaagaaggcgcgtggggccgtgtctcagcgtggtgggctctcaggacgttgtcctgggaaccagaagagagtgctgccctgatttcctagacagcctcccattttcccttgccagtggcaggcatattccggaaccttcttgggcaaggtgcgctcgtgtttggaatatgctgtagagactcagcttccttttggagaatgaaaaggcacattatggccaggagcaacttcatgtttggagcgccgtgttttgttgcttccgggctgtgccgtcactgaggggtgtggagggcgttccttggtgacagcagggccctgggctgtgggctgctgagggggctcctggagttcttagtgtttgaaactctccacagcctcaggtcagcttctggggcctggctcgggtttccgtgttgtgggatgaactcaaggggtgccaggcttcttcagcgagcccataggcaggtccaggaaaggccagggtgagccctggaggtggggtctttgctgctcccgggctctggcgtttggcaacgctgtgcttcttcctaagtagtttaaagtaataaggagtgttttttggacccattcatagttactagcctgtgtgtttcctgctttccaaagctcatcagaggcctgtagcccgtgggaggaaggaaaccaggggcaggaagctggggctgccgacggggctgggccatcctgccacatgcaccgcatctctgggtgcgccttggagccgggacttccctttgcccttctccggctgggccgtgggggaagcgcgggggtcaccagatgaccgctcggggcctgggagggaccctgctgagtcagcgccgtttctcatctgctgcagagaatcccgcggtcagggcggagagaatggcggctccttccgcattcg

SEQ ID NO: 19271 - DNA, 2300 bp, Homo sapien
tgctcggctggaagtgtattttttatcctaggcagtcatacgtgcaggccaattcctattaatttggaaaatggaataaacgaatattaagagacagagagtcagctgggcgcagtggctcacgcctgtaatcccagcactttgggaggccgaggtgagcagatcgattgaacccaggagtttgagaccagcctggacaacatgacaaaatcccatctctacaaaaaaagtgaaaattagctgggcatggtggcacacacctgtagtttcagctactgagggcctgaagtgggaggatcactttagcccaggagggaaaggctgaagcaagctgagattgtgccactgcactccagactgggtgacagagtgagactctgtctcaaaaaaaaaaaaaaaagagacaaatagtcttccccataattgtttagggatatatccatatatggtaaacctttaaagaaaagtaatgaattgatggaatctggattgtgatgtctcaggatagcagggaagaggggaagaaggtgctggaactggggaggaactgaaagggaggatctaagtcttcggtaatattttgttcttaaagctcaatagcgggtccatggtatttgctatttgtgaaaacatacatgtaaattgcccagcctacctcgcatgcataacatttgatgaaaattacataataaaaaggaggttatggaatgtgtatgccatttcatttatataaaagtaaatgggctgggtgcggtggctcatgcctgtaataccagcactttgggaggccgaggtgggcggatcacctgaggtcgggagtttgaggcaagcctggccaccatggtgaaacctggtctctactaaaaatacaaaaattagccgggtgtggtggcgggagcctgtaattccagctacttgggaggctgaggcatgagaatagcttgaacctgggaggtggaggttgcagtgagccaagatcacaccactgcatatacagcctgggcgacagagcaagactctgactgaagaaaaaaaaaaaaaagaacgcaggcatttgttattttgcctgcgtatttaattagtctttacccaggcatttcctcctgttctcctgaaggtggggcacagccttacttggtggctgcactgccagtgcctgaggaacgggcctctgttctaagacacctggtcctgcaggtgctgcagacacggcctcctttcctccgccgtcctcccccagcagcctggaatcacttgctgcttcccagccattcggtctacgcgctcattcattagactcagagtgagcagctaggtgccaggaatccacagatctatcgggacccttctctgttctctcctctccccggtctccatttctacccgaggaattctcatttgtccttcaagctccagcctagaagccacctccttctggaagccctcccgggtttccctgttcatgtaagcctccacctctcctgtcccctccaggaatgtcccttgctcttttcgtgtgaaaaggtgaagttcaacattgccactgatctgggcgcagttcggcagggcaccgcctccccttggagctgtgtggccttagcggagtggccgagcctctctgtgcccagcgtttcattcctacctcctaggtgctaattcctcacaacagactatttttcggctgaggcagtcagggcccccgcccccgtgccctggcgccaagcactcgccccagaatcggtcctgggaataaaggtcaaaaaggaacccttaaacccgctcctccccggaaggcacagcgcctccccttctctccagcccgcgactgcccatccaaaccgaggcctcgcggggcgagtcccttgtcctccagctcgttgaactggggccccgggcacaggtcggctggaccagcttggcgaaccggacagctgcgagaccctcaggtgcccaccggcccagtttccgcccgcccctccgggcccgcctctcattggctcgcgtcccaccaaaccctaccccctggccgtcacttccgggcaacggagcccgtggaaggcggaagtgtgagcgccgcggcggcagctgagttgggctgaggtgtccctagctggctctgcggctcttccgggtctgggctcggagattcacaggcggcccgcgaggccgagcgagggacgcatggccctgaggcggccgcagggcttggcggggtccggaggttgacctcgcccccgcagccggccttcgaggctgcctcctccaggcagcctctggggcccgcgcccgcgcctgctcag

SEQ ID NO: 19272 - DNA, 2300 bp, Homo sapien
tgcgtgtgccatgtgtggcctgggtttggagctcagcaccctgcgggaattctattaaatctccgattttatctgaaaacttcacccacatgttgcattgctctgtgaggcgtctgtgtgtgtccaggcagcagtaacaacgctactaatgctggcggccatcacaggaagccagtccgaacgtcccccaagggcctgtttcaccctcatgacaccaggcgtggcagagacgaggagcagaggcctggacctctcagggtctcagcagggggaggccggcctgtcacgagtgtttgatgaccatggagaggaggtggtggaggtaagcgtggctgcttccaggggaagggcgggcagtgctgggggaggggttctgtattgattaagcacgtactgtgtgctaggtcctctgtgggcttcatttaatttattgccacagccacgggagggaggggtggttagcgctatatttcagatgaggaaacgaggctccggtgaagacacttgtctagtcctctggctgtggaaggtgggaaagggatgtcaacctgggctcgggagagataaggaagctgaggcctagagccttgtcaggcctggagctgctgtcctcccgctggggcagcaccgcctgccttcatttagagcagcagatcctacagcacccgggtcctcacctatcaaaggcagacaccattcctgaccacgtgatggcctggacgagaccagtgtctgggtgtctgggtgtctgggtgtctggatgggaactgggagggcccggccaggcccggcacatggtgactctgcctgccctttgcagctgagagctggcctctcctagacctcaatgtccactgacacccagtgcccctgcaaccttctcttcctgccccacgaaggtggcactctcctgggggccgctccagccctctgcctggggagcaagcggaggggcctgggaccccacctgtgttcctgtctctatccctcctcagctgtcaccagctttaattaccccggctccatccgccccggcccctgcgcagctggagagccccttgggcgggcgcagggcccctcgcctgggcacgcagcattcctgcattcctccccggggcccaccgacctgtcctgccggttgtgggcagcttccgggtgcggggagcccggcgtgtgtttgggggggtgcgcagctgctggatggggagcctggagagagcccggctgtgccccgggactcccagctgcgttgcccacatccctctgccaccccgcatcacgaccggagcctggcaagaagtcagtgattcatcactcgggccctgggggctgcctggaggggctggggtgcttctaacagcaggaaagggaaggcaagagagaaccttccacagttgggagcagcaaagcggcccaggaagccccccaacaggatgggaccatctaaggttccagccaccccaaccccccggagcagggcccccagcctagtggtatgtggataagccctgcctggggtgcaccttctcggggagaccctctgctctttgggctactgtcctggggagcctcccccttcctggggctgggtggaccagctgcggaatggcagctccccctggaggggctggggaagaagtggggcgtgctgtccaccagctcctccctaccccgaggcgccccagatgatctgcctccagctccaaacaggagtagtggccacctgtgagtttctctgaggcccaagtggtcactgccggagctgcctgtgtccctgtgtccggacaggctcctctccacctctgtgtttgggcagctctccccttgtgtctggaatttttagaaaacggaaaaagtgtagacaaaagcaggctttttatctcgctgaatgctccaacaccctccctagttacaccacggtagtggaagattcagaggaagtttcctcctggtggccgtgattaccatctgcagttcttgttcggggacattgcaaaggtcacattgtccgtccagccccgccccgccctgacgttgctcccggagtggggacgggctctgaaccaccccagctctcaggggccccgccctgggtaacacacgtctgcggtgttacccacgactgcctgggacctggccaagggctccacacaccaagaccaaggtgaggggaggtggtgggtggggaccagccctgcctctcttggagaccccgagggtatggcgccaggccagcctggagtcgggtgtggggcggttagtgtgagcattacgtcttcttttccctaaagtggctgaaa

SEQ ID NO: 19273 - DNA, 2300 bp, Homo sapien
tgtgcagagacactttcggctggcatggtggttcatgcctgtaattctagcactttgggaagccagggcaggaggattgcttgagcccaggctggacaacatagtgagaccccatctctgcaaaaaacacaaaaattagccaggcgtggtggtgtgtgcctgtagacccagctacttgggaagccgaggatcgcttgagtccaggaggtcgaagctgcagtgagccttattctcaccactgccctgcagcctgggcaacagagcaagactctctcaaatcaatcaatcaataaatttgactgcaggtgccagaagtggactctgactaactgaagccgggagcaggtatttggttggagcttgcagcagggagggcagggggaaggcgctgttcaggccccaacagcagcggctcgggagtggccccagcacaagcccagtgtccctcggctcagcattcaaattccaggaaaagagtcccgatggtccggcttggtctagggctgtggcccgtggcaggtccccaaaaccacacctgccgctccagtgccccccaaggctgcatgaccttcgtgtggacaggatcatggaacacatgacctcacccaagcctcccaaccatgccgtgatccagcactgttagaatcatccccgtttcacagagcagagttgaagtgttgggtgtttaaacgctgtgcccagggctgtccagccagggagtggaatctggtcctggcccagaaggcagcagccccacccaggccacctgctccaggtccccgggctccacagactttcacatctactgcagaggcgcaaggacgttccccagcatcaaagccctcagaccctggtgccagccacgtcgtcacagaacttgtagaccagaggatgccctgcggatagagggcctgccctgggcctgcgccaggctgggcatattgctgaggtccctgctctgtgctggcaaaatccagacctcaggagaggggcaggcaggctctgagaggttgcggctgcccagggcctgcagctgggaggagcggagacagaccccccctcccctgggacacagttgctctgcaccacacagctccgctcctggcgtcccctggctttgccgggggcggccgacccagctggccaggccccctccccctgccccacaggtggccctgagctgctgaggataaggcatgctgggcgatctctgctgattagagtcgccctccgctgtgggctaggggcccctattttgctcctgagatcccagtcggcccatagaagccctcacaggctctcccgggggtccaaggagtcccaggaggcccccgttcaccccgggtttgccttctccctcctgtaatttgcttttcatatgcgtgaaggggaactcagcaggagcagaagatgatgtggcctcgtgggagcgtgggagagctgggacggggtggtggggaggagcggggacccagggacaggggctctgggtccaaccaccaggccttttgcacttcgtgctctctgtagcctcagcttcccccgagggtcaggaactccaggcaggggcatggggcagctcagaaaccttcctgagccccttcccctggcaagaggcaaaccaagcaggtgagggctgggccctgttctcagagctggcatcccagccctggccagatccaggctgagggcggcccagccccctgttctgcctggtgcagaggacacggcttccctggccggagcccccgccccctcctctcctttcttggcgtctgcccctgggcgtgccctaccattaagcccttgttggttccacaagctgggggcaccccttcctcccttcctccgggcagccattggcaatggctggcggctcgggacagggcccgtattctctgaaaatgatggctgggctggaacccgggatcgattctcagacctgcgtcatgtggagtcccggatgcttgttacgaattcggaccctggcctgtgcctgctccctggtacctctgaacagggctttctgccctgggggtgtgaagagggccaagtccactccccgactggggtcacgcctgcctcctgtcaggactgtgaacactgcgtccccatcagctcaaagaatacgcatggggacaagcctggggggccgtctgagagtcccccaaccctggatccccacggcagcccccactgttgggtttttcagtggctggtgtgccctgggctggtcacctctgcattttgctctgctgggagtttgctcctggccctccaacagcgcctcctctgtgagg

SEQ ID NO: 19274 - DNA, 2300 bp, Homo sapien
tcagtgccagctggtgtccgggaggcacctggagcacctgtctcagggagtctttctccagcctcacccctaaggcctcccattgaccttggctctttcccacacagataacttctacctgcgcaacctgccgccccagcccacgctgctgccggccaaccacaacttccccagcgtggcccgggccgcccctgcccaccccatgggctcctgcagccgggatcgagaccggggtgaggcaggctccctgcagaagggccccaaggacttcgaccgcttcctcgtgggcaaagagctgggcagagagaaggcgggcaaggccgctgagggcaaggagcggccagcggcagaggaggacggtggcaaggagcggcacaagctggtgctgcccgtgccagccgacgggcactgcagggagggcggccccgcaccccgaggggcctgcgagggccgccccaagcacctcacctcctgcctcctcaacaccaaggtgctcaacggcgagatgggcagggctgcgctagccagctgtgcagggggcatgctggggcggcctggcacgggggtggtgacctccgggcgctgtgcaaaggaggcagcaggccccccggagcccgggccggccttcagcgagtgcctggagcggcggcagatgctacaccacaccgcatcctacgccgggccacccccgcccctcagcacagccgccggctccttcccctgcctgcagctgcacgggggccctgacgggctctgcccgctgcaggacaaagccccccgggacctaaaggccagcgggcccaccttcgtgccttctgtgggacacctggccgacaagggccgccccttccaggccgccgaggcctgtgccgtggcaggggagggcaaggaccggcacctggagggaaccatggcccccgaccacgctgcaccctatggagtctcctatgcccacctgaaggccgagggcaagggcgagcggcggcctgggggctttgaggcggccctcaacccccggctaaagggcctcgactatctcagcagcgcaggccccgaggcctccttccccggactccctaaaagcggtctggacaaaagcggctacttcgagttgcccacctcttcacaggactgtgcccggcctggtcaccaggacccgctgggcgggaaggccccccaggcctgctgcactttagataagactgttggcaaggaagccccggccggccccccaggggcacagaaggtggcccgcatcaggcaccagcagcacttgatggccgccgaggtggagcaggggggcattggggctgaggccaagcgcaagtccctggagctggcatccctgggctacagtgggccccacctgcccccatggggtgtccaggcaggccagggcaccgccatggccatcagcgaggagcgcaaggctggcgcctacctggacccctttggcagtggcctgcagcaggcggctcttctgccccaggaactgcctgcgccgccggacgaggtctcagccatgaagaacctgctcaaatacagcagccaggccctggtggtgggccagaaagcacccttggtgggcctgggtggcctcaaggccagctgcatccagcaggaagcaaagttcctgtcctctaagggcccaggccagtcggagaggccggactgtgcccgcagcagggagcacgacaccacgcacggcgacggggaggtgcggcagccccctgtgggcattgcagtggccttggcccggcagaaggacacagtgagccggtctgaggcagcctacggcaccaacactgcgcggcagggccgggccgcccccgccttcaaaggtacaggccctgcacagagagggaggcaggccgggacagtctagggggcccagctggccctgccctgcgccccggctccccagctcccacacctgcccttggcagaccctccgaggccccaggaccaggggatcctcctcagtgcatcaggccccccagctcgaagcggggtcactgcttgccttagctggtggctccctggccgccccaaccctctcccgtctgctgtctcgaccctgtgcaggtggcggtgggccccgttccacacacgcgctggacctggaggctgaggaggagaggacgaggctatgtgatgaccgcctggggcttgccagccgcgagctgctgctgcagtgagagctgggcctgtggccctggagagtggggctaggcctgggcttggggctccccactcagagccacgtggagaaagaggggtggtcatggctggggcagcag

SEQ ID NO: 19275 - DNA, 2300 bp, Homo sapien
gggcccagcaggaaggggccctgagcactgctgctgggggtcacagagtacgtcagggggcaccagctcccctgggcaaaacctcctgactacaggcaggggcatgtaggtccctagggcgaaaggctcaagggtcccacaggcaagtggccaggtgggcgggaggcgcctccaggcgggactcggctgggaggtgggcacgtgggcgtcagcacgtgtggggaggtctggttctgggctgggtggggtgacggtggcatcacatgggaggcactgcaggaggtggagaggaggcccccgctcctgggctgcagggcggctccactgtctgtgtggtcagggagcagaaccccagagccctcccctcaccctccccaccggctttggcagccccgcctccctgtttcgggcgcctactgggggttccagctgcaagctcaggtgtgccgtccacaggggcctccggtgacgaagatgaggacctggactcagtagtggtggaatttgacgatggggatacaggccacatcgccgtctccaacgtcaggctgctgccccctgacttcaagatccagtgtgagcctgggagctgcacggggcagggccctgcctgggctccactgtgtccagacgggctcccaaggaagggttggggtggcagtcaccccacagccatggcactgaagcccttggcccatgctatccacaggcacagagccctctccagccctgctagtgtctagcagctgccggaggaccaagaaggtatccagtgaggcacccccgcctagtgaagccgccacccccagcctgtcccccaaagcacaggacggccccgaagctttgaagacacctgggaaaaaatccattagcaaagacaaagctggtattttaccggacttcccagaatccggatcggggaaggcaccctctgggggctgggggaaccaggaggcccgtggggtaggcagggtccggggaggggcaggtggaggcagctttgtgggcccagctggggctgactctgctgggcttttgccctcaggtaaagccgaactcctaacctcaggtgccaaatcccccacgggggcctccgaccacttcctgggccgccgtggcagccccttgctgagctggtccgcggtggcgcagaccaagcggaaggcggtggcagcggccagcaaggggccgggggtgctgcagaacctcttccagctcaacggcagcagcaagaagctgcgggcccgcgaggccctgttccccgtgcacagcgtggccacacccatatttggcaacggcttccgcgccgactccttcagcagcctggccagctcctacgcgcccttcgtcggggggaccgggccgggcctccccaggggagcccacaagctgctgcgggctaagaaggccgagagggtggaggccgagaagggtgggcggcggcgggcgggcggtgagttcctggtcaagctggaccacgagggtgtgacctcccccaagaacaagacctgcaaggcgttgctcatgggggacaaggacttcagccccaagctcgggcggcccctgcccagccccagctatgtgcacccggcccttgtgggcaaggacaagaaggggcgggcacccatccccccgctgcccatggggctggcgctgcgcaagtacgcgggccaggcagagttcccgctgccctacgacagcgactgccacagctccttctcggacgaggacgaggacgggccggggctggcggccggcgtgccctcccgcttcctcgcccgcctgtccgtgtcctcttcctcctctggctcgtccacctcctcctcctcaggctccgtgtccacctccagcctctgctcctccgacaacgaggactcgtcctacagctcagacgacgaggacccggctctgctgctgcagacctgcctcacccaccccgtgcccaccctcctggcccagcccgaggccctgcgctccaagggcagcggccctcacgcgcatgcccagcgctgcttcctgtccagggccacggtggctggcaccggtgcgggctcaggccccagcagcagcagcaaatccaagctcaagcgcaaagaggccctgagcttctccaaagccaaagagctctcccggaggcagcggccgccctccgtggaaaaccggccaaagatctcagccttcctgcccgcccggcagctctggaagtggtcggggaatcccacacaggtaggtccagcgggaggcgggaggagctcctggttcccaaggaaaccggggcgggctcatgcgcccctgctgcc

SEQ ID NO: 19276 - DNA, 2300 bp, Homo sapien
ttctcagcacataagggggcggggtagccccaacccggagcgcgcgcctggggacaatcaggcctgtgatttgaggggcagggatgtgtcgggtcgggtagaaaggggcctcggtcttcaaacgaacggagatccggggcagggcgccccgtggagggacctgcatggtggtggctgcgcttggggacgggcgggctgtttcctatggtgaccggggcgaggtgagggctcctgagagctcccccgcgcccagggacgcagagcgtcgcggacccccgccgcgccccttcctcagcccggcactggcgcccgagatcctcgtggagcccgaggggaaagattgcaagggacgtcccagggagcaaagccccgcagcgtggccggggactcggggacccaccccagctccggcgcggccccgccccgggtcaggcagtttcggggcgcagcagggccctccccacggcgcggcagtcccggggaggggccaggcccgtcagcccttcggccctcccggcgaccctcggagggcgccccaactcagacccgcccgccggcccgcgcagggtcgcgagcgcgcgggggtggcgcgggcggggccgttgggaggcggtgcgggctgggggcggggcgggccggggccccacgtgtccctgcccggcgggccaatgggtgcccggctttcggaaagatcgccatatatggacatgttctggggccgcgcgcgccgccgggccgcgcgggcgcgccgcttccgcttaaataacggcgggggaggccgcggtcggtctcagtcgccgctgccagctctcgcactctgttcttccgccgctccgccgtcgcgtttctctgccggtgagcgccccgccccggggcctgagctggacgtcgcaggcctgcgccccccgaccccggctggccccgcttccagctgccgaggcctcgtcgcgccttccccgggaacaaaaggcggggtgggccgggtcaggcggacggggctgggggggcgccgggggtccagggcggggcccggccgcagtgcagacttccgagccgtggacgttacgtaaaaggcccggccttcggttccaggcggttgcgatcttggaggccacggccgctggggttggggcagggccgaggcttccccgcgggagggcattaggtggctgtggggaggggaccgtgttacagacgcgcccgcctgagtccatccttttccgggcaggtcgcaatggaagaagagatcgccgcgctggtcattgacaatggctccggcatgtgcaaagctggttttgctggggacgacgctccccgagccgtgtttccttccatcgtcgggcgccccagacaccaggtgagtggatggcgccgcggggctcctgggttctgcgttgcggggtgggttcggtgtcgccggcgaggctgacgggtcgtcccctgcagggcgtcatggtgggcatgggccagaaggactcctacgtgggcgacgaggcccagagcaagcgtggcatcctgaccctgaagtaccccattgagcatggcatcgtcaccaactgggacgacatggagaagatctggcaccacaccttctacaacgagctgcgcgtggccccggaggagcacccagtgctgctgaccgaggcccccctgaaccccaaggccaacagagagaagatgactcaggtgaggctcggccgacgcccgtgctcctcccgtcctttccccagtcattttctgcccggcttgatttctgacatttaagtgtttctttcgctgttccaggctctgttcctctcccggcatttcctccctgaagcctccaggtttctcatttggtttctgcctgcgttcttttcttttctccacacatcacactggcatgcagcatgttgtggcgtgtgagcatggggtggccgtgggtctctgtccctgactaagccgccccttgtcccttctcagattatgtttgagaccttcaacaccccggccatgtacgtggccatccaggccgtgctgtccctctacgcctctgggcgcaccactggcattgtcatggactctggagacggggtcacccacacggtgcccatctacgagggctacgccctcccccacgccatcctgcgtctggacctggctggccgggacctgaccgactacctcatgaagatcctcactgagcgaggctacagcttcaccaccacggccgagcgggaaatcgtgcgcgacatcaaggagaagctgtgctacgtcgccctggacttcgagcaggagatggccaccgccgcatcctcctc

SEQ ID NO: 19277 - DNA, 2300 bp, Homo sapien
ggaggggcttgtggctattccccacccgcctcgtgtccctcggtgtgtgacgtcgcatcttgggaccccccaagtggaagtcctcacccgggggtcgagcaggctgtgtggttctgcccagggacgcgagtccgggtgggtctgttggaggcccagccccggcttcgccacgggagggaacatacctgacagccttgcccgggcccccggagattctgggcctgggggcgctcagcacccctgggaggcctggggcacgggggccttaggcacgggtctcggcgtccgggctgactgcagcccgcaggtgagctgggccggccgccttgccctgactcgctgttgtcactcccaaacacggggtcgcgagctaacgttgcagggccccggactccgcgtggggaccccggccccgccccccagcctgtcgagtcaatctgaacgctctgcgacctcgggcgagtccgtcccctcactgcgcggcctcactgccacccctacgcggccggcgctccaaccctgaaaattccagcagcgcacaaggaaaccgtagtgccgggcgcctctcggggtgtaaccaaagcaccggcgccgctcctggcgaggagtgagcgccctggacaagcctgtggctaaacccacgccagccctgatcgctgctcttaactagcatcgtaaacagaagagggtatccccccgaccgcccgaagctggggagccgaccttcaaaaaagtcagggctcccattgtctacctcagtttccctataatgtctacaggtgaccagaatgaaacaaaggcctcactccacaccaccttctcagcacataagggggcggggtagccccaacccggagcgcgcgcctggggacaatcaggcctgtgatttgaggggcagggatgtgtcgggtcgggtagaaaggggcctcggtcttcaaacgaacggagatccggggcagggcgccccgtggagggacctgcatggtggtggctgcgcttggggacgggcgggctgtttcctatggtgaccggggcgaggtgagggctcctgagagctcccccgcgcccagggacgcagagcgtcgcggacccccgccgcgccccttcctcagcccggcactggcgcccgagatcctcgtggagcccgaggggaaagattgcaagggacgtcccagggagcaaagccccgcagcgtggccggggactcggggacccaccccagctccggcgcggccccgccccgggtcaggcagtttcggggcgcagcagggccctccccacggcgcggcagtcccggggaggggccaggcccgtcagcccttcggccctcccggcgaccctcggagggcgccccaactcagacccgcccgccggcccgcgcagggtcgcgagcgcgcgggggtggcgcgggcggggccgttgggaggcggtgcgggctgggggcggggcgggccggggccccacgtgtccctgcccggcgggccaatgggtgcccggctttcggaaagatcgccatatatggacatgttctggggccgcgcgcgccgccgggccgcgcgggcgcgccgcttccgcttaaataacggcgggggaggccgcggtcggtctcagtcgccgctgccagctctcgcactctgttcttccgccgctccgccgtcgcgtttctctgccggtgagcgccccgccccggggcctgagctggacgtcgcaggcctgcgccccccgaccccggctggccccgcttccagctgccgaggcctcgtcgcgccttccccgggaacaaaaggcggggtgggccgggtcaggcggacggggctgggggggcgccgggggtccagggcggggcccggccgcagtgcagacttccgagccgtggacgttacgtaaaaggcccggccttcggttccaggcggttgcgatcttggaggccacggccgctggggttggggcagggccgaggcttccccgcgggagggcattaggtggctgtggggaggggaccgtgttacagacgcgcccgcctgagtccatccttttccgggcaggtcgcaatggaagaagagatcgccgcgctggtcattgacaatggctccggcatgtgcaaagctggttttgctggggacgacgctccccgagccgtgtttccttccatcgtcgggcgccccagacaccaggtgagtggatggcgccgcggggctcctgggttctgcgttgcggggtgggttcggtgtcgccggcgaggctgacgggtcgtcccctgcagggcgtcatggtgggcatgggccagaaggactcctacg

SEQ ID NO: 19278 - DNA, 2300 bp, Homo sapien
gggcgccccccgtccgttacttccgccccccgcccgccgtgactcaggcccggcggcgggcggggatggcgctgccccgggccgggcttcccggcggaggcgggcggggctccggcggcgccgaagtcgccaaatatggccgcgccaccgccccccgccgcgtacctgggccacaccttgacccctgccgcgtgacgcggccgcggaggaggaagtcgctctccacccccggcccgcggcggcgtcccctccccgcccctccccgcggctcaggccctgcgggtggcggggaacccgggggtctcgaggcgccagcctcgcccccgcccccacgaccctggcggcctcgggtccgcaacgtggggaagaaaggtgggggacggggacgcgcgcccggggccggcacctccccgcacttcctagacaaagaagcttcggaggagaccagagacccggaggggcagggtccccggccggcccggagcagaacgtagtgtggggtgaacgcaggatggaggggcttgtggctattccccacccgcctcgtgtccctcggtgtgtgacgtcgcatcttgggaccccccaagtggaagtcctcacccgggggtcgagcaggctgtgtggttctgcccagggacgcgagtccgggtgggtctgttggaggcccagccccggcttcgccacgggagggaacatacctgacagccttgcccgggcccccggagattctgggcctgggggcgctcagcacccctgggaggcctggggcacgggggccttaggcacgggtctcggcgtccgggctgactgcagcccgcaggtgagctgggccggccgccttgccctgactcgctgttgtcactcccaaacacggggtcgcgagctaacgttgcagggccccggactccgcgtggggaccccggccccgccccccagcctgtcgagtcaatctgaacgctctgcgacctcgggcgagtccgtcccctcactgcgcggcctcactgccacccctacgcggccggcgctccaaccctgaaaattccagcagcgcacaaggaaaccgtagtgccgggcgcctctcggggtgtaaccaaagcaccggcgccgctcctggcgaggagtgagcgccctggacaagcctgtggctaaacccacgccagccctgatcgctgctcttaactagcatcgtaaacagaagagggtatccccccgaccgcccgaagctggggagccgaccttcaaaaaagtcagggctcccattgtctacctcagtttccctataatgtctacaggtgaccagaatgaaacaaaggcctcactccacaccaccttctcagcacataagggggcggggtagccccaacccggagcgcgcgcctggggacaatcaggcctgtgatttgaggggcagggatgtgtcgggtcgggtagaaaggggcctcggtcttcaaacgaacggagatccggggcagggcgccccgtggagggacctgcatggtggtggctgcgcttggggacgggcgggctgtttcctatggtgaccggggcgaggtgagggctcctgagagctcccccgcgcccagggacgcagagcgtcgcggacccccgccgcgccccttcctcagcccggcactggcgcccgagatcctcgtggagcccgaggggaaagattgcaagggacgtcccagggagcaaagccccgcagcgtggccggggactcggggacccaccccagctccggcgcggccccgccccgggtcaggcagtttcggggcgcagcagggccctccccacggcgcggcagtcccggggaggggccaggcccgtcagcccttcggccctcccggcgaccctcggagggcgccccaactcagacccgcccgccggcccgcgcagggtcgcgagcgcgcgggggtggcgcgggcggggccgttgggaggcggtgcgggctgggggcggggcgggccggggccccacgtgtccctgcccggcgggccaatgggtgcccggctttcggaaagatcgccatatatggacatgttctggggccgcgcgcgccgccgggccgcgcgggcgcgccgcttccgcttaaataacggcgggggaggccgcggtcggtctcagtcgccgctgccagctctcgcactctgttcttccgccgctccgccgtcgcgtttctctgccggtgagcgccccgccccggggcctgagctggacgtcgcaggcctgcgccccccgaccccggctggccccgcttccagctgccgaggcctcgtcgcgccttccccgggaacaaaagg

SEQ ID NO: 19279 - DNA, 2300 bp, Homo sapien
gcttcccccaccgctcacggaccaaccgagctgtaccctcaaaatccaacgggaggccgggcgcagtggccacgcctatcatcccagcactttcagaggccgcggcgggcagatcacttgaggtcaggagttcgagaccagcctgggcaacatggtgaaaccccatctctactaaaaatacaaacattagccgggcacggtagcaagtgcctgtaatcccagctacttgggaggctgaggcaggaggactgcttgagctcgaaggttccagtgagccaagattgcgccactggactccagtttgggtgaggagcgagaccctatttcaagaaaaaagttttttaaaaagaagagccaatgggaaagtgaggtgcaggcagcaccctagcttgtatccctaaaccagagacagttccctggcatcggtgctaggcctgtgtcctcagtcccctggaaactgtgggagagtgtgtgtgggcatcgtctctgggaagggggtgaaaccccagactgcgtctccccaggatggtgcctggcacgtgacctggtttcgcacacagttggtgcctcataaatgcgtgtgaatcatagaggcggatgaggccagcacacagggagaggcgagagcaggccctggcgtcgtggcgtacgctgtgccctggggggtatttgcatgtgggagtctctctgcccccaccctggcccctgagcgtggggacagtggggacaggtctcctctttttcctcccctgtgtctgcaggtgcctggcacggttgctgtccagggcttagaggacagaggaagagcccctgagtctgtgcacactctgccaccatggccctgcccacctctggagcccacaggtgcccagcccaggccccttgcttttggctagactcctgccctacggggacccccatgatggccactcaggagatgggcccaggaggacaggggagtgactccaggccatgaccggaaggggcctgtggcccctgttcccagtccccagggagacgggagggtcacacgctgttatgaggaagaggacaccgggctggccctggcccagggtggccagctctggtttcactacttggccccaagcccctgaggcaggtgcaggagccaggcacggtgagcagggcccagtgcccctcaggctctggggaaggggtacagccaggtggcccagagcaaggaggtgctgtagacaggtgtgaccacttccagtctctcccggcctgctggccttcatcctctcccagattccaagggccaccgctgggagcatggggtggacatcgtcccaccagcctcctggatccacatccgtaaagactccaaagtgaagtgaggctggcttcactccagctcacagcagaggagggggcagcctcagggcccagcaacttgctcagagcgcacaggagtgcgctggggccgggccagcctggcccagggcctctgactctgccccctgcctgcagggctgcacggccactgtgttccaccctccagcgtgggtggcagtccagtgcgtcattctggggcctgagcagtgtggccagaggccggtctggggtggaggcgacctgggctgcaggttgtggctggggtccttgctatgcttctggcagcaggaatcagagaagcagtaactggatccagctgagggcctggcggccaccgagggtacgggcggcgatcaggttgcggccgagccgtgagcgttccactggacggcttctacatccggaagggctgggccgggccgggccgggagcccacacggggttggaggaggggggcaggaacgagagaggccaaaaggtgcagggccgtgaagaggggcgctgggcccacgctatgaggaaaaggggatcaaccctgccctccagccccgtaggccctcaggccctcgggctctgggctctgtgcaatccgggagtggctgaaatccaagctgagggtaatgaaaggtgctgctcctaagccgcacgtctctgatccgccctccccgcccgccctctgctgcccgcgggccctctaagagctgcccaggctgctgccgcgggtcagaggcgggtcagagcaggcagggggttcgtgacgccggctgggtctgggggctgtgggccagccgagccgacccgggcttctgggggaccgcgggggccgtgagcactcagagggcgcatcccaggcccctccggggacccggccagcctgaagatgccgacgaacggcctgcaccaggtgctgaagatccagtttggcctcgtcaacgacactgacc

SEQ ID NO: 19280 - DNA, 2300 bp, Homo sapien
aggccaagccctcctcaaatgccgagtgttgagagcaggttccttggaggtgcatgtgagttgggtacatttcgcccagtccctgtacactctggcggcacagcggggctggggactgcccactgtggtccctcctttcctgccgctgtagatctcctttttgttccacgtgacctgctctcttggcccctcagggtctgcgtcgcagctttcttttcggggggaccacatggcgtcttgaactaggcgtccccacagcaggatctcaggctggcaggtgggcatgaacgtttgtaaacacaccagcactgatgcctccacatgggtggccctggagaatgccccaacagaggtcaggacagctggggacgccgtctcagccctggtggccagcaccgctttaggtcaggaggctgcagtgccaaggacagcaagctatctaaacccccagtgtgtgcccgggggtgtggggacaccagtgcggctcatccctgtgtctgctctttcacaagccacagtggtgcccccacaccccctgcacagctgaggctgacagggttggatggtgccactgctctgcacagacagcagccccgtggaaggcccctcaggctcccagcctcctgagacctgctggcatccagctgagggtggggagatgagtcctgcaggcgacccagatctgtcagctctgggatccctgtggcctgtgatggcgagtgaggggctggcacagccctggacacacacccctcccccaggcgtgtgaacacagaccctgcacagtcctccgcccgctcatctagggccttcttgggagtccccacgggctggtctagcccctcactctccgagccctgatgctcagagcaagacacgggcacaagcgctgtacaaaggtcagagccagaagctcctgcccacgggtggcagaggacagccctggagcacagcagggatgggaccgttaaggggtgcaggcctgcctcggtgggtggctcgcttggccccagctctcccagcaagcacggggccatggccccattgaaaaggctgggtttggagtgtcaccacccactgaaaatgctgggtttggactgtctccacccgctgaagaggccgggtttggagtgtcatcagggcggccgtgctcccttagatgtggcaaccactgagggagacaaaccctgactaggagcaccccacaggcccctcccactccacagagaggaacgcaggggagagccaggcaggggccccaggcctcccagacacccccttggagcagagccctcctcaggggtaactgggtcacagggacgcgtcttcctcggaggccaccccggtggtgagggctcccaagcagcgccagggctctggaaggagcccagtgagagagggtgggaaggggcgagagaaaacagccgaggcctgaaggttcacggacagacagggtcgtttgtcacagcagagaagcacctcacggctcctacccgcactcatcgcggacagtgcctgcagcgggagcggcgcgagcaccctccccagatgaaaacaccagcaccaggaggtgggccgtagcccaggctgagggaggaggctgggggctggggctcagggcccccccccggccacagcgccaccctgagtggccctgaaaatagtgcacagtgctgggtactgccccggccggaggcacctagttgttgagcattccggccacaggccacccgctggcccttccttggtgtggcacgagaccacgggcacttgcaggagctccctgcatgctgttttgtgctttggtctcagggagcaccctcctacctcggggtcccagagtgggcagccgggcaggtgtgaacagtgtgacaagggtaccgtggggcacctggtagtgccacccagaggggcagccggtgctcctggtggtgtggcagcaacagttacaaactcaccccaagtccaaaccccagaaatcctgtttctctggccctccgggtccagaatgccctgcactgcctcctggcctcaggggctgctgcggtggtgggaaggctgcccagcagtgaggaaggcgagtgcaggggctgcggccgcggtcagagaaggagagacaccagcagaggacgcgaagctggaccggccaggttcagagcccgcctcggttgctcccaatcagaatctgctttgtgctccacggcctccaagcactttcatgagcgttctgctcctacgtggccaggtcctaccttccctgacggctctggccaggccagctcggtttccctctaacccat

SEQ ID NO: 19281 - DNA, 2300 bp, Homo sapien
cttctcatacctggcagattagcctaggtccccggagcaccagcttcatcctctgtcctctttcctcctgtggcccaagaggagaggtcaggtcagatggctggaggcagcttccagagaggctcggtgtgggtggggccgggagaaacatgcccctggggcgggggctcactctctggtgtggctccacacccaccgtgtgcttgtcgtggagccaggctcggtgcctaccaggcctgagtcaagatgtggcacctggtgctgtgggtgtccccccgctcccgggggtcatgtctgtccttcgcagagtgtcttttctaaagaaggcggttgaccagcggaacaaggcactgacaagcctcaacgaggccatgaacgtgagctgtgcactgctgtcaagcggcacgggccccagacccatctcctgcaccaccagcaccacctggagccgcctgcagacacaggatgtgctcatggccacctgcgtgctagagaacagcagcagcttcagcctggaccaggggtggaccctgtgcatccaggtgctcaccagctcctgtgctctcgacctggactcggcctgctccgccatcacctacaccatccccgtggaccagctcggccccggtgctcggcgggaggtgacgctacccctgggccctggtgagaacggcgggctcgacctgcccgtgaccgtgtcctgcacgctgttctacagtctcagggaggtggtgggcggggcccttgccccctcagactctgaggacccctttctggatgagtgcccctccgacgtcctgcccgagcaagagggtgtttgcctgcccctgagcaggcacacagtggacatgctgcagtgtctgcgcttccctggcctggccctgccacacacacgggccccctccccactcggccccacccgagaccctgtggccacttttctggaaacttgtcgggagcctggcagccagccagcaggacccgcctccctgcgggccgagtacctgcccccatctgtggcttccatcaaggtgtcggcggagctgctcagagctgccttgaaggacggccactcaggttggtggcactgcttggctttgctcagccttggggattttttttttttttttaagagacaggaacttgctctgttgcccaggctggagtgcagtggtgcaatcatggctcactgcagcctcgagctcctggcctcaattgatctcctctgggcctcccaaaatgctgggattacctgcatgagccacttcaccccacccacctcgggcctgtggacatgggctgttcctccctctcccagctgctcctggggcatcctggccccccagcccagcgagctctgctcaggaaatgagcttcgcctgcgttctctctgctgttgggctctggccttatgtggagccctctcaccatgtatttcttttcagttatgttttttaaacctatatatggaagcgtaacctaaatacagaagagtcacaaaggagcaaactgtgagcttcacagtgcgggcacccggggagggaggcagctgcgctcaccccaaagccccagcaccgttcatcaggcatgtgtgagctccacgaaatggagtgtgcagtcccttctttgtgtctgtcctttgctcccccatgtgtgtgagaccctctgtgtcgcaggtgcagatgtcaccgttctgctgcagatgggtatttggatggtttctggatttgggcttgtgcagagagggcagccgcagccatcccctggggtgtttctgcccagtgccgggcggagctgcctgctcctaacatcggctcccaggagcattagcaggtcccccaaagtgaggttttcaccttccacagatcgtaactgccaccacccatcgtaggacttgttcagcagagaaagttgagcagtggcctccttcctctgggtcagctggccacgccgcagcttagggtggggctggggacagctgggatgcttagatggctctgggaagggcactttggggcaggtatgcagatgcccacctggtaggatcggctgagcccacctggtaggatcaggctgagctctcggctgatgcctcccctccaggcgtgcccctgtgctgtgccaccctgcagtggctccttgctgagaatgctgctgtggacgtcgtgagggcccgagcactatcttccatccagggagtggcccctgatggcgccaacgttcacctcatcgtccgagaggcaagcaggggttcagggaaacgagccacggcaccagcagttcttggggtggggcccctg

SEQ ID NO: 19282 - DNA, 2300 bp, Homo sapien
cagggtcgggacagtgcatttgccttgggactttctcttcctcactggacactggccttggccgtcttccaacttctttcctggagtccagggaaacaccaccgagtgtcatgctgcttgcccctcccagccgctgaccaggccccatgtgtgtctgtcaccaggtggcaccaagctcctggccctgtccgccaaaggccgcctgatgacctgcagcctggacctggactctgagatgcctggcccagccaggatgaccacagagagtgcaggtcagaaaataaaggagctgctgtctggaattggcaacatctctgagaggtgagcagctcagctcggaccgggtagaggctggcgctgccatccttgggaggtagcgtccctgtgtggggtcgtcctgggtgtgagtgtcctcgggtggcaacggtccaggccaggccattacttggcctctttttttttttttttttttttctgagacggagtctcacactgtcacccaggctggagtgcagtggtgtgatctcggctcactgcaagctccgcctcccgggttcacgccattcttctgcctcagcctcccgagtagctgggactacaggcgcccgccaccacgcccggctaatttttggtattttttagtagagatggggtttcaccttgttagccaagatggtcttgatctcctgacctcgtgatccgtctgcctcagcctcccaaagtgctggaattacaggcgtcagccaccgggcccgaccctacttggcctctttttttgagagagaatttcactctgtcgcccaggctggagtgttgtggtgcgatcacggtttaatgcaaccttcgcttcctgggttcaagtgattctcccgcctcagcctcctgagtggttgggattacaggcacctgccaccatgcccgggtaatttttgtatttttagtagagatgggatttcaccatgttgcctaggctggtctcgaactcctggattcaggtgatttgcctgccttggcctctcaaagtgctgggattacaggcgtgagccaccgtgcccggccgttacttgtcctcttaagatgtcttgagagcctcatgcgtcccactgtttggtgacaggctacctggctacctctggaagataagccgggactgccccccagcagcccaccctttctccctagtggggcacgggagacgtcccctgctgagtcctcaccctccctgctctcagcacaggatccagtgtgcttttcctcccgcagcactggcttcgggacgttcagagagaacacactgagtgcgcgcagcctcccctgctcccctcacataaccactggggtcccgagagcgaggggcctgtcactccgggtccctgtggtttagggctgtttctgtagcgcctgcgacccccctggttttcactgtgaaggctgcaagggagaaaagaggcccactaggaacattccggggagccaagggtggggtaatgcaccacccggcccctgcgtggcccagatgtgggtggtgcgcttctcatacctggcagattagcctaggtccccggagcaccagcttcatcctctgtcctctttcctcctgtggcccaagaggagaggtcaggtcagatggctggaggcagcttccagagaggctcggtgtgggtggggccgggagaaacatgcccctggggcgggggctcactctctggtgtggctccacacccaccgtgtgcttgtcgtggagccaggctcggtgcctaccaggcctgagtcaagatgtggcacctggtgctgtgggtgtccccccgctcccgggggtcatgtctgtccttcgcagagtgtcttttctaaagaaggcggttgaccagcggaacaaggcactgacaagcctcaacgaggccatgaacgtgagctgtgcactgctgtcaagcggcacgggccccagacccatctcctgcaccaccagcaccacctggagccgcctgcagacacaggatgtgctcatggccacctgcgtgctagagaacagcagcagcttcagcctggaccaggggtggaccctgtgcatccaggtgctcaccagctcctgtgctctcgacctggactcggcctgctccgccatcacctacaccatccccgtggaccagctcggccccggtgctcggcgggaggtgacgctacccctgggccctggtgagaacggcgggctcgacctgcccgtgaccgtgtcctgcacgctgttctacagtctcagggaggtggtgggcggggcccttgccccctcagactctgaggacccc

SEQ ID NO: 19283 - DNA, 2300 bp, Homo sapien
agaagctgcagagaattttctgcctgacgaggatgtgcactgtgactgcctggtggcctttggtcaccacggccggatgctggccatcaaggccagctgggatgagtccgggaagctggtgcccgagctgcgggagtactgcctcccaggccctgtgctctgcgctgcctgtggcgggggtggccgcgtgtaccacagcaccccttctgacctctgtgtggtggatctgtctcggggaagcaccccgctgggccctgagcagcccgaagaaggcccgggaggcctgccccccatgctgtgcccagccagcctgaacatctgcagtgtcgtctcgctgtccgcgtctcccaggacgcatgaaggtatgagctgctgtctaaaatgaaagatgggagcccagggtggagcaccctttttggctgtctgctactatcaggccgccttcctttcctgggcttgttcttttgcaaggctgacgggtgctgatacagcctagtggttaactctcttgtctcaaggtcaagccaggggctggtggtgggcctacctgttgctctgcctctggggtctagggtgtggccctgggcctggtaggatctgagtttgctgcttgctggctgtggacttggaggaaactgcatcttgggggtccaccgcaagcgcctcctgggcaggtcttatgtggcaagcagcccagggaggtctgttccggacttgcctttcttccaaaggctgcaaacgcttgctcgtgtcatggtgtggcttgcccgtgagtctgctctggaccaaaggcagatggcattgtggaattctagttttgtgttttccacagaaaaagccagagagggttttagctgtgtgtgcccagtgttggggtgagaggaatagagccacacacctcctaccagtgcacttccccaagtgtgctcaccttgtgagcatgctaataaatctcgccacagaaaatacatacacagcaggagagaagggctttgaagggaaacgccagactgtctccactgcggaagagagggctacgggtgggatcagagatggcgtggctcggggccactgacagaagcccagggtcgggacagtgcatttgccttgggactttctcttcctcactggacactggccttggccgtcttccaacttctttcctggagtccagggaaacaccaccgagtgtcatgctgcttgcccctcccagccgctgaccaggccccatgtgtgtctgtcaccaggtggcaccaagctcctggccctgtccgccaaaggccgcctgatgacctgcagcctggacctggactctgagatgcctggcccagccaggatgaccacagagagtgcaggtcagaaaataaaggagctgctgtctggaattggcaacatctctgagaggtgagcagctcagctcggaccgggtagaggctggcgctgccatccttgggaggtagcgtccctgtgtggggtcgtcctgggtgtgagtgtcctcgggtggcaacggtccaggccaggccattacttggcctctttttttttttttttttttttctgagacggagtctcacactgtcacccaggctggagtgcagtggtgtgatctcggctcactgcaagctccgcctcccgggttcacgccattcttctgcctcagcctcccgagtagctgggactacaggcgcccgccaccacgcccggctaatttttggtattttttagtagagatggggtttcaccttgttagccaagatggtcttgatctcctgacctcgtgatccgtctgcctcagcctcccaaagtgctggaattacaggcgtcagccaccgggcccgaccctacttggcctctttttttgagagagaatttcactctgtcgcccaggctggagtgttgtggtgcgatcacggtttaatgcaaccttcgcttcctgggttcaagtgattctcccgcctcagcctcctgagtggttgggattacaggcacctgccaccatgcccgggtaatttttgtatttttagtagagatgggatttcaccatgttgcctaggctggtctcgaactcctggattcaggtgatttgcctgccttggcctctcaaagtgctgggattacaggcgtgagccaccgtgcccggccgttacttgtcctcttaagatgtcttgagagcctcatgcgtcccactgtttggtgacaggctacctggctacctctggaagataagccgggactgccccccagcagcccaccctttctccctagtggggcacgggagacgtcccctgctgagtcctcac

SEQ ID NO: 19284 - DNA, 2300 bp, Homo sapien
agactgtgccactacactctagcctgggagacacagtgagaacctgtgtgtgtcaaaaaaaaaaaaagggagaagtcgggttcctgggtccctgcctcaccttcctgctgtgttctccttattgggctgtgctgctctgaggagaggtccctcaaggcccagccctcctcgccctcaacacagcctgaagcttcatggtttttctcccctcagtctgacctaaattgactccgtcatatacttcgtgcttagggagatgataccacctccaagttgggcatagaaacgcagtgtccagcggtctgcgctgctgtctcgaaagcttccgctaggagtgtgtgcatcttccacacccacggacagagaggctgcctcagccctcatcactcttcgccaagtacaggtggggcacggcacagcccagcagctgatggagagccggccttcagcccttcgcttgtgtctaactcaccccctttcccctgggatccatgcttaaggtcccccacatgactactgatcataaatcttgttgcagataggagctgggcttggcgtggggccaaaagcctgccagcccccggagcagagtggggtgggcagcggagtaaaccgcggggtgaggctgctggtttggcgggccttctcccacgtccgtttcctcctccacgtgatcgtgatcatttcctctaggacagtcttggcatgttaccatccgtatggaagagatggcctgggaggactggatggggttggtgtgtgtgagcgagtgactcacaaggcttcagagggttaaaactagcagtcagaagacctgcggattcctgtggggaaattcggtcagaagaccagcggaggatccctgtggggaaattcacaacgatgcggcatctgacttcctgactctgaaggccaaatgagatgcacctggccctcctctccccactccccagcatcaaagacagcatttccagcccaaacaccttcagagcagccctggcgagaagagaggagcaaggaactgactccaggtgccgcacttgagtctgtctaacccaacattcagaatcagacatccccgttgccttggggtcagtccccaccccaacctcaaaggggggcggtcaggatgtctgcaagtggtgctttgtgctccagcaggtgcacccggactccacgatgtctgcctaacttccaagcccagttttgcagccctgcccctagattctccctcgagggtgtctggccttagcgctcttcagattggcttcttaaacggagggaggcgggccgggggcggggttccttggtcatttacttgtgaatggtgtgcctggtttccgctctcttccgggcatggagcaggtgtcggtactgcaggcccctccacgggcgttctctggtcagtacttctctcctggaggaagtggagagctgccaggagggagagggtggaggtatcttgccctggctcacagtcattttcttgtcctctgcccccaacccagaaaccccattggtgtactccctgtccccacgtgttcagccacggagggagggacgcacttccacctaagctggctcactccgctgggccctgaacgcgggggcggccgggggcggctcgcagagcacagggcagagacccatccctaggacgacaagagccggcgctgccccaccccgaccccggctggagtgcgctccggcaggacccagctgctctccgagagcccagagaatcgaggcgtttacgcaaaagcccgagtagctgagcgcttgctccggggagacgccccgcccaagagcaacctctgctcggccaggacccgcttccccaccctggggaacccgtgcagcagccggggccatgaagccgccgagggctcccaccagcccggccgggtcaacctcgacctgcggcacggtgccgcggcccctaggaaggctcccctgctccccgtgggtaccagcgaccgccccagctcccggagtccctgcagcgcgtcctttccggcccgcccccggcaccgccgaccgctttacggcggaggtcgcgccgcacagcgggctgccgtaaagcgctccgaggcggagccgccgccgcgcggccggggcttttcactctgacgggcccgcgcgcacgatggccggcgccgcgccgcgggtccgctacctggcgggcttctgctgccctctcgggggcctggcggcgggcaagccccgcgtgctgtgccatgaggcagaggtcttcctgtccaccgggagcgagctcgtctacgtgtacgaccaggagggcg

SEQ ID NO: 19285 - DNA, 2300 bp, Homo sapien
gagaaagaggcagagggatgaaatgtgagggaggaggacacgtctcacagtcaagacttccgccctccatcccagcctccaggacgagaggcatgagctcctatcctccgggctgttgagcaccgtcagcacaaggcagaggcacagatgcccgcttgggcctatttgggaagaatttaaattctagttcaatttagcacttgcgtttatagatgtaagttgtggcagtttgcattttatagtgatagcctgtaagatttttaaaatgtcctcagaaatacgtcttgatgttggggagaaagaaacctgttctagcaggaagctgctcaccttaggcacagcgaagaggaaccttccttttggcttcttgtaggacagcatcagcttgctgctggaggccgtgcggaccagaaatgaggagctcgcccagacatggaagaggtctgagcagtgggccaccatcgagcagctgtgcagtgagtacccccaccccctgccccggcaccccgtggctggggccggagagcagcccactctgcacagctccccactgccggtggtgccctggattccgcacccagctgcatcctggcaggtgccatcggcaatgcaacgagtagagactcggcctccctgccaggcacgtggcaggctccggtgatggagcagacatgttgtccaggccgtacgtcttaggtacacagccctgtaaattttataaacctgtacatcagagatactaatctccaggcatcctaggagcactttgaacatcattgtcttaagagaatcagaaactttatggaagcgccggaagcgtgggaccttttggtctccttgagaatttccctttagtgcttaaagctgtaaggaggagaagcctgcagcatccatgttgttgctggtggacactacggaacggaccgcaggcattgcgtgtcttccggaccctcagtcaccaggtcctgaacgattccccactcgtgagaaccttctgtcagcattgctgcagggactcctcacgcaccgtggtgcctcgtgcagcccgagtgccctgagtccctgcagctgagagcaccagagtgcccgggagctacggccctggacaaatgctagaatccttctgttaacacagccttcaaaagacacatcaaacacctttataccatttcctgtttttttttttttttttgagacggagtttggctcttgtcacccaggctggagtgtggtggcgtgatcttgcctcactgcaacctccacctcctgggttcaaacgattctcctgcctcagcctcctgagtagctgggactacaggcatgtgccaccatgcctggataatttttgtattcttagtagagccagggtttcaccatgttagccaggctggtctcgaactcctgaccttgtgatctgcttgcctctgcctcccagagtgttgggattacaggtgtgagccaccacgcccagccgaggttttcttttcacacaattctttgtttattatttttatttttgtagagacagggtctcactctattgccgaggctggagtgcagttgcacaatcgtaactcactgcagcctcaaactccaggctcaagtgatctttctgcttcagcctgctgagtaactgggaccacaggcttgcaacaccacacccagctaattcttggggctttgttgttgctttttatttgtttgttttttaaaaataattttaacttattttagattcacagggtacatgtgcaggtttgtcacctgggtatattgcctgatgctgaggttggggtatgattgatcacatcacccaggtactacacatagtacctaatagtttttcagcccgccctgctctttgtgtgtgtgtgtgtgtgtgtgtgtgtgtgtgttttgagctggagcctcaccctgtctcccaggctggagtgcagtggcgcaatcttagctcactgcaaactctgcctcctgggttgaagcaattcccctccctcagcctcccgagtagctgggattacagatgtgtaccaccacacctggcgttgccatctttatgtacgtgagtacccatgtttagctcccacttataaatgaaaacatgtagtatttggtttgctgttcctgcattagtttgcttagaataatggccttcaactgcatccatgttgctgcaaaggacatgatttcattcctttttatggctgcaaaattttttaatatttttgtatcaatgaggtctcactgtgttgcccagactggtctcaaactttggcctcaagcattccttgcacctcagc

SEQ ID NO: 19286 - DNA, 2300 bp, Homo sapien
ctgattgctcatttgccctccgaatccaatgacacgaatctctcttgagcaaagtcagctcctggggcggcctcctggcccttccgttcctttcctgtcacctggccaaggggccaaaccagcctttcgttcctccatagcagagggagagaacctgtgtgactctgaagggaagctgtgccacgaggggagtcccagtgccctttttgtccgacgtcgaggccggtgcacaggccggaggctgcccggatatggtgtagtttgtctccaggatggcggagtttccaagtgttcgtttagagatgacactaatagataacggttccctttgatggagagcttgtagaacattctcagaattgctaggagtcgttaatttgggctctgggagatgctctgggctggctgggagtcggccacaccattttcagcctcatttatcatgggtttgtgtttttcttcattagatcacaacaactttccccaaggatccagtttacactttttctatttcgcaaaatccatttcctattgaaaaccgggatgtattgggtgagacacaggtgagctctttgtctttagaaacataatttaaggtaactgctgattgttatctagtgtcagtattgtttttccagaaaacatcaagctttcaaatgctcccgattcattcttgtgacaggccagctagggcctactgtggggcactgctggtcacgtggacgcccttcccatggctaggtgatggacggccacaaaggctaatcccctgacgtcctgactggccacatcttcagtggacctcgtaattttcccaaatgtgttgctttgtgtcttctgccagcagcctcgtcactgttggtttggcctggcccctgcctggtcacctgctgcccttcttaggcaccttggggctgtgtggcccctctcggcctggcctcggctttcccgtgtgtagtgttgatctgctgcttagcgtggctcccgtgttggcctctgctctcactggcagatcaggccaggtccgatttgctgtcacgcctgcatactgtgtagacaggctgtgtacacatggttgttcttaaatcataacttgctaacagacatttcagaaggtggtcaaagaatgtctataatgaggttttcttcagtggctgacaaagcttcttctatgctttgatcccctcagtgcccatccgcccaggggacttggggtgctcacagaggtgcaaagccagttattggggtgcactcttgaagctctgtgtttggttctgctgaagatgtccgtgctgcatcacggctgccctgcacattcctccctcttgctgccctagatggagaatacagctcgacaggaaaagtcagacctgtctccctgccgtgaagggggccccaggcccctcccgcagcccactctccaccgggggaccagggcgcatttccatgtttgtgtctctgtctgagtcagccttttttttttttttttttttttttggaagacagagtctcactctatcacccaggctggagtgcagtggtgcgatcttggctcactacaacctccacctcctgggttcaagcgattcttctgcttcagcctcctgagtagctgggattataggtgcgcgccaccaagcctgggtaattttttttgtatttttagtagagacggggtttcgccatgttggccagactggtctcgaactcctgaccacctgcctgcctcggcctcctaaaaagtgctggaattactgtgttagcctccacacctggccagtctgagtcagctttataagcatgtctccttgcacatctgggtagtcaggtgtgctgagagcatcttcttgggagaagagagcaagagcttgctttgcagctgcctgctcctctttcttggaccctgttcgtggttgcagaggcagagggagaggtgtctcagcattcagtgtattgagttgcgtcttagtaggaaacagctctgtttcggggtctggcactggggaactgtatggaacattcatgtttattcccattcctctaggacttccatagcttggccacctatttgtctcagaatacctcatctgtgttcttggataccatctcagatttccacctcttgctgttcctggtcaccaatgaagttatgcctctgcaggtgcgtgtccaagtgtggtgtccacttgagcaagtgggctttggctgcaaagagacgcctgtgtcttgctttctttcctcccagaccagagcatgattgggaaactgggtcaaagctcggggtcacaggttgtccccct

SEQ ID NO: 19287 - DNA, 2300 bp, Homo sapien
gcaccattccaactgacagctcccgagaacatatttattacctaggccgtgaaggcatctggtttttagactacctagggtgtaattaagatgaaaacagattgatggagcatgcacccaggaggagcaggcatgatttaaaaccagctttctcaggtcttctaccccaagcagcctccccacttctttcctcttcttttataaaggaagttaagtttttgccttagtgcagtttttcagaagtacttgtttgtgggagagcattctgctctgtgatgcccaggctccttgaccctgtggaagtgaggcatggggagtccttgagagcaggtgcccagagaggtgtgtcaagctccatgcccagccctgggccacaggcgctggcctcagccaaggttcttaaaccttgggatgggatggctgggcaggcaggaaaaggcaccagccagtgttactggggtttctttgtgggttctgggggcatcatctggctgatagacgatgggtagggtagggaaatggcttcagtgtaagatgggagctgatgcccttccttgggacatctgggatgggctgtgtggactttggttctgttcccctccaagggccagttacaaggccagcaagagcccccgtcagtcccactagctcactcactagcacgtgttctgggggtgccgccttcttcatttctaggccttcccaagggacgcgcctgagcaggccaggcttttgtctctgcaggaggtcagcacctcccctgtcttcagctgggacccagcactgtgtgtaccaacactatgtgtaccagccccgtgctgggcacccaggaggcgagtactccgatcatcttcatcctgaggaagagtaaagtgaggcccaggatccctaactgacgaggccatgtagccgacacgtggcaccgcggcccgagtcttcatgacccaccccgccgcttgcccatgaagggccagctcaggccagagatgctgctggtggctcagctgtccttccacagcggctggcgctggcacagcaaatcctgggccagctagctcaacaactcactgcctttgctgatgcagaaaacagaccagaaccacactcattctttagaaatagtcccaaaggaaccagaatagttcccctaaatctggaagaggtgtgacctctgctgctgctgttgtgttgcagagaaaagcagcatcaactcaactcggtgctgctttggggaggggtgtctgtcacgaagaataaaagtggtatttctattgattcttgcacatttaccactgtccctgtagcatctattgattatatcttaggtgcaaagtgccctctgttgtcattaaggcctgtctgagccagtgaaggactgaaggacttagctggcctttgggtatcagctctgagggagagagaagagctgaaccctgtgttcctcaagggccttacattcacccctgcctggaaaagcccacagctccgtggagtggctcccagcattcagaaggggcttagtgagctgctgaagggtgctttgtgtcttgaaagctggctgattgctcatttgccctccgaatccaatgacacgaatctctcttgagcaaagtcagctcctggggcggcctcctggcccttccgttcctttcctgtcacctggccaaggggccaaaccagcctttcgttcctccatagcagagggagagaacctgtgtgactctgaagggaagctgtgccacgaggggagtcccagtgccctttttgtccgacgtcgaggccggtgcacaggccggaggctgcccggatatggtgtagtttgtctccaggatggcggagtttccaagtgttcgtttagagatgacactaatagataacggttccctttgatggagagcttgtagaacattctcagaattgctaggagtcgttaatttgggctctgggagatgctctgggctggctgggagtcggccacaccattttcagcctcatttatcatgggtttgtgtttttcttcattagatcacaacaactttccccaaggatccagtttacactttttctatttcgcaaaatccatttcctattgaaaaccgggatgtattgggtgagacacaggtgagctctttgtctttagaaacataatttaaggtaactgctgattgttatctagtgtcagtattgtttttccagaaaacatcaagctttcaaatgctcccgattcattcttgtgacaggccagctagggcctactgtggggcactgctggtcacgtggacgcccttcccatggctagg

SEQ ID NO: 19288 - DNA, 2300 bp, Homo sapien
acaagcagctctgagttctgtgttgctggctgctgtctgagtgcactgctgggtttgtcccctggggatttcctctactttctttagagctcatcaattgattttagagtatatttgttaaaattgatcttgtgtgtaagtcaagttttttatattagtagttagatggtgtttaggaatatgtaatctgctattagaaacagacgtctcggctggacgtggtggctcacgactgtaatcctagcactttgggaggccgaggcaggtggatcacctgaggtcaggagttcgagaccagcctgtccaacatggagaaaccccgtctctattaaaaatacaaaaagtatctgggcgtggtggcacatgtctgtaatcccagctacttgggaggctgaggcaggagaatcgcttaaacccgtgagatgcaggttccagtgagccaagatcacgccactgcactccagcctgggtgacagagcaagactctgtctcaaaaaaaaaaaaaaaaaaagaaagaaacagacgtctctgatgtggtaatgtttggtaatgttcatcacccccaaattagggaggaagaggaggaggaaagaaattagttgaagagctgcacctgagccccagtgtctgtgtgtccttgagggcctgcactttggcctctgctcttccttcaccgtgttggtttagagctgtggatcctgccctctcagtctgtcccctgtgtgtgtgtcttgttggcagcagttagatatctgtcagaggacatgctgcagcctttcttccaaggctggcctggagggttagtgttggcagccatctctggtcacttgggaccccaggcggcttctgtggactgtgagtggagatgcttgttagcctctgaggtcagcagtttgccatgccagtcaaacctggcaccaagttggcagcgtgactctgaccaagggaagaacacacttcagactgaaagtgatagaaaaccagatgtgacttgtggcaacctttttggaaagcagtacccttaagtctgactcctgggaatttgccctttagaaggaaaaccacagggacgtctgtccgtgggcctttttgggtggtggtgatgatggcagaagctggcagatggtgtgcatacttgtcattgtgggaggagtggctgagggggtggttaagcagcctcactggggaattgaggcagccattgtcatagcaattagacgtggactccttatatttggaggattttatgaggggttgttgaaatagaaaagtatgtctctggtaatcccacttttttttttttttttttttttttttttgagatggagcctccctctgtcaccaggctggagtgcagtggtgtgatcttggctcactgtaacctccgcctcctgggttcaagtgattctcctgcctcagcctcccgagtagctgggactacaggcgtgcgccaccacgcccagctagtctttttgtatttttaatagagacgagatttcaccctgttggccaggatggtcttgatcttttgaccttgtgatccatctgcctcagcctcccaaagtgctgggattacaggcatgagccaccgagcctggccagtcacactttttaaaagcagtgacagctcctatgcgtgtctgtgcttacgtgtgtatgtgaacgccgagaaagcagtggagatacatgcaaccagcacatgcagtgttgggggaggagagagcctcccagaggccagaggaatggctgagggaggtgggggccaagcagagggtgagaggcgggaggagaggccctgaaacccagcaggtccattgtggctgtgtgtgcaagcaaaatcatttgggtgtatggaggcttcacagagtttaaggtaaagttgtaagagattaaattacagagaacctgcatactggtctttataatgccaggaaacataggggagatgttagaagagaattctcatcttaaaagttagaaacctcattgtttaggcctacaggggtggttggcatttgctttttgcagatatccaagttgggcttccatgaagctcaggtggtaagggaaggcatcagcctctgtttatcatttgaacaggcatggcgatttgttgttcctgtttccctcgagccttgctgggccctcatctgaaatggagacgtcagttccaccgggcttcaaagtctttggcgctcccaacgtggtggaggatgagattgatcagtacctcagcaaacaggacgggaagatttacagaagccgagacccacagctgtaagtgatccatgagattccag

SEQ ID NO: 19289 - DNA, 2300 bp, Homo sapien
caattctcttgccgcagcctcctgagtagctgggataacaagtgtccgccaccacgcctagctaatttttgtattttagtagaaatggggtttcatcaaggtggccaggctggcctcgatctcctgacctcgtgatccgcccacctcggcctcccagagtgctgggattacaggcgtgagtcaccacacctggcctaatttttgtatttttaggagagatggggtttcaccatgttggtcaggctggtcttgaactcctgacttgaagtgatccacccgccttggcctcccgaagtgctgggattgcagacatgagccaccacgcccggccagaaaccttgtcttttctagttcatttttgtgatctgaacacccagaatggagctgagcacatagaactgcttaatatttgttgaaggaatgagtgaatattcccagcatctagcaaagtgccctgcacagtggacgttttatgatttagtcgcaccattctgtgttaggtttcagaattggaattgagttttgtttttttttttgagacggagtctcgctctgtcgtcctggctggagtgcagtggcgcgatctcggctcactgcaagctccgcctcccgggttcacgccactctcctgcctcagcctcccgagtagctgggactgcaggcgcccaccaccacgcccggctaattttttgtatttttagtagagacggggtttcaccgtgttagccaggatggtctcgatctcctgacctcatgatccgcctgcctcggcctcccaaaatgctgggattacaggcgtcagccaccgcgcccggccgggttttttatttttttgagacagagttttgcttttttttttttttttttttgaaacaaagtcttgctctgtcacccaggctggagtgcagtggcatgatctcgactcactgcagcctctacctcccaggcccaagcagttctgcctcagcctcccgggtagctgggattacaggtgtgcgccaccatgcctggctaatttttgtatttttagtagagacggtttcactatgttgaccaggctggtgtcgaactcctggcctcgtgatccacctgctttggcctcccatagtgctgagattacaggtgtgagcctccacacccggccagagttttgctcttgttgcccaagctggagtggaatagcacgatctcggctccctgcaacctctgcctcccagcttcaagtgattctcctgcttcagcctcacgggtagctgggattacaggcatgtgccaccatgcctggctaattttgtagttttagtagaaacggggattcaccatgttggtcaggctggtctcgaactcctaacctcaggtgatactcccacctcatcctcccaaagtgctgggattacaggcatgagccaccacgcctggcctggaattgggtttttacaattgaattcaaaaatggaaattgaacttttcaaacatagccattggccatgcatggtggctcacgcctgtaatcccagtactttgggaggccaaggtgggcggatcacctgaggtcaggagtttgagaccaccgtggccaacatggtgaaactccatctctactaaaaatacaaaaatcagccgggtgtggtggcaggcgcctgtaatcccagctacttgggaggctgaggcaggagaatcactggaacctgggatgtggaggttgcagtatgccgagatcatgccactgtactccagcttgggctacagaacgagactgtctgaaaacaaaacaaggatagccattaactcttgtttgcttcaaagtcttaaatgttttacaaagtttcatcattgacaagacctttgcttttttggccactttattcattttaattgacacctttgtgaacagtacaaatttctttaaaagagcaaaatagcaagaggaatttggtaaatgatgggcactttccaaatttggtgaatactcttctagtagtgtctggcgtgtatggtatatgtagtgatactttagcatttcattaaatttctgttctttgggccttgttttaggttgcaaaggagtttggcttccaaaataatggcttctcggtttacatcaatagaaacaagactggagagataacagcctcctccaacaaatccctcaacttgctaaaaatcaagtaagtgtcctctgaggaggaagcagggaatggggggaaatgaggtccccatgatctgcccgaggttgccgagttttatcctctttcctcatcacaccactcattatggtcttatcaactgaccagaataca

SEQ ID NO: 19290 - DNA, 2300 bp, Homo sapien
gtggcttatgcctgtaatcccagcattttggtatgccaaggcgggcggatcacgaggtcagaagttcgagatcaacctggccaacacggtgaaaccccatcaccactaaaaataaaaaagacatcagccatgcgtgttggcgagcacctgcaaccccagctactcggctgaggcaggagaatttcttgaacccgagaggcggaggttgcagtaagcagagatcgcaccactgaactccagcctgggcgacagagtgagactccatctcaaaaaaataaaataaggttaaaaaaaaaaaaaaaaaaggagtcgacgtttcctaagtttctcctgggccatatattcattccactcatctccaggttgggaaacatggaggcaccaagagggcccctgactggagagatgatggaaccaccagagaacagccttgcaaataagtgctaggttctcctggagacccatttgtttgtgtgtgtgagacagtctcattctgtcgcccagggtggagtccagtgacgccacctaggctcactatgttgtccaggctggtcttgaactcctgacctcaggtgatccacccacctgggcttcccaaagtgctgggattacaggtgtgagtcaccgcgccgggcctggagacctattctagacaacacctggcaaaactgcagagactgtcacaatgctacagtatgaacattactcttcacccaatactgctaagcttcccccagaaatcccaaatcttccttaatattaaccaaaatgctcctgtccaatggtcagttagtttttttcccatcacatttacttttgggaagaaacttctcacaacttaacgagggactggttttctgatttgtcactgatattttttacgttaaggaggagtgtgtgacaattttttttttttttttgagacgcagtctcgctctatagcccaggctggagtgccatggagggatctcagctcactgtaacctccacctcccgcgttcaagcaattctcctgcctcagcctcccaagtatctgggattacagtgcgccatgacgcccggctaattttttgtatttttagtagagacaagattttgccatgttggccaggatggtctcgaactcctgaccccaggtgatccacccgcctcggcctcccaaagtgctgacatcacaggcgtgagccactgcgccgggccgacaatttcaatttcaggtaaaaagtgaaatcaacatcatttacaacattccttttaaagaggaattgtcaagttgtccttccaagtaaggagcaaagccggcaagttactgtgttttcattttcccaggtcttctggtggggagggagctctgtaacgtccccgtctgcagagctgctctccttagtgactcatgacaaggcacttgctgggaagcgggagagcaggaggagagaatcagagggagattaggataagaggtgtccctggctctgagaggggcaggactggctgggagtccctggaattagaccaggaagtctcctggagccgggaaacgggtggggaaggagggcggtttctcttcgccacagtccattctccctgcttagaaaggctcggcctttccctgcccagggcggggaaccggggtcgtaagtcccctggggagggacacggacgggaagcagccgaggggggtgaaagtccccgagaggggcccagccactacagagaaagccctggcgagagaagagaaaggggccgagtcgcggcgccggcaggcccgcctcccccacaggccgaggccggcaaatctgctgcctcatcccggcgtccccgctcccgcccggccgccgcactcacgatgctctcggccatggcggctgctcctgcctccgggctcgagccccgggccgccgccgcctgccgccccaagggcctcgcagacccggccgcggcctcagccccggccccggcctccctacgccgccgccaccgccgctccagcttcgcccgcccggctccgccagccgccgacgtcccggtgcctcgctcaatacgctcccctcgggcgcgaggccgggaaaccaggttccggccccaccaacggctcgacgcatgcgcagggcggcgccgctgacccgcccccgccatccctgcaactggaggaggggattttggaaagttgcgtctgagattacttctgctcgtcctcggaaacccaagcggcacaggaaagtccaaaaaggaagcaaagacgagcatccgaagtctcacccaaaaataactactgctgcgtattatagcgtattataatt

SEQ ID NO: 19291 - DNA, 2300 bp, Homo sapien
ccaaaccaccacccagtctgtgagagattttgttatgttatattttcttataactgagataattattacagttaaagagatcggacttaactgaacccatcttgcttctaacctccaagctgtccttgttcattcctgggtgtaggctgaaataacttcgggaggcgcttagtttatagtttagctttgaaacaaagatggtaacagccctttgcaaaacaaactcccttcctacctggggacaagactgccttttcaggactaacaaattagccataagattagaaattatggtttaggagtcatgtagctggaggctacaagattctaaacctcccaaattgcttctcaggataacatcactattaaaaaacagatcagcgcttgagatattttgcagactctgcactccatggatcagctggcaccacccagattgataaactggctcatatcttgtggcccccacccaggaaccgactcagcacaagaggacagttttgactccctatcatttcacctctgacccaaccaatcaacactccctactttctgaccccatacccaccaaattatccttaaaaccgcggatccccagccgggcacggtggctcacgtctatagtcccagcactttggggaggcccaggtgggcggatcacctgaggtcaggagttcaagaccagcctgaccaacatggagaaactccgtctctacgaaaaatacaaaattagccaggcatggtagtgtgcgcctgtagtcccagctacccgggaggctgaggcaggagaatcactggaacccaggaggtgaaggttgcagtgagccgagatcgcgccactgcactccagtgtgggtgacagagtgagattcggactcaaaaacaaaaaaaaacaaaaaacaaaaaactctgatccctgaattctcaaggacactaattttttttgagtagtaataaaacctcagtaacctgtacaagctggctctgtgtgaattaaactctttattgcaattcccctgtcttgataaagtctaggcagtgggcagggacaatatgttgggtagttacagtggcaccctgagcaaactaatacaattactaacataatttaatcaattaatgtaatttaacatagtttaaaaaaactgtcacagtaattgtgatgttgtgaaatatgtatacatttagtcttccggtttcctggtatccaactccaaaaatccttagaatctgtgaagtgacgtcttttttttttttttttgagatgaagtctcactctgtcgcccagactggagtgcagtggcaccaactcagttcattctaacctccgcctcttcgcttcaagagattctccggcctcagactcccgagtagctgggattacaggtgcccgccaccacgcccagttaatttttgtatttttagtagagacggggtttcaccacgttggtcaggctggtcttgaactcctgacctcaggtgatccacctgcctcggcctcccaaagtgctgggattacaggcgtgagccaccgcgtatggcctaattttgtattttgagtagagacggggtttcaccattttggccaggctggtctcgaacttttgacctcaggtgatccgtccaccttggcttcccaaaatgctgggattacaggtatgagccaccgcgcccggcctgaaatgcagtttaaactcgtttgtttttcttatgttaaatttaaaaaatacttaaaaaaaaaaacatgaaggtgtgatcctgccttcctgaaattgtttctctacttacctgtgcatggagagaagtttggaatgctgtttccccaattataatacgctataatacgcagcagtagttatttttgggtgagacttcggatgctcgtctttgcttcctttttggactttcctgtgccgcttgggtttccgaggacgagcagaagtaatctcagacgcaactttccaaaatcccctcctccagttgcagggatggcgggggcgggtcagcggcgccgccctgcgcatgcgtcgagccgttggtggggccggaacctggtttcccggcctcgcgcccgaggggagcgtattgagcgaggcaccgggacgtcggcggctggcggagccgggcgggcgaagctggagcggcggtggcggcggcgtagggaggccggggccggggctgaggccgcggccgggtctgcgaggcccttggggcggcaggcggcggcggcccggggctcgagcccggaggcaggagcagccgccatggccgagagcatcgtgagtgcggcggccgggcgg

SEQ ID NO: 19292 - DNA, 2300 bp, Homo sapien
tcaatccacccacctcagcctcccaaagtgcttagattacaggcataagccgctgtacccagccaggtttcttcttatacctctctccttagctcgaagatggcaccttctccccgagacctcacatgttttttcttctgtgcacacattcctcgtgtctctccatgtgtcccaccgtgtgtcccaattttcttgtaaggatgttggattagggcccacgctaatggcacttatttatttatttagggatggagtcttgctctgtcaccaggctggagtgcagcggcaccatctcggctcactgcaacctctgcctcctgggtcccagcaattcccctgcctcagcctcccatgtagctgggattacaggcatgcgccacgatgcccagctaattttttgtacttttagtagagacagggtcacaccatgttggccaggctggtctcaatctcctgacctcatgatccacctgcctcggcctccctaagtgctggaattacaggtgtgagctaccgcgcccagcccctaatggcctttaaaggccctgtctccaagtcccattctgaggtccggggggctagaactttatcataagaatgtaaggggcacaattcagccataacagtggtagatgatgatcgtttcattaaaagattacccagactttggccgggcgtggtggctcacgcctgtaatcccagcactttgggaggaggaggcgggcagatcacttgaggtcaggaggtcgagaccagactggccaacatggtgaaaccccatctctactaaaaatacaaaatcagtcaggtgtggcgcctgcaatcctagttactcaggaggccaaggcaggagcatcgcttgaacccaggaggcagaggttgcggtgagtcaaaatcgtgccactgcattccagcctcagcaacagagcgagactcttgtctcaaaaaaaaaaaggttacccatccttagaacagactgagttggaggccgtggacagtccctgtgaccgtgaccctggctgtggagctgctgcagggcccatgaggttgggtttgtcacctttggggaggtgaagggaagctggagcccagaagctcagcctgcagctctggtcctcgccccgacttcccacctgcagcatatcccacttctccgaggaagatctgaagactcagagtggccttcaaggcctcacctgatccagccctgtcacctcatggacctccctcccacccccatctccgcttgccccacacagccaggtgacctttcctcctaaaacttgcccggtgtgctcccacccaggcgtctcacgcgcgcctgaaaccctctgcctgctccatcagtacattgcctgctgtgctgcaccacccagaccacctctttggactgctgagtgttggtggctgagtccgggcacagtggctccagcctgtaatcccagcactttggaaggccaaggcaggagaatcacttgagtccaggggttcaagaccagcctgggcagcacagcagaaccctgtctctacaaaaaaaattcaaaaatgagtgaggcaaggtggcgtacatctgtagtcccgggaggcgaggttgcagtgagccgagattgcgccattgcactccagcctgggcaacaagagcgaaactcagtctcaaaaacaaaaacaaggaggtgatctggtggggggacgctgtttcattcgtgcagtgaacaagccgggggatagattggcgctggggctgcccatgggtctcttgggattggggttgtgaaccaatttaccagggtctgattccctggttgggagctgatggagcggctgctgaccctgcagagctgaagtccgcatggggggctgcagtgagagccacaaggctggcacccaaacatgcctgcctgagtcacacctgcgctgagcttaggggacccacagagccagggctggggagaaatatatctccacaagcagaggcctccttaagctctaaaatgtgattcttcacatgactcaactgtgactccggcatctgggtagggctcgcacctcccccattcccatgcccagggctgcactgttcacagactagcccagggccgcagtcaggaccagcccagcagcccagccacagaggagccagcgaacctctcccggcgcctgtgctgggggctttctgttccagcgtcaaggatggaggagggggagaggagccccttactgtcccaggtgagccatgccaagtggccttgccctgaggttggagatgtccccagccctgaagtcctaagggaagtccctgg

SEQ ID NO: 19293 - DNA, 2300 bp, Homo sapien
tttttagtagagacagggtttcaccatgttggccaggctggtcttgaactcctgatctcaagtaatccacctgcctcggcctcccaaagtgctgagattacaggcgtgagccaccatgcccgtccaggttttatttttaatttttcaaaattttcatatttcttcagagatagggtctctctctgtcccccaggctggagtggtttgaccatggctcactgcagcctcgagctcctaggctcaagggatcctcctgcctcagcctcccaagtagctgggtctatagaagtgagccactgtggccaggcacggtggctcacacctgtaatcccagcacttcgggaggccaaagtgggcagatcacgaggtcaggagattgagaccatcctggctaacatggtgaaaccctgtctctactaaaaatattaaaaattagctgggcgtggtggtgggagcctgtaatcccagctactcaggaggccgaggcaggagaatcacttgaactcaggaggcagaggttgcagtgagccgagatcaggccactgcactccagcctgggcaacagagcgagactcagtctcaaaaatgaaataataaaataagaagtgagccactgcacctagctaattttttctattttttgtagagatgggggggtctcactatgttgtccaggctggtcttgaactcctggcctcaagtgatcctcctgcctcagcctcccaaagcgctgtttgagagccactgctcccggccgagttatgggtttttatttatttatttatttatttatttattcatttgaaacagaatctcgctctgtcgcccaggctctagtgcggtggcgcgatctcggctcactgcaagctccgcctcccgggttcacgccattctcctgcctcagcctcccaagtagctgggattacaggtacatgccaccacgcccggctaatttttttgtatttttagtagagtcggggtttcaccatgttagcaaggatggtctcgatctcctgaccttgtgatccacctgcctcagcctcccaaagtgctgggattacaggcatgagccaccacaccaggcctgagttatgggtttttaaaggtgcagaggcagaggtcacaggcaagtcataaatcagtacatggaggttgtacactggttttgccataaatagcaaggagatcttgaagccagggaccacgggtcataggtggattcaaaggttttctgatttggtgcagaagcgaatctttgtctaaaactttgggatccgcaggaaagaatgttagctctgggttgtgggcatggcctcctccaggcccctcaggatgggcatagcctcctccaggcccctcaggaagaaatttaggtaagagaagggtggtcagaggccagtcctcagctcccgctcatgtgaggtctgtgtgccagcacgcccctttggtgggagtccctgtttctggaaaacaactgaggagcacctgctaagatggcatggtttgcttctgtggagactctcgggactctggcttccatctgttgttctaagctcctgtgaccttcttgtgaccttcctgtggatcggctgctcatttccttctctgggctggctgggggcctggcttgcccttgaaggaactcaacattgtccttgcttctgtgcttgggaagacccacaggcccctaagggcgggggggggtccttgtttggtttcaggagcagcaggtgcaaaggccctggggtgggaggggtgagatgtgaggccacagcagcgggtgagggccaggctgcagagggttttggggaccatgaaggtgggcccttcagagatcaggcagggtcaggaaaggcagtagggaggcccaagacagcagacactgtggttgcttccatctggaagatgggcagctgcaggagcctggctgttcagggtcacacttctctccctgtcccggccccatctgctgggtgtccttccttggagcccttgacagcacctgagcccctcctctccatcccctgaaccttggtggttgtgccccccctcggggcccaacaatctcattagggtggcactgagacgcctaatcagctcatgaagcagcgagataaaggccggggctggcaccctgcggagggaggcccagcactcacagcacagccccctgagacccgccctgcacttggtgagtagtggccaaccccgctgtctttcctggcagccacttcccccagtgagtcagtgggggtctgctcatcacccaaggggcagagggagctgacaggcttttacca

SEQ ID NO: 19294 - DNA, 2300 bp, Homo sapien
tacaggcgcctgccaccacacctggctaatttttgtatttttagtaaagatgggatttcaccatgttggtcaggctggtctccatctcctgacctcatgatctgcccgcctcagcctcccaaagtgctgggattacaggtgtgagccaccacacccggctgggggtcttattttcaccacactcggctgggggtcttattttaccctcatggcagggtgatggctgcaagagctccggaggtgcataatgccgacctggacctgctcgctttgaagatgcaacacaagccttacggacaaccacacaaaagcctcctgttgaggccaaatcagcagccattctggttggcagacatactgccaaaaaaaccacccccaaaacaaaaacctcctgtgaaaccaccatagagaatttatttttttctcaggtgaagtcagtaactaattcttcctattcccgttggacacaaggagtctgtgagggggtgtgaaggaaggaggctgcggctgcgtcctggactccgtcctgcggtagggagtccagcagggatggctcagcctccgcacctggtgtgcagccggatctccatcctgaggaaggccttgaggttctcatcagccacgtgctcctccagggcagccagggcccgctccccaccgtcctggaagtgctgcagcagcctgtccgcgtactccacccacacgcagttggggcagccactcatgcagcagtttgtgggcggctggagctcaggtggcagcgatgccttgggcggcctggtgccgtccgcacctgcttgggagcccacctctacgtggtctgtcccgaattttctgcgcccatcaggggcttgcgctccgggatggtgcctttgaagaaagctgccacctccaggaagcctctggcagcagtccgggctggagaaccggcgagccccctgaggatgcagacaaacatgtgactctccaggaagctggtgaggcccggtctacccccagcagtgaggacatttcagctctcctgtcattgggcaactggctccatgtcctcagctttttcacttcctgtgactttagacatgttatttcacctctctagactcagtttccccactgtgcaatggaagtcatgggtatgacacggtgtgattcacaagaagtgccaggatcagggcctggcgccgggtgtgcactcaagcacatggtggggggtgggggaggcactcgacacctccagctaagatggctgctctgtggacaccagtatgcgagaggtgtaaccctgtaagctcctggccagcccagcacctctaccagtataaccaagccccaccacctctgagggaccaaccggaagaatcgcaccaccctttatccaagtttccctgtcacaaagcccaggcctctcaggcccctctcatcccagcgtgaatgtcctataggcagtcttccgtcgctgccctgctctatctacccaggatcacggactgacacgctaccaacttcacttatttaactagtcctgcgaggggcatcatccgctccatgtccacggccagtccccagagcccaggagggctcgcacacaggcgctcggcagatactgagaaacaggaaagtggccgttcaccgggctgcttcctctcccaaggctaagcggcccctccacagattccggggcggggactcggtaagagccgatggaggagaggagcgaggggtccttcggcggcggccagcgcgcgatcctcccggctccgtccccacatgcgggtggaggggccggggctcctcccggtacgtgcgggcccccggacagcggcctctcggacgtgcccttcggcgctgccaagacccgtcctggtacttgccgagccacggaccgcggcggctaccgcccggcctccctcgaccaccctccgcagcagcatcgcccgcggacgggatccggcaacccctgaccgtgagcggcgggcgctccggccaatcccggaccttcaggaagtcgcgccgctccagccagcgtgaggctgagcgcaggaagcggaagtgccgatcggtggggcggaaccatgcaggaaggcggaagtggcttcgctagggagcctcccggcgtggagatggcgggagctggtcgcggagcagcggtgtccagggtgcaggcgggtcctgggagtccccggcgagcgcgggggcggcagcaagtgcagccgctggggaagcagcgcccagccccgtggcccgggcttcgcaggtgactgcgctgccccgcgaggccgccacacttccccagagaaggg

SEQ ID NO: 19295 - DNA, 2300 bp, Homo sapien
aagcaagactccatctcaataaataaataaataaacaaacaaacaaaggtgccaattcaatgcagcacggttcagaacgtgccatgtgctacccaggccagtgcgcctcctccctgcaccttcctcacctctatctcactatccctttggcagccatataacccccaacaagaagcctacagtttatacacaaattataaaacagctttgctgtaaaaccagtgccacgtttgggaagagaaatgtgtctataagcaaaatatacacacagtggactccgtttcccaacatgcccagagtgttacctctgggttgcagcggtggacatgtggacaccctacccagacttgggggaggaaggcaagacttctcagaggggcctgatggaatttcctccttcagctcctgactccacccacttctctctaccattgcttcagcactcttgtcccaagaatcatggcttctccctggcagtagccccgccagttgccaggtccactctccctcactccatcatcgctcggtgaccctttttttgcttagagtaaacatgaattggccgtgccctgctaaaaactctgatgaatcttcgctacttttggggagaaaaaaacgccgctccttagcatggatcctgaggccccataacgggtcctccccgcccaccccacagcctccttccaagcctcgtctggaaccacagcgccaccagctgccagccactgctttagctttggccacgctcccccaccttctgagcaccgggtcttggcatatttcctctgcctgaaacgttctgaagtatttgggcgattgggcgggttgagacacacaaagcttcactgccgcccagtatgggcctgcacacacctgctttcttcctcttcttgttactgatcgggtttttcatctcttggcggctcctcataatctcccggagccggaaaggaatctcctgttcgtcctggttcttgggcttgcagttcactttcttcttctctttgctgggagaaagaacacgggggtgagacccgtcccaagtaaagcacaagcagaatcagtaagagaaacaatagttgggtctggcaatagaatctacacgggctggccgggcttggtggctcacgcctgtaatccctgcactttgggaggccgagatgggcggatcacgaggtcaggagatcgagaccatcctgactaacacagtgaaaccccgtctctactaaaaatacaaaaaatttgccgggcgtggtggcgggcgcctgtagtcccagctactcgggaggctgaggcaggagaatggcgtgaacccgggaggcggagcttgcagtgagccgagatcgcgccactgcactccacactccagcctgggcgacagagtgagactccgtctcaaaaaaaaaaaaaaaaaaagaatctatctatacaggggccacatctggcttctgtggtgcgagccggtccagcagtccagggagcagggatctttcctctcggtctcactcagtggctgtccctgaaccccttcctcacgggacgcgaggccgaaaggcactccgaaagcccaggaggcctttccgccctgacctcgtccagaaccacaaagacgggacactgggacgcgggaaaggcaaaaccaaggactcgctcgcgcctccattcattcaaccgatcctggcggagcgtgggccgcgggcacagacagaggagggcactgagcccgacctggggaaggggtccgagcgaacgctccctagggggtcccgggcggagccttcaaggcgtccccttctctggggaagtgtggcggcctcgcggggcagcgcagtcacctgcgaagcccgggccacggggctgggcgctgcttccccagcggctgcacttgctgccgcccccgcgctcgccggggactcccaggacccgcctgcaccctggacaccgctgctccgcgaccagctcccgccatctccacgccgggaggctccctagcgaagccacttccgccttcctgcatggttccgccccaccgatcggcacttccgcttcctgcgctcagcctcacgctggctggagcggcgcgacttcctgaaggtccgggattggccggagcgcccgccgctcacggtcaggggttgccggatcccgtccgcgggcgatgctgctgcggagggtggtcgagggaggccgggcggtagccgccgcggtccgtggctcggcaagtaccaggacgggtcttggcagcgccgaagggcacgtccgagaggccgctgtccgggggcccgcacgtaccgggagga

SEQ ID NO: 19296 - DNA, 2300 bp, Homo sapien
agaggtgccccatcagagcagtggcagccacacacctgccccggacccccagctgcaccacctccctaccgagccatgcttccggctgtaacccgagggagcccccgcccccgctgtgctccctctcagctcagggacgcgtacattttattgaagagtatcagcaccgatgcttctgcaagttgttctgcagaaaggagacctaagagctgcacacaggatgcagagagctgggtggggtcagaggcgtccatcacaaactggggaaaaagaaaaagacagcagcaatgccccgctgccaaacttcctcccctgggcctcacagacctggcactgggagagcaaaactgcattttttaattaattaatttattttttgagacgaagtctcgctccgagtgcagtggcacgatctcggctcactgaaactccgcctccagggttcagggttcaagtgattctcctgcctcagcctcccaagtaactgggactacagacacccgccaccacgcctggctaattttttgtacttttagtagagacggggtttcaccatgttagtcaggatggtctccatctcctgacctcgtgattcgcccacctcagcttcccaaagtgctgggattacaggagtaagccaccgcgcccggcccaaagtagctttaaacaaagctttgggaacaagcagaagcagagggaatcgagttttatgaagacgacctggtgtcactcgtctctgtcctcatgtggccatcagttctccatactggtatccgcggcacaggccttatcaagatgagaccaaccagaggtacgtataagtccaacataaacacagacgtaccggggagtgacacagagggccaagtctgttctctgcggagcagcagccctgccctcagcaagccctctgtgagctcctaccgggggcctgggagcgcaagcaccagaaaccagacagggtgcccagcaggaagcaacactagctaagacctatttccatgagtagtatagtcactaaataacccaaacccctttctacacacagcaaggttggggactggacgtcacagaaatgtagacacacttccctaaaggaagcccatataggattacaacccaccaggagagaacggcagtttccatagtaactggaccagatggggcccatgcaccccccaagctcccggatggtgatctttctctgtgccacgatgtcagtaagattggtgcccacctataggaaaaaccacgatgcaaaaagaacaatacaaccgctgtcccgttgtgaactcctgaagagcaccgtgcccacaccttacacggtggcctgaaccccgcagacccattctccctaacgcaggaacggcgagcagggaccgacgcccatcagtagctggactcgctgtgggggcgaccagccacaggaagccgttgcgaggggagaggaagtgcccgtggagggcggcaggccccctcatcccgcgccaattatcctcagctcgggccgtcccccgctcccgaaggctggccttaagtcacgacctgacccgctgcgcctcggcgtgcacttagaggagcccggagctcttcgccaagcgcagaactgaccccccgcaactccacccgcgggggcggacacctaccgtgggccgtgtcgggggcggctcccccaggtcgcctttcccatcccgggagctcacctgtgcgaagcggtcaaggacccgagcagctaaagggtgagtccccgccccactccgggtgccccccgcgccccggtcccgtccccgcgcggaaggatatcctgcagccgtttcaccagcagcgtcttcccgacgcccgtggcccccagcaggagacacattccgtgcttcgctccacccggcacccgtagctcggcgccgcggctcaaggcccgcccaccggccactctcattggatagttctcaccttcggacttctcattggttcttagggctcattgttccaagggcgcgtccaattagcgcgcagcgttagcgggagagcggaagaccccgcctcctcgcggctctagggccggcgcggtgacgtgcgcgtgcgcgcactggagggaaaaggcggaagcggaagtcggggggcgcgccagctcgtagcaggggagcgcccgcggcgtcgggtttgggctggaggtcgccatggggcgaggcagcggcaccttcgagcgtctcctaggtaacgcgtccccacccgacggctcggccttggtcagcccgcagcctccgcccggcgctgagtcagcgcggccccgagggcccgag

SEQ ID NO: 19297 - DNA, 2300 bp, Homo sapien
tccaggaggctcagataggatcagctttcacctccaaaaacgtgagaaaacgccttcctaaaccattaggcacttcccgaagccagtgtgggaacaaaaggtgggtctgggacccgcagcccccaagagagctcgaaggtcccagagagaacactgccggctccacccttcgaggcccagtgttttgggtcagaagcccaagtgcgagcctaacatccgactgagtcacccactttcatgactcaggccttgtggcccactcggccgggtgctcgtcggtcaagaggaaatcggccgaatgcccgggcccgcggaggagcgaggtcgccgagcgcccctggcgccctgcgcggaccctcgcagagccccatttgccaacgcccgacggacgccgaccccacggccgcgccgagggtccaggatcggcggctccgaacccgggaggacagcgggccggggagaggcgggcagggcggccggtccgcgcccctcgggccctcggggccgcgctgactcagcgccgggcggaggctgcgggctgaccaaggccgagccgtcgggtggggacgcgttacctaggagacgctcgaaggtgccgctgcctcgccccatggcgacctccagcccaaacccgacgccgcgggcgctcccctgctacgagctggcgcgccccccgacttccgcttccgccttttccctccagtgcgcgcacgcgcacgtcaccgcgccggccctagagccgcgaggaggcggggtcttccgctctcccgctaacgctgcgcgctaattggacgcgcccttggaacaatgagccctaagaaccaatgagaagtccgaaggtgagaactatccaatgagagtggccggtgggcgggccttgagccgcggcgccgagctacgggtgccgggtggagcgaagcacggaatgtgtctcctgctgggggccacgggcgtcgggaagacgctgctggtgaaacggctgcaggatatccttccgcgcggggacgggaccggggcgcggggggcacccggagtggggcggggactcaccctttagctgctcgggtccttgaccgcttcgcacaggtgagctcccgggatgggaaaggcgacctgggggagccgcccccgacacggcccacggtaggtgtccgcccccgcgggtggagttgcggggggtcagttctgcgcttggcgaagagctccgggctcctctaagtgcacgccgaggcgcagcgggtcaggtcgtgacttaaggccagccttcgggagcgggggacggcccgagctgaggataattggcgcgggatgagggggcctgccgccctccacgggcacttcctctcccctcgcaacggcttcctgtggctggtcgcccccacagcgagtccagctactgatgggcgtcggtccctgctcgccgttcctgcgttagggagaatgggtctgcggggttcaggccaccgtgtaaggtgtgggcacggtgctcttcaggagttcacaacgggacagcggttgtattgttctttttgcatcgtggtttttcctataggtgggcaccaatcttactgacatcgtggcacagagaaagatcaccatccgggagcttggggggtgcatgggccccatctggtccagttactatggaaactgccgttctctcctggtgggttgtaatcctatatgggcttcctttagggaagtgtgtctacatttctgtgacgtccagtccccaaccttgctgtgtgtagaaaggggtttgggttatttagtgactatactactcatggaaataggtcttagctagtgttgcttcctgctgggcaccctgtctggtttctggtgcttgcgctcccaggcccccggtaggagctcacagagggcttgctgagggcagggctgctgctccgcagagaacagacttggccctctgtgtcactccccggtacgtctgtgtttatgttggacttatacgtacctctggttggtctcatcttgataaggcctgtgccgcggataccagtatggagaactgatggccacatgaggacagagacgagtgacaccaggtcgtcttcataaaactcgattccctctgcttctgcttgttcccaaagctttgtttaaagctactttgggccgggcgcggtggcttactcctgtaatcccagcactttgggaagctgaggtgggcgaatcacgaggtcaggagatggagaccatcctgactaacatggtgaaaccccgtctctactaaaagtacaaaaaattagccaggcgtggtggcgggtgtctgtagt

SEQ ID NO: 19298 - DNA, 2300 bp, Homo sapien
atctgcaagctgtacagagaaaaccccttaatcctccaagatgtcaaaaaatcctagcatgtagcccatgcagttctccacataagagcctaacacggtcagctacgtcgtggagacccaacgggcaccaagcgagcccagcttagtgcacggctgctcctccgcatcagggcacaggccccgctaactcactgtgtgtccccttggcggatcaggtcgcagatctgcaaaatggactcccaatctgtctccaacaggagctggctggtcgccttgtctgagagagaaaatgccatgaaagggaggggttatcctgctggacgccccgtgcagcaccccagcttggcagcagctgggggggactctctccttcccctttagacatttggaccaaatgaaaaagcatgacagaatcctcctgagcgtgctgatgggcagggaagtgccatcctccccagggaagcagcaaacagcgtaagagcacaccaggtgctggtccaagccctcccacaacccgcgagcgaggtaaagacactcagcagagaggcgagggcactgccgtgagtcacacagctcaccagagacagaggctgattcactcttaaacatcaggctcggctgcttctcaacaaagaaccctatcacccgtcccttggagtccccgttcgcccagatgctcccggtttcaatgggaccttagcttgggcaagggctagagaggcctgcagtgtagactccaggccccttgctccaagccaagtgctttggaaataagggcagaacggggctccaaggaggactcgccagcatacctgtcatcataccacatcactgctgtctccaacaactggcccctctgggggggcagctccagctctgcccacatcgcctttcccggatacagaaacgatctaacaagccaagccacgtccactttctatactgattcagtagttaacctctggattcatccctgaagcactgaactacctgtgtggctgagatactcagtctgcttgctggttcccttggcaaggaaggtgtctcacttgaagtctccttgaaaaccctacttgacaaaaaggcaagcttgggcagcccattcgaccacccaagctcctacccccaaacattagacgcattttccacgtgctgctgggcacgtgcacatcaacattcgtttccctcccaaaacgcgtcaattccaggaggctcagataggatcagctttcacctccaaaaacgtgagaaaacgccttcctaaaccattaggcacttcccgaagccagtgtgggaacaaaaggtgggtctgggacccgcagcccccaagagagctcgaaggtcccagagagaacactgccggctccacccttcgaggcccagtgttttgggtcagaagcccaagtgcgagcctaacatccgactgagtcacccactttcatgactcaggccttgtggcccactcggccgggtgctcgtcggtcaagaggaaatcggccgaatgcccgggcccgcggaggagcgaggtcgccgagcgcccctggcgccctgcgcggaccctcgcagagccccatttgccaacgcccgacggacgccgaccccacggccgcgccgagggtccaggatcggcggctccgaacccgggaggacagcgggccggggagaggcgggcagggcggccggtccgcgcccctcgggccctcggggccgcgctgactcagcgccgggcggaggctgcgggctgaccaaggccgagccgtcgggtggggacgcgttacctaggagacgctcgaaggtgccgctgcctcgccccatggcgacctccagcccaaacccgacgccgcgggcgctcccctgctacgagctggcgcgccccccgacttccgcttccgccttttccctccagtgcgcgcacgcgcacgtcaccgcgccggccctagagccgcgaggaggcggggtcttccgctctcccgctaacgctgcgcgctaattggacgcgcccttggaacaatgagccctaagaaccaatgagaagtccgaaggtgagaactatccaatgagagtggccggtgggcgggccttgagccgcggcgccgagctacgggtgccgggtggagcgaagcacggaatgtgtctcctgctgggggccacgggcgtcgggaagacgctgctggtgaaacggctgcaggatatccttccgcgcggggacgggaccggggcgcggggggcacccggagtggggcggggactcaccctttagctgctcgggtccttgaccgcttcgcacaggtgagctcccg

SEQ ID NO: 19299 - DNA, 2300 bp, Homo sapien
tcagcagacagaacgaggacacaagtctcagggcagatacgcgcatccgcaagtgtagacaggaaaaaccgtgaatttacttgaaaggcaaaggccgcatgagctggctgcatgagctgcagtccgtggacatggattacaagcacttgtgggtctgtggctctgctgggacaaaagccttcctccctgggctggggaagggaggaccagggccatgcctgctttcctcctgcacagatggcaccctctggcggtcccccccagcagcagccccccgtggcccagcaaccgcaggcacaggggccgccggcacagggcagcgaggcccagctcatttcattcgactgacccaggccatgctcacgtccggagtaacactacatacagttcacctgaaacgcctcgtctctaactgccgtcgtcctgcctccctgtcctctactgccggtagtgtcccttctctgcgagtgagggggggccttcaccccaagcccacctcccttgtcctcagcctactgcagtccctgagttagtctctgctttctttccccagggctgggccatggggagggaaggactttctcccaggggaagcccccagccctgtgggtcatggtctgtgagaggtggcaggaatggggaccctcaccccccaagcagcctgtgccctctggccgcactgtgagctggctgtggtgtctgggtgtggcctggggctccctctgcaggggcctctctcggcagccacagccaagggtggaggcttcaggtctccagcttctctgcttctcagctgccatctccagtgccccagaatggtacagcgataataaaatgtatttcagaaagcatcagcgttttttctttaattaatttttttgagatggagtctcactctgtcacccaggctggagtggtgatctccgctcactgcaagctccgcctcctgggttcaagcgattctcgggcctcagcctcccgagtagctggactacaggtgcaccccattaccatgcctggctagtttttgtatttttagtagcgacggtgtttcaccatgttggccaggctggtcgtgaacgcctaacctcaggtgatccacctgcctcgggctcctaaagtgctgggattacaggcatgagccaccgcgcccgacctgcatcaacgtttgctcagggggcaggtggtcaggctgatggcccagctgcaggcagggtcatttccagcctgcccctccctgaggctgcgtgccagggttcatgtgtgccctccgcggctctgcactgaccccgccggtagctggggaggagtttgggcttggcgcctccttcgtgtagtggctgaagcttcccgggtgctcctcattcctgggaagggagtcgggtgatgggaacggtgggagctcagcgctccgagtctgcggccgggggccagcggggctgaaacgcgcctcctgagtgttgaaagcggcaggcgccggcctttgcacccagaggccagggcgtctcactcaccttcacatccaggcctcttaggggagcgcggctttggcttttccaggaaggaatggactccaacggacagggaaagaagaagtgtggagagacgggcaggataagcaggcactgggcccaagccgcccttggaggctctgcctgttctgatctgaaggcggaggctcagccgtgctctcccaggaagccacctgggcgtttggggctttagctaggaaagaggatgtcgcctgcggctgcgaaggcgccaaagcccagacctcgcgcctccgcccgcgacggcggcactgggggcccggagcgggcgggagacgtggattactgcgggcttcggggccctagcctcgaccgcgacgttcgctcgcatcgcgtacggacagaaacccgtgagcgctgaagaaagaacacctgaatccggagccccagcccccgtcgctcgtttgcgcgaccccaaaacctggcgggacgagggtcgcccgatgtctagctgccgccacagacgacgcttttgcgtctgcgcagcgcgccgccttgtgggtaatctcagggtgagacgaggctagcgcgaggtacggctagagcgtcatttccggctcgaatgcccggcagccgtggcggctagagcgttcctccccagctcgaatgcccggcggccgaggcggctagagcgtcgcctcctcccggggaaccgcgtgtgaccttccagcccgcggaccgatgctgccggcggccgctcgccccctgtgggggccttgccttgggcttcgggccgctgcgttccgcctt

SEQ ID NO: 19300 - DNA, 2300 bp, Homo sapien
agctcttcagttcctgctccttacccgctgggccctgctctttctgctttggagcagttcttccttcagcagggagccagtgttctgtgggttggggggtctctgccagcagccagtttcagccctgtcttgcaggtggccttcggagggacaggttgcagcccaggcccgcccccctccttcctggagtgtctcacagactcaggggacactggccctccaggccctgcttcccccaaggtttccatccatcgcctcttgattcttggtaatcgggagccgatggatgcaactcatctcggtttacactgagtgagacaggcgctgtgggcacagccaagtctgcgggactcagtcaggtgtgagcctggatggccccggacaaggaagcctgtcctcttgctgggaaatttccgttaagatcgggccacttcccctgcttcctaacggttgagtctgtttgctctgggccttttaagcccagcgtgatccctctgagtccctgcggtgcatttgcgccatctccacgcttcctgttgagccccagcccaggcttggtgcgggcagtgctgcactgcactctcctggttgcctcctgagcacctccacccgcttccccaccaggcgtggctgtgttttcacccccagtgtccatctggcacccttctcgattgccaggtagttacggtctgtgtgggcaacacctgagggacccaaccaaaccaaggtccaggacacacttccgggcaggggtaccgcctctggttagctgctcactccccagcccaaatcttccgctgatgacttctggggtcagaggccacctaagggtctagaaaacagtctcctccagttggctacctgcctacgttggggttacggcccaataaacccacagccaagctgaaaatcctaagtgtgcgtcttgcgcttccgacacagccagggcatcgctggatgcgcagaggcagggctggacacattctggtgcttgaggggttccagggaccacgagttgtttttccggtgctcctcacccttcgccctggagggtgggggaggccggacagcagtgaccaagctggagctgcaggtcttcatccctgtggcccagccctaaagcagccttggggacttaaatttcattttgcccagcaggtgcacctgggccaggaacacaccagcgcctccttgttcttcgcagggaagtggaatccaagcaggggcccagatgcaggcaggcatctcctgggaacaagagccccagaatccaccccggggccccacttccagggtggttgcctggggcgtctggtcagagccagaccagaactgagcaggagcttccgggcatctgtgtgtgggaagggagaggcaagtccttcctaaccgccttttttcccagttttcattcagtctggccccaagcaggttctttttttcttttctttttcttttttttttttttttttttgagatggagtctcgctctgtcgcccaggctggagtgcagtggcgcgatctcagctcactgcaacctctgcctcccggattcaagcgattctactgcctcagcttcctgagtaactgggattacaggcgtgagccaccgcgcccggctcccgaagccggttttctgttctcttgcagctgggccggggctgagccctcggtgggggcaggggttgcagacctgtggacgcagggcccacgccgcacacacgtggcccccgccaggtgactcacgagccagcgcctgcgcggcggggtggccaccgggtgcaggttcagggccaggggccgggcctcctggggattggcagggcgcccgccgcggtcccatgtgcctggggccggtccccgggcggtggccttcggccctgcgctccggcctggagaagggaggacgccaggggcccgggggagtggaggcggccacgcagcagccccggagcacccgcgcgtccgcaggccgggcccaccgcgctcggcgcccctcgcggccgctttaaggcgccgggcccgcctcaatcgcagggggcgtggcctagcggtcccgcccccggggcgcgcgcgcgcattggctgtgcggggtgcgggcgcgcgggcggcgctttgaaccgggcgcggggcgcggggcgcggggcgctgcggccggtacacgccggggtagggccggggtcgggttgtggtcgggccgggattgggctctcctgggccatggcagccgaggcgcgcgtgtcgcgctggtacttcggggggctggcctcctgcggggccgcctgctgcacgcacccgct

SEQ ID NO: 19301 - DNA, 2300 bp, Homo sapien
atggagtcttgctctgtcacccaggctggagtgcagtggcacgatctcggctcactgcaagctccacctcccgggttcacgccattctcctgcttcagcctcctgagtagctgggactacaggcgcccgccaccacgcccggctaattttttttttttttttttgtatttttagtagagacggggtttcactgtgttagccaggatggtctcaatctcctgacctcgtgatccacccgcctcggcttctcaaagtgctgggattacaggcatgagccaccgtgcccggcctaatttttgtattttttagtagagaaggggtttcaccttgttggtcaggctggtctcgaacacctgacctcaggtgatccacctgcctcggcctcccaaagtgctgggattacagggttgagccaccacgcctggccaaccatctgttttttaagccactcagtctgtggtctgtgaagacagccccggcagactcatccatccagcttcaagtgctgcagtgctcctagcacaatcgatcgctgtccctgacaacaaagacctccctggtcaactctgtgtctgtgtcccatcccatccacttgctcatgtcctgtagtccaagccctactttggacctccactggggctgttgcaaaagtaaaggcagccagcaatgaagagcctgttggaacacgagttttaaaaattcccttggctgggcgcagtggctcacgtctgtaatcccagcactttgggaggccgaggcgggcggatcacaaggccaggagtttgagaccagcctggccaatatggtgaaaccccgtctctactaaaaatacaaaaattagccagacgtggtggtgcatgcccctgtagtcccagctactcgagaaggtgaggcaaaataattacttgaacccgggacgcagaggttgcagtgaaccgaggttgcgccaatgtagtccagcttgggcgacagagtgagactctgactcaaacaaacaaacaaaaaaattcccttggctgtgcttctagaggtaagatcacaggggccggggcagagagagcacaccacccagggtgtgatggtccctgaacgtggagagcaaactggacaccaccttaagtgtgagtatgtgtgtcaaacctggaatgcagagacactatgcagggtgaacccatgagtgtgtagggaataccctgtcccctgcaggtgtgtgaggcaggggagccaggcacgtggaggaaaagtcgcaggactgactgagcaggagcctgaggcactgagatcccagccaaggatgcctgcggggtttctgagcaggaggcagcaccatcagagtcatttttttttttttttttttttttttgagacagagtcttgctctgtcgcccaggctggagtgcagtggcacgatctcggctcactgcaacctccgcctcccgggttcacgccattctcctgccccagcctcccaagtagctgggactataggcgcccgccatcacgcccggctaattttttgtatatttagtagagacggggtttcaccgtgttagccaggatggtctcgatctcctgacctcatgatccgcctgcctaggccatcagagtagttttgggaaaaccactgagagtgaggcaagccacgctggaaggtgaaaactgacaggtagggagatggaggggctaaggcctgtttcaccacagcacggtggacctgtgcttctgcagatgtggagggggtggccgcccctcactttccaggaggtagagagcaaaagcccttccaatgaccttggtacctactgtgcccttgatctcgcgttcctagctatctcatgggttctgcaccggtgcctcctcctgccctcggtaaggcaccttctaggtccagctgtggggcagggagcgacaggcaggaatgatctgacccctttggccgggcacggtgacagatgggctgaaagatgagtcactaaacatgatctggggtgcggggcgggggtgcagctcagtttcagcccctcgcgccggggaggatgaccgtgcagctttatatagcccctgagccctatataagcaagtcagaggccggggctcgtccgacaggagccctcaagctgatctggtcgggaccggatacattattaaccccagtgcagtagggtccccaggggcaacctgccccacagcgcccaagatgcctagcagaactgcccgctatgcccgctacagcccacggcagcggcggcggcggatgctggctgatcgcagcgtgcgtttccctaatgatgtcctgttct

SEQ ID NO: 19302 - DNA, 2300 bp, Homo sapien
aaggagaacctgctggactttatcaaacacaaccagctgccccttgtcatcgagttcaccgagcaggtgcggctgccctgcagcccccaggctggggatggggaggagtgggttgggggtggcatgaggctcccggtcaccactgctgtccagcgtctgacattggaggccattgggagaatcttctgcattaatagtgtgtgactcagacccagtaacttaagtttataacacagacagccccgaagatttttggaggtgaaatcaagactcacatcctgctgttcttgcccaagagtgtgtctgactatgacggcaaactgagcaacttcaaaacagcagccgagagcttcaagggcaaggtgagctgctcttctgggtggctcgtggggcggtgccagggagcagtacaactcttcccgaggtgacaagtgtggggccttcctgaggctgcctgctggactggatcgggcacctgattcaggacagcctggatgtaggcgaggggccagccaggccagacctctgctcccagtcacctgctggtctggttgggcaaccccggaatccaggttggaggaaaaaggcaccggagcacggtctgcttccgagcaaagtcagggctggaggcagaggccagccgtctcccgcacctgtgcaacctccttttctcccccagatcctgttcatcttcatcgacagcgaccacaccgacaaccagcgcatcctcgagttctttggcctgaagaaggaagagtgcccggccgtgcgcctcatcaccctggaggaggagatgaccaagtacaagcccgaatcggaggagctgacggcagagaggatcacagagttctgccaccgcttcctggagggcaaaatcaaggtgcaggcgcgtccccgggccagggctgcctcccgggtagagccgccaccttggggtctctgggctctcagtgtcctgggcttcgtcctcaaagtaagatcttcagagtaagaggacggagcccaagatggtgtgaagaccaccattcttgtcacacctttggggacctgtaggagccctcttgtccacacggctggcccagatgctcctcagggaaacctcctggccggcgagggtgcggcctgcgtgggctcattgggcccagcccactggcccagccttctctttctggattcttggcactgttggtgtctgcggctgccaccctggtgtgcccagggcagccacgcacctcagtcccgggcagggtgagggttggggagctctgtggtcccccaggcatcgccgcccctcaccgtgccctgcctgccctccagccccacctgatgagccaggagctgccggaggactgggacaagcagcctgtcaaggtgcttgttgggaagaactttgaagacgtggcttttgatgagaaaaaaaacgtctttgtggagttctgtaagtgttgccctttcagctccccaggtccgtgccaccagggcacgcgcaaggtaggcagactcctggggaagcgtctgccagtggctttgtgtccaggacacaccctagaactgctttcttttcagatgccccatggtgtggtcactgcaaacagttggctcccatttgggataaactgggagagacgtacaaggaccatgagaacatcgtcatcgccaagatggactcgactgccaacgaggtggaggccgtcaaagtgcacagcttccccacactcaagttctttcctgccagtgccgacaggacggtgcgccttccctccagacggggctggggcgggctctgggaagagcagtggtccccacgccagcctgggtgcctctctggaaggagcctggggctagtcaggtgggagaagagctgtgggagctccttcagaagcacccacctttgtttttcgagagagatgggatctcactatattgcctaggctgtttttgaactcccaatgtgctggattccgggtgtgagccaccggaccgggcctgctctgcctttctctagggaggaggagccaatgccaggagattggctctgggccgggaccagcccctgcactcatccctgtcttccacaggtcattgattacaacggggaacgcacgctggatggttttaagaaattcctggagagcggtggccaggatggggcaggggatgatgacgtgagtggggtcacagccctgggctggtctctgggattcagccccttggccccacgggacatgcccacttgggctcggcttgtgatgggaatggtgccattggaggcacgtctgtgcgtccagggctctggggct

SEQ ID NO: 19303 - DNA, 2300 bp, Homo sapien
gcctcctgggttcaagcgattctcctgcctcagcctcccaagtagttgggattacaggcacccgccaccacgcccagctaatttttgtatttctagtaaagacgacgttttaccatgttggattaggctgctctgaaactcctggcttcaggtgatccgcccgcctcagcctcccaaagtactaggattacaggcgtgagccaccacgcctggcctgtttcactcgtcacccaggctggagtgcagtggtgcgatctcactgcaatgtctacctcccagactcaagcaatcctcctgcctcagcctcccaagtagctgggattacaggcaggtgccaccatacccaactgatttttgtatttttgtatttttttttttttttgagacagagtcttgctctgttgcccaggctggagtgcagtggcacgatcttggctcactgcaacctctgcctcccgggttcaagtgtttcttctgcctcagtctcccgagcagctgggattacaggtgtgcaccaccacacccagctaaatttttgtatttttggtagagtcgaggtttcaccatgttggccaggctggtcccaaactcgtgaactcaagtgatccacctgcctcagcctcccaaactgctaggattacaggtgtgagccactgcacctggccttttttttttttttttttttttttttgagacagagtttcgctcttgtcgcccaggctggagtgcagtggtgcgatctcggctcaccgcaacctccgcctcccgggtccaagcgattctcctgcctcagcctcccaagtacctgggattacaggtgcccgccaccacgcccagcttatttttgtatttttagtagagatggggttttaccgtgttggccaggctggtctcgaactcctggtctcaagcgatccacccatcttggcctcccaaagtgctgggcttacaggcctgagccactgtagccaaatttattttaaaagaataataatcccattacatgttatcataaatcacatctttacggaaactagtttgtcccagacaaaaacaatttagtgctgagtgatgttttagattcctccagcaggattctcctctcctgccctcctgctcttgcgacaccatgcgcccagcagcctctgtgggtctgtgccgcagcacgtgagagggagagtgaaaaggcagaggccagagaagtgtgagtgtgaaaatagctttgaccagccgggcgcggtggctcacgcctataatcccagcactttgggaggccgaggcgggcagatcacgaggtaaggagattgagaccatcctggctaacgtggtgaaacccatctctactaaaaataccaaaaattagccggtggtggcgggcgcctatagtcccagctacttgggaggctgaggcaggagaatggcttgaatccgggaggcggagcttgcagtgagtggagatcacgccactgcactccagcctgggagacacagcaagactccatcacaaaaaaaaaaaaaaaaagatcaagaccttcgtggccaacatggtaataccccatctcgactaaaaatacaaaaaaaaattagccaggcatggtggcaggcgcctgtagtcctagctactcgggaggctaaggcaggaaaatcacttgaacctgggaggcagaggttgcagtgagccaagatcatgccactgcactccagcctgggcaacagagcgagactgtctcaaaaacaaataaaaaagaaaatagctttgaccacatgggtgccctgaaaaggctaggggccctggggatgggccacacttcaaggttgctggaggaccacgtgcgccaggcttgcattgtggatgtgaagccagctgttgaattcacgggcagccataaggccgtgaccagagccagtcttactgtcgaggaacagccatgtcctgtacccattgctggacctgtggctcgaaaccccacgggagggcagggctgctggctgctgtgacttcccacgtccagggagacccgggcccaggggctgtgctcccagcagcaatgctcagtcagggccctctttctgtccacagtttgatgaaggccggaacaactttgaaggggaggtcaccaaggagaacctgctggactttatcaaacacaaccagctgccccttgtcatcgagttcaccgagcaggtgcggctgccctgcagcccccaggctggggatggggaggagtgggttgggggtggcatgaggctcccggtcaccactgctgtccagcgtctgacattggaggccattgggagaa

SEQ ID NO: 19304 - DNA, 2300 bp, Homo sapien
ccgggcgtggtggtgcacgtctgtaatcccagctacttgggaggctgacacaggagaatcccttgaacctgggaggtaaggttgcagtgagctgagatcgtgccaccgcactccagcctgggtgacagagtgagacttcgtttcaaaaaataaaatttttaaaatgcagagggccatcctgggcaacatggtgaaaccctgtctacaaaaaatacaaaaattagctagggctgggcacagtggttcatcccggtaatcccagcactttggaaggccgaggtgggcggactgcttaatcccaggagtttgagaccatcctaggcaacgtggcaaaaccccatctctacaaaaaatagaaaaattggccgggcatggtggctcacgcatgtaatcccagcactttgggaggccgaggcgggcggatcacgaggtcaggagttcaagaccagcctggccaacacagtgaaaccccgtctctactaaaaatacaaaaattagctgggcatggtggcgggcgcctgtaataccagctatttgggaggccgaggcaggagaatcacttgaacctgggagatggaggttgcagtgagccaggatggcgccactgcattctccagcctggacgacagaggtagattccgtctcaaaaaaaaaaaaaaaaaagaagaaacattgctgggcgcagtggctcacctctgtaatcctagcactttgggagaccgctgaggcaggtgtatcacctgaggtcaggagtgagaccagcctggccaacatggggaaccctgtctctgctaaacatacaaaaattagccgggtgtggtggcgggcacctataatcctagctacgcgggagggtcaggcaggagaattgcttgaacccgggaggtggaggttgcagtgagccgagatcacactattgcactccagcctgagcaacaagagcaaaactccgcctcaaaaaaaaaaaaaaaaaaaagttagttgggtgtggtggcacatgcctgtggtcccagctacttgggagcctgaggtaggaggattgcttgagcccagaagttcgaggttgcagtgagccatgatcatgccactgcactctaacctgggtgacagagcaagaccctgtcttccaagaaaaaaaaaagggctgggattggtggctcatgcctgtaatcccagcactttgggaagtcgtggtgggcaaactgcttgagcacaggagttaaagaccagcctgggcaacgtggcaaaaccccgtctctacaataaatacaaaaatgagctgggtgtggtagcgtgcatctgtaccccagatactcaggaggctgaggttgggaagattgcttgagcccagtgggtggaggctgcagtgagccaagattctgccactaccctccagctgggtaacagagtgagcccctgtgtcaaaagaaaaaagaaaatgcagagagatcagagaaaaaaaatgggtttgtgatcctgttattcagagacagaatcaccctcttccctctccactccccataaacacaaccacagtctcacgtacactggggtttaggaggcgggcggacggcaccgggcctcttccatggtgggagaacatcttacttaggttgattcaggtgtcctcagcctggctggcagagagcagagacgggagcaggcgcggcagggcaggcggcactccctgtttgagagtagaacctacatttgtttggggttagctggcagagaggctgatgacatcgtgaactggctgaagaagcgcacgggcccggctgccaccaccctgcctgacggcgcagctgcagagtccttggtggagtccagcgaggtggctgtcatcggcttcttcaaggtagagaccagagcattccagtcttccttccttccgtcatccattgaggaggggtccacagcctgcagctggcagttctgcacgtgtcccccctggcctgggctctacagggtctgccctactgcttggtgctgcgggatcatgacgacctctgcttctccctcctcattcaggacgtggagtcggactctgccaagcagtttttgcaggcagcagaggccatcgatgacataccatttgggatcacttccaacagtgacgtgttctccaaataccagctcgacaaagatggggttgtcctctttaagaaggtgagtggccccaggcagctctgcccaggttagttctggggttggtctgcagagggtggcgttgctctccttatcgttaagggaaccttgctcctggcacctttggcccaataggtatgttctgcagcttt

SEQ ID NO: 19305 - DNA, 2300 bp, Homo sapien
atacaaaaattagctgggcatggtggtgcatgcctgtaatcccagctactcgggaggctgaggcaggagaatcgcttgaatccgggaggtggagtgagccgagatcgcccactgcactccagcttggatgacaaagtgagattctgtctcaaaaaaataaaaaataaaaattttaaaaaaaggacatttttttactattttttgagatagggtgtcgatctgtcgcccaggctggagtgcagtggtgggatcatggctcaccgcagcctcagcctcctgggctcaaatgattctcccacctccacctcccaagtagctgggaccacaggtgcacaccaccgtgcctggctaatttttttaatttattttttgtagagacgggagtctcactatgttgcccaggctggtctcgaactcctgggctgaagggatcctcctgcctcggtctccaaaagtggtgggattacaggagtgagccacacagcacctggcctcaatattattatgtaatccaacatatgcatacagaatatttcaacatgtagtagtcaatgtaaagttattaacgaaatactgtaccttctgtcctccagcccctacacgcacacttttttttttttttttttgagatggagtctcgctctgttgcccaggctggagtgcaatggcgcgatctcggctcactgcaacctctgcctcctgggttcaagcgattctcttgcctcagcctcccgagtagctgggattacaggcgcgcgccaccaggccctgttaatttttgtatttttagtagagacgggaggtgagggggtttcaccatgttgatcaggctggtctcgaactcctgacctcgtgatccgcccgcctcggccttccaaagtgctgggattacaggcgtgagccaccgcactcggccccgcacactcagtcttagaagtttgatgtgcattgcgcactcacagcccgtctcaggtggactggccatatttcaagtgctcaggagcctcggtggcgggtcgagtcgggaggcaaacccagctgctgccttcggagtgaagcagcgcccagggtatttccacagctgtgtaacagctgcgaggtctcctgagccgaccagagcatctgagaagcaccagagaaggggcagcgtcacaggatttggcaacccgtgggaaaggaaggaagagatcgcacagggcaaagggccgctccctgaaggccttagcggggagtacctttcctgcggccgctccacgcatgagcagcgtcttcctggggcctgggagccggcaggtccccggggcccaggtcccgcccctcccgcccgtctctccagccccattctcctaaccacccgccctgtgctcgtatcccctccgaggcttcctcgcactgtgcgcacgattcccatgcccaggccctgccgccatgcctcggtgagtgtctcgcgtgacctcgcggagcgcgtcggaccgggccggctatcccacaccgagcccaccgccgaccctaggcggccaaccccaccttccacggccgccgccgcacgcttgacacgcgcgccggaaattgcgtcaccccaacttccggtccgggggccggggggcgtgccagttgggtacgcggtccagtcagaatgcaacacgaggggtttcggaagcgcagccgcagctccgcccctaaactgggaactcctccccactgccacgttcgacgaaggaacgcgcagagtgcgcgcatcccttggccaatcaggaggcgcagagtccgtgctaccgaaaggggcagccattccagacccgtggaaggtgcaggcgaaagccaccaattagaagccaaggcagaaaaagttcttgtcgggagccaatgagaggctaagaaagacagcgagcgcgaggtcctcggccaatcccgaacgaaggccagggagcactcaggagcgtttccgaatccggggccaggcctggtgtgagtgtccaatccgagagcggcaaagacgagcctcgaagtccgccggccaatcgaaggcgggccccagcggcgcgtgcgcgccgcggccagcgcgcgcgggcgggggggcaggcgcgccccggacccaggatttataaaggcgaggccgggaccggcgcgcgctctcgtcgcccccgctgtcccggcggcgccaaccgaagcgccccgcctgatccgtgtccgacatgctgcgccgcgctctgctgtgcctggccgtggccgccctggtgcgcgccgacgcccccgaggaggaggaccacgtcctggtgctgcggaaaagcaacttcgcg

SEQ ID NO: 19306 - DNA, 2300 bp, Homo sapien
ccccggcctgggtgtcccgggtgtgctgctccctgacccacctcccacgctgccgggaaggatctgagcctgacagatcccctgccgggtcagtgctgccccgggcactccgggcccaccatctacaagagggcccgagagtactgagtggctgtggtagctcccaagttgtaggtcacagaccctcacaattgtggagaaaccgcagatacttaggatccccgtgtccaggtggccccgtgcggtattctagctgcccctaacatccgagctccaggggcatcctgtttgaaagatgacgctgagccgaccacacacgtttacatgtgactaccacggccagaggagcaaccctactgagggataccgagccccgttaccccgtagggcgagggcctgggcagctcaagagcggcaagaccctaagagagggtttagtgtgggccccgccggttgattctggggcctgctagccccgccccacacatacagggggctgctgcctcctccatcgtggagggggaggtgtgtcctctctccccatgatcggctgcagttcccattttgtcttagatgttatacctggggtgggggcacctcacactgccccagaggatgcccctgagcaggaatcgcgggggtggagaggagcgaaggtggcccccttggagcccttttggagctccggctgcagcccacactcctgctcagaagtgcgcctccgttggggatccaggtccaaggcctgtcaccgtcccgcccacaggtgtcccgacccaggctaagcttgagcatggctgagcaggagcccacagccgagcagctggcccagattgcagcggagaacgaggaggatgagcactcggtcaactacaagcccccggcccagaagagcatccaggagatccaggagctggacaaggacgacgagagcctgcgaaagtacaaggaggccctgctgggccgcgtggccgtttccgcaggtgagtctgggctgcgggagccgggtggccgcccgttcactccagctgtcttgccgctccccagcccctacttccactggtgggggtggggccctcacctgctgtcactccccagaccccaacgtccccaacgtcgtggtgactggcctgaccctggtgtgcagctcggccccgggccccctggagctggacctgacgggtgagtgccctgcggccgcgggggtccgggcggcccctggtggggatctcgggaagtgcagccagggggccgcgcagggctggggcttcgcgcagggctgctgggcagtcattgagggggaggtccccccaacaggcgacctggagagcttcaagaagcagtcgtttgtgctgaaggagggtgtggagtaccggataaaaatctctttccgggtaagctacaggctgctgtggccagggaatggaggcggggctggggctggggtccggaccgaccttccctgatcctcgcttcgggtcctgcaggttaaccgagagatagtgtccggcatgaagtacatccagcatacgtacaggaaaggcgtcaagagtgagtggggccccgggcagggcagagggggccgcttgggtgcgtgctgccaggcggggaagcggggccgctgaccgccctcttccttgtgccgcagttgacaagactgactacatggtaggcagctatgggccccgggccgaggagtacgagttcctgacccccgtggaggaggcacccaagggtatgctggcccggggcagctacagcatcaagtcccgcttcacagacgacgacaagaccgaccacctgtcctgggagtggaatctcaccatcaagaaggactggaaggactgagcccagccagaggcgggcagggcagactgacggacggacgacggacaggcggatgtgtcccccccagcccctcccctccccataccaaagtgctgacaggccctccgtgcccctcccaccctggtccgcctccctggcctggctcaaccgagtgcctccgacccccctcctcagccctcccccacccacaggcccagcctcctcggtctcctgtctcgttgctgcttctgcctgtgctgtgggggagagaggccgcagccaggcctctgctgccctttctgtgccccccaggttctatctccccgtcacacccgaggcctggcttcaggagggagcggagcagccattctccaggccccgtggttgcccctggacgtgtgcgtctgctgctccggggtggagctggggtgtgggatgcacggcctcgtgggggccgggccgtcctccagccc

SEQ ID NO: 19307 - DNA, 2300 bp, Homo sapien
tcctgaggagccgcgggattcctcagggacactagggcctctgcagcggcgcctgcgccaggcagccacgcgcgctgcgcacgaattctgtctcagcctggagaaaaacacctccgctgcgccctcgcccagcaccagctttccgcggggcgtgcaaggggctcctcctagccccacagccctgtctttccacgggggacaccaaggccctggaacggcccgcgcgccagcgctctcgcccgtgtttaacgagaacttaatccccgtgcccgttacctccccgaagtcccgggactaggtgactaggccccgaagcaagagtcgcagtcggaccgactgggccggggagggcagcgcactgcacctgcgcgggcttccacagcccacgcggccgccgcaggcctcgagtgggcgcgggttgggcagcggcgagaggcgggaccggacctcgcctcccgggtgcgggcgccctgggctcgcgtagggaagtgccctggcttacagaggtgaccactgacggggcttggggtggaaggtgacgacgccagaacccacgcggaacgcgcccacgaggcccagccgcaagatggcgacggcgtgcccccggccacccgcgcgccgcgcatgcgccctggccttccccgcccgagtgagcggaagtctcgtgaccccggaagtgacaggcagggcgggcggggcggccgacgacgttcgtcatttagtgcgggagggatcctgaaccgcgcggccgaaccctccggtgagtggccgtggcggggcggaggcggcggggcggaggcggcgggtcggggcggggaccggcggcgccggcgggggcggggggcgctgaggtgggggcttccgcctttgttcgcgccccgccctgagcccgcggcagggtctcggcgggcgggggcgcggtgacagcgggccagggcggtgcgggctagggcggggccggggcgggaccgggcggcggcggccccggccccacgtgcgggtcccgggccggaggggcggcggggaccaggggagtgccggcccctcccgagcggtccggagcttctttcatggccgccgaggcgcgtggggcccgggccagacctgagggcccctccttggggacgcggggggcgccgggccggcagccgcggtccatcgcgttcgggggcgacgcggggattggggcgcggcctcccccagcgcccgggccacgcccggcacggattgcgggccctgcggaagtgcgggccgcgccctaggatcccggcgcctacggctatcctcgcgcggcgcggaggccccagcccctggaggaagcagggcggcctggaccccggcctgggtgtcccgggtgtgctgctccctgacccacctcccacgctgccgggaaggatctgagcctgacagatcccctgccgggtcagtgctgccccgggcactccgggcccaccatctacaagagggcccgagagtactgagtggctgtggtagctcccaagttgtaggtcacagaccctcacaattgtggagaaaccgcagatacttaggatccccgtgtccaggtggccccgtgcggtattctagctgcccctaacatccgagctccaggggcatcctgtttgaaagatgacgctgagccgaccacacacgtttacatgtgactaccacggccagaggagcaaccctactgagggataccgagccccgttaccccgtagggcgagggcctgggcagctcaagagcggcaagaccctaagagagggtttagtgtgggccccgccggttgattctggggcctgctagccccgccccacacatacagggggctgctgcctcctccatcgtggagggggaggtgtgtcctctctccccatgatcggctgcagttcccattttgtcttagatgttatacctggggtgggggcacctcacactgccccagaggatgcccctgagcaggaatcgcgggggtggagaggagcgaaggtggcccccttggagcccttttggagctccggctgcagcccacactcctgctcagaagtgcgcctccgttggggatccaggtccaaggcctgtcaccgtcccgcccacaggtgtcccgacccaggctaagcttgagcatggctgagcaggagcccacagccgagcagctggcccagattgcagcggagaacgaggaggatgagcactcggtcaactacaagcccccggcccagaagagcatccaggagatccaggagctggacaaggacgacgagagcctgcgaaagtacaaggaggccctgctgggccg

SEQ ID NO: 19308 - DNA, 2300 bp, Homo sapien
tttttaaaagcacttgggttattggaaagttgggcaacatgatcacctgcacaggggctctgagtctttaacagtgaagcatttcacacctgattaggaaacgctgtgctgatgacatggcactgacagtgtgactcagttacagaaactctcaaatatccctccaacattcagaaattttcaaaagacaccaagctcggtattttgcatagttctgtccccaaaaatgccctcctgtgttcatgtctgtgtctgaacaaagcagctgtgcgtgtgtgtgtgcgtgtggtctccacttctcttgatcagcctgggttgcctggcagtatgggccaaacagacagggccctgtctgcatggagctcaagagtgattaaaagaggctgggtggccggacatggtggctcacacctgtaatcctagcactttgggaggctgaggcaggaggatcgcttgagctcaggggttcaagaccagcctgagcaacatagtgagaccctgtctgtacaaaaaataaaaaattagctggacatggtgttgcacacctgtagtcccagctactcgggaggctgaggtggaaggactgcttgagcccaggagatagaggcagcagtaagctgagattgtaccactgcactccagcctgggcaaaagagcaagaccctgtcttgaagaaaaaaaaaaaaaaaaaaaaaagattgggcaccccggtggttcatgcctgtaatcccagcgctttgggaggctgaggtgggtggatcacctgaggtcaggaattcgagaccagcttggccaacatggtgaaaccctgtcgctactaaaaatacaaaaattagctgggcatgttggctcacacttgtaatcctaactactcgggaggctgaggcaggagaatcgcttgaacctgaaaggtggaggttgcagtgagccgagattgtgccattgtactcaagcctgggcgacactgagactacgtctcaaaaaaataatcaatcaataaataaaagaggcgtccacgttaacgagtccacagtcctaacaagtgctgcaggctggacgcggggcagcgtcccacccagtgtctggtgcagggcatttaggggcttggcctccaggagaggcgagcccggggctgggtgcgagcactgctgctgggccaggccactcacgttatgcggccgttcctgatacttcaacacggcccttgtgggcgaatgtgtggaatctcggaacaagcggagtggggaacagggctctgcggtgaagcccaggctgaggcagcccctcatctgctcacggtgccaggagctccctgcctcctggtcctgaggagccgcgggattcctcagggacactagggcctctgcagcggcgcctgcgccaggcagccacgcgcgctgcgcacgaattctgtctcagcctggagaaaaacacctccgctgcgccctcgcccagcaccagctttccgcggggcgtgcaaggggctcctcctagccccacagccctgtctttccacgggggacaccaaggccctggaacggcccgcgcgccagcgctctcgcccgtgtttaacgagaacttaatccccgtgcccgttacctccccgaagtcccgggactaggtgactaggccccgaagcaagagtcgcagtcggaccgactgggccggggagggcagcgcactgcacctgcgcgggcttccacagcccacgcggccgccgcaggcctcgagtgggcgcgggttgggcagcggcgagaggcgggaccggacctcgcctcccgggtgcgggcgccctgggctcgcgtagggaagtgccctggcttacagaggtgaccactgacggggcttggggtggaaggtgacgacgccagaacccacgcggaacgcgcccacgaggcccagccgcaagatggcgacggcgtgcccccggccacccgcgcgccgcgcatgcgccctggccttccccgcccgagtgagcggaagtctcgtgaccccggaagtgacaggcagggcgggcggggcggccgacgacgttcgtcatttagtgcgggagggatcctgaaccgcgcggccgaaccctccggtgagtggccgtggcggggcggaggcggcggggcggaggcggcgggtcggggcggggaccggcggcgccggcgggggcggggggcgctgaggtgggggcttccgcctttgttcgcgccccgccctgagcccgcggcagggtctcggcgggcgggggcgcggtgacagcgggccagggcggtgcgggctagggcggggccggggcgggaccgggcggc

SEQ ID NO: 19309 - DNA, 2300 bp, Homo sapien
tgttagccaggacaatctcgatctcctgacttcgtgatccgcccgcctcggcctcccaaagtgctgggattacaggcgtgagccaccgcgcccggcccaacagtttttttttaaaagcacttgggttattggaaagttgggcaacatgatcacctgcacaggggctctgagtctttaacagtgaagcatttcacacctgattaggaaacgctgtgctgatgacatggcactgacagtgtgactcagttacagaaactctcaaatatccctccaacattcagaaattttcaaaagacaccaagctcggtattttgcatagttctgtccccaaaaatgccctcctgtgttcatgtctgtgtctgaacaaagcagctgtgcgtgtgtgtgtgcgtgtggtctccacttctcttgatcagcctgggttgcctggcagtatgggccaaacagacagggccctgtctgcatggagctcaagagtgattaaaagaggctgggtggccggacatggtggctcacacctgtaatcctagcactttgggaggctgaggcaggaggatcgcttgagctcaggggttcaagaccagcctgagcaacatagtgagaccctgtctgtacaaaaaataaaaaattagctggacatggtgttgcacacctgtagtcccagctactcgggaggctgaggtggaaggactgcttgagcccaggagatagaggcagcagtaagctgagattgtaccactgcactccagcctgggcaaaagagcaagaccctgtcttgaagaaaaaaaaaaaaaaaaaaaaaagattgggcaccccggtggttcatgcctgtaatcccagcgctttgggaggctgaggtgggtggatcacctgaggtcaggaattcgagaccagcttggccaacatggtgaaaccctgtcgctactaaaaatacaaaaattagctgggcatgttggctcacacttgtaatcctaactactcgggaggctgaggcaggagaatcgcttgaacctgaaaggtggaggttgcagtgagccgagattgtgccattgtactcaagcctgggcgacactgagactacgtctcaaaaaaataatcaatcaataaataaaagaggcgtccacgttaacgagtccacagtcctaacaagtgctgcaggctggacgcggggcagcgtcccacccagtgtctggtgcagggcatttaggggcttggcctccaggagaggcgagcccggggctgggtgcgagcactgctgctgggccaggccactcacgttatgcggccgttcctgatacttcaacacggcccttgtgggcgaatgtgtggaatctcggaacaagcggagtggggaacagggctctgcggtgaagcccaggctgaggcagcccctcatctgctcacggtgccaggagctccctgcctcctggtcctgaggagccgcgggattcctcagggacactagggcctctgcagcggcgcctgcgccaggcagccacgcgcgctgcgcacgaattctgtctcagcctggagaaaaacacctccgctgcgccctcgcccagcaccagctttccgcggggcgtgcaaggggctcctcctagccccacagccctgtctttccacgggggacaccaaggccctggaacggcccgcgcgccagcgctctcgcccgtgtttaacgagaacttaatccccgtgcccgttacctccccgaagtcccgggactaggtgactaggccccgaagcaagagtcgcagtcggaccgactgggccggggagggcagcgcactgcacctgcgcgggcttccacagcccacgcggccgccgcaggcctcgagtgggcgcgggttgggcagcggcgagaggcgggaccggacctcgcctcccgggtgcgggcgccctgggctcgcgtagggaagtgccctggcttacagaggtgaccactgacggggcttggggtggaaggtgacgacgccagaacccacgcggaacgcgcccacgaggcccagccgcaagatggcgacggcgtgcccccggccacccgcgcgccgcgcatgcgccctggccttccccgcccgagtgagcggaagtctcgtgaccccggaagtgacaggcagggcgggcggggcggccgacgacgttcgtcatttagtgcgggagggatcctgaaccgcgcggccgaaccctccggtgagtggccgtggcggggcggaggcggcggggcggaggcggcgggtcggggcggggaccggcggcgccggcgggggcggggggcgctgaggtgggggcttccgcctttg

SEQ ID NO: 19310 - DNA, 2300 bp, Homo sapien
accgaacatagcctattaatgtcagcctatttctctatttatgaattttctgaagtgttatttttatattcagatttatagaagcttttgtcttttatgaccttgacacttttaaagggtactctcagctattttgtagaatgtccctcacactggggactctgaccttatgactggacaaggttttgttttttgtttttttttttttttttgagacggagtctttctctgtcttctaagctggagtgcggtggtgtgatctcagctcactgcaatctctgcctcccaggttcaagcgattctccttcctcagcctcctgagtagctgggattttaggcacccgccaccacacccggctaattattgtatttttattagagacaaggtttcaccatgctggccaggctggtcttgaactcctgacctcatgatccatccgccttggcctcccaaaagtgctgggattacaggcctgagccaccacgccctgctggtttattttattttttggcatgaataccacagctgggatgtcatcttctcaatgcatagtggagatatgcaatgtcagtctgtccaactcctggtcctgttagttcaggtggtggcagcggctgccggggcttctcccctacatagttactgttttccctttgtcatccataaataccttggggagatacttccagactaagtgaatgtctgtttcacttccaagttttacccacttttttttttttttttgagatggagtctcacttttgccgaggctgtagtgcaatggcgccatctcagctcactgcaacctccgcctcccaggttcaagcaattcccctgtctcagcctcccaagtagctgggattacaggcacgcgccaccatgcccaggtaattttttttatttttagtagagacggggtttcaccgtgttgcccaggctggtctccaactcctgagctcaggcagtccacctgcctcagcctcccaaggtgctaggattacaggcgtgagccaccgtgcccggcctacccactaattaatttcagcatccactggtgggtcttgcaatgcagtaattattaacttagttttcaaaggtgatttttgcattttcctcattcctttgacgtttattaattggaattcatctctaagaaagagcagtcccttcagcttttttcccttttttttttttgagacagggtcttgctctgcggctcaggctgcagtgcagtggctcgatcacggctcactgcagcctcgacctcccgggctcacgtgatctcccatctcagcctcctgagtaaccagaaccacaggtgctcaccaccatgcccagctgactttttgtattttttgtagagatggggtttacccatgttgctcaggctggtctcaaattttcgagctcaagtgatccgcccgccttggcctcccaaaaggcatgagccactgcgcctgacctacgatttctttctttatatatcagtatgaacgcaagggctgtttgttggattctgtgagtcataatctgatactgtttccacgctttggccattgggagctcctggagattgtctcctgtgccctatccttatttaagcacttgtttattttgggatgtcttcagttttccttgtcccagctctgcacccagctgcttctccagggagccctccctcactggagactgggatttagcaaccaagacctgggcactggctgtgcttgttgcttctgggccctcctgggacagagctgggaagtggatctatgacacgtgcttgtgcatttacccgccctgttggtttctgtagctgtctagttcctgctgttcctgtctcacctgcccctttccttatgtgtagtttcttcctgtgacagggagaaacctggctctcagattgacaggacattcgcttaggccatgtcagtgctgtaggtgaactgttcaacctgtgccccagggaggcgcagtcactatggaggcaccttacttccttaatcgtgtactgttgtttttgtgtttgacctgtagcatctaagtactggtttcaaaagttgcctagatgagttcttttctttctttccacctcctgcaaattatgtgatttgcataatttgtacatagttaggttcatttgttagtttgtattccttttggcttcccccatatcctcgttgactttttctttcttttgtaacttacatatgttatgaaatttatatgaggatatataattttcataaatgtttatggtttacatgtattagttgttattattaagatcaccctggga

SEQ ID NO: 19311 - DNA, 2300 bp, Homo sapien
tttttttttttttttttgaagcagagtcttgctctgttgcccaggatggagtgcagtggcgcgatctcggctcactgcaagctccgcctcctgggttcttgccaatctcctgcctcagcctcctgagtagctgggactacaggcagcagccaccatgcccagctagttttttgtatttttagtagagatggggttccaccttgttagccaggatggtctctatctcctgacctcgtgatctgcccgcctcagcctcccaaagtgctgggattacaggtgtgagccactgcgcctgtccccagccagcatttttaaggtgcatctgtgctgtaccatgtctaagactgttcctttttatggccgactactgacatggatataccgcatattttttttttgtccatctgttcatggacatttgggttgtctccactccgtggctttataagaataatgctgctgtgaacatttttgtatacattttatattaacatcttttcaattctcgagtagaattgccgggtcatgaggtaactgtttaattttttgaggaactgccagacttttccaaagcagctgcagcattttatatttctaccagcaatgtatgagggttccaatttctccacattctcaccaacacttaccttttttagtttagtcatcctactgggtgtgaagtaatatctcattgtgattttgctttgcagtttcttctttgtaatcttttttttaaatgtctttaatctctcttttttttttttttttttttttttttttgagacagagtctcgctctgtagcccaggctggagtgcagtggtgcaatctcagctcacaacagcctctgcctcccgggtccccgttcaagcaattcttctgcttcagcctcccaagtggctgggattacaggcacgtgccgccatgcccagctaatttttgtatttttagtagagacagggtctcaccatgttggccaggctggtcttgatctcctgaccttgtgatccgcccacctcggcctcccaaagtgctgggattacaggtgtgagccaccgcgcctggccctcaatctctatcttttttatatctggattgaatagactttaccatggataaatctccaccctggcagatttaggactttacttggaaatacagatattctaaatggaattaaatgtcctattatcagtggcattcatcacattcaacaaaatagcatcataaaaggttgatattgttgagcgtaatgaatacctgaactccagttacataaagatgaggatcatgtctcttcatattaccttaatgtcattacattttgtagaaaaacttgtctcaggctgggcgcagtggctcacgcctgtaatcccggcacattgagaggctgaggcaggcagatcacaaagtcaggagatcgagaccatcctggctaacatggtgaaaccccgtctctactataaatacaaaaaattagccaggcgtggtggcgggcccctgtagtcccagctactggggaggctgaggcaggagaatggcgtgaacccaggaggcggagcttgcagtgagccaagattgcaccactgcactccagcctgggtgacagagcgagactgtgtctcaaaaaaaaaaagaaacttgtctcaaaagtgctatgatattcttcctgaaatggacattgtagcatctcaatatcttttttaaaaaactaaatttttgaaaaattgtgttttgagacaaggtctccctctgatgtccaggctagagtgcagtggcgcaaacacagctcactgcatcctggaactcccgggatcaagggatctcccacctcagcctccttagtagctgggactacagacacccaccaccgcgcctggctgatttttaaaactttgtatagatggggtctcactatgttgcccaggttggtcttgaactcttgtgctccagggatcctcctgccttggtctcccaaagtgttggaattacaggcctgagccaccacaccgaacatagcctattaatgtcagcctatttctctatttatgaattttctgaagtgttatttttatattcagatttatagaagcttttgtcttttatgaccttgacacttttaaagggtactctcagctattttgtagaatgtccctcacactggggactctgaccttatgactggacaaggttttgttttttgtttttttttttttttttgagacggagtctttctctgtcttctaagctggagtgcggtggtgtgatctcagctcactgcaatctctgcctcccaggttc

SEQ ID NO: 19312 - DNA, 2300 bp, Homo sapien
ttcctctctaactcaccaggtgggaggacacctttgcccgggagccacctgttgacccttgtgcctgtgcctccaggtgaggggaggttggggtgggatggctgccctgtgtgccgtccacaggcttcccacagccagaacatctctgggctgttcctttccttcttgtactctggttttcagagaaacgtggattcagcagttttgactttgtagtgtaattcctttttctgtttgtttttttgttgttgtttttaaccttgccacggagcaaggcatgaggatcctctcttagttgtatatttgatgaagtggctggtggaagctgtgataatccgtccatttaagagtggggcggctgggcgcggtggctcacgcctgtaatcccagcactttgggaggctggggcaggcagatcacctgaggtcaggagttcaagaccagcctggccaacatggcgaaaccccgtctctactaaaaatacaaaattagctgggtgtggtggtgcatgcctgtaatcccagctacttgggaggctgaggctggagaatcgcctgaaccagggaggtggaggttgcagtgagccgagattgtgccattgcactccagtctggacaacaagagtgaactccgtctcaaaaaggagtagggcaacgcctgatacctgtaatcccagcactttgggaggtcagggcagaaggatctcttgagcccagaagttcgagaccagcctaggcaacatggcaaaaccctatctctactaaaaatacaaaagttagctgagtgtggtggcgtgctcctgtggtctcagctattctaaaggctgaggtgggaggatcgcttgagccctggaggttgaggctgctgtgagccattatcatgccactgcactccaagctgggcagtggagagagagccttgtgccccctgatgctgggttggtgacagcactttgagaatgagatgggaagggggacaagggagctccagagttctgcctgaccccactgtcccacagctgggatgtaaggaagcccagggcagtgggcagtggtagtggagagacagacaggaatgcatgccgtgtctgcagaaacctttccctgcaccagcggctcctgcgggcacacatcccaggctaagcttgcttccacgctgggatgggcctggctgagtcatgggcaagggagtgtgactaagggtggttctttcgctgtcggtcacagatgtcactacagatcagcagctgccatctaagcagcttgcccaatgccagccagggccacagtctaggaacccagatgaacaggatgactaatcttggcccttccagaagcccagtctagcaggagaaaggattactaagtccccagctgtagtcgctgtgaatgtgacagaaaatgtcaccagtgcagtgagttagagtcaggttatccccaagcaggtgcccttggcccgggcctcggtgttggagcaaggcctgagcaggcccatgccaggcagggggtctgctctctggggccgtgctaggactggctccctgctgcttaggaagtggagagggcacctgatggactggtgtggtcagcccctgcagggtgtgacaaatgacaggactgacaagcagcattgctttggttgtgcagtagtggtgtaacaggcatttggagggaggaatgaccaggatttgggacttcctggcattctcgggagtgaggggcatgggaatgaagtaatatgaggccttggggaactgggtgggtaggtgtcactggagagaaggccccaggaaggagccagctgaggggcgtcagcattggacaggctgggcagaggcaccagctggcccgcaggagagcgttgcctagagccggacctctccagtttgtcagctgatagcacgtggacacgtcgaagtcgtgtccatatgtggcatggtcttgggagggttggaggtaaaggaagtagagagaatgatgtcatagaagcaacagctggtatttgctggggggccagtggtggggtcattgaggcaggtgctgccgagtggtcaaaggagaatgacctgattctgtgcctgtggtggaggtggggctggccatttataactaggatagaggctgggtctggaagccaccggggcttctggtgggcagcaggtcaggtagctgggctgagcctcatcatacccaatcttcatttccttattcataaaacacaaaaccttattttacttccaaggccagaggactatttaatttattgttccagcagggtgcttgtgagagaaagaagagcag

SEQ ID NO: 19313 - DNA, 2300 bp, Homo sapien
acaaaggaaaatgtacaacacacccaagggctgttccaagaaacggtaaaggccaaaatcaagagcaagggaagcagtccgatatcagaccagcttgaagggcctgtagattcgggagccctgaccccagcccctcccccaaaggcagattctggctcacctttccctctcctcctactcaagcctgcggcaaagtctgaagtcaagcgctgtcatggaaactgccctgacctcaggcaggctgggagttggagagggaacccagagtgtggggatactccggccgcaggcacacagcgggaactggagttcaccaaaagcggtttccagtggatgctagaaaccaccttaaaaaaagtgttgagacactgtgagtgctcactggccctactctgtcctcccaaggcaaatggctgggctgtgggcaactgaaccctgcccagccatctccaaaactgattcccaaaaagtcatttcttaaccagaaaacaagttgaaatgccattgggattcaatttttctttttttaaaaaagaaaagcttcaaccaaagatggatttgagagtcatgtcactgacgggacacggcggtggggagtgataaaaccacagcgtacaaggtctttataagacagtactcaaggcaaacagagccagaaaaacagactccctgtgcttcacaagatacataaagaagattctttttctcacattaacccactaagacaggcacaaaatttaaaaagcaactgggctgggtctaacagccaaaaaccactcacatttggtcagtctttgtccctgttagaaactggaagccctggcaggggattttcactcacagaacccatcttcagactaacagcagcagttcctcaggctcagctaggctcgcacctgcctgcgcactgaccccggctttactagcactgggtctgtcctgcagcccttcagagctgggagggctcccttcgctaaggcgggaaggggactcagggccacatccccaaaatcacgatccgtcctgtgcagggcgaacggctcaccgagaagccctcgtctcttacctgaatatcggcgtctgagactccaaaatccagattggacaccagcagtttcccacctgtctccacgccggcaccaccgccgaagccactgtcgaaaagatcgtgctgccacttgtcgggaagttgttttggctgaaaaaaaaaccgcaacaagagcagatctgtgagtctcagtccagggctttcctgaccctcacggctactccggacccttcctcttcccggcctgagaggatccggccgaaacggggccgccagcgctccctccggcgctgcagctgccccagcccgaggccgcacggtcccaccgcggccgcacaacttcagttcccttagactaacttcccgccgcctgtgccgcgcccagcgtcccctcctctcctgccacgaggccccaacgtccggaacaaacaaagagctgggaagggtctcagcctccgggaccggaccccgaaagaacgacctcgctcccgcccaccaccccctccgcgcccacacgcaccctccggacctccgggcggccgctccaccagccttatccacccgccggcccgggtctccgccgcgagcggccccggccccagccccggctggccccctcccactctccggcgcggccggcctccgcactcaccctgctgtagggcgccggtcggttcctgccgcctccgccggccgcgccgcgggcgatggccggccggttccggatgggcccgccgcctcgattcactcgcgcggcggcctgcgccccaccgccgcggccgccctgggagccggcccggccgcggccccggcccccgccccggccgcctcgctggctccggttcagtttaatgatgtcgtccagagacatgtccattttgtcggccatggcgggcgcggaatcgggcatcggctcgagcccgcgcgtcagcacgccggcacgtcacttccggcgccgcgtgaggccttccggtgccacggcctcggagcggctgctgattggccgctggcggacggctgcgcgcgcgggacggggtgaggcggggaggcgcgtgcgcactggcgtgcgagactcggcgggcgctgttgagggagtcgggccgcgactgtggtcgtttttataccttcccgcgcggacgccggcgctgccaacggaagggcgggtagggcggtgcgtgattaggttggcgaaggtgcgagggcgcagggggtggggcggcggccgttggaggcggagcctacgcgcccctcc

SEQ ID NO: 19314 - DNA, 2300 bp, Homo sapien
aactgccctgacctcaggcaggctgggagttggagagggaacccagagtgtggggatactccggccgcaggcacacagcgggaactggagttcaccaaaagcggtttccagtggatgctagaaaccaccttaaaaaaagtgttgagacactgtgagtgctcactggccctactctgtcctcccaaggcaaatggctgggctgtgggcaactgaaccctgcccagccatctccaaaactgattcccaaaaagtcatttcttaaccagaaaacaagttgaaatgccattgggattcaatttttctttttttaaaaaagaaaagcttcaaccaaagatggatttgagagtcatgtcactgacgggacacggcggtggggagtgataaaaccacagcgtacaaggtctttataagacagtactcaaggcaaacagagccagaaaaacagactccctgtgcttcacaagatacataaagaagattctttttctcacattaacccactaagacaggcacaaaatttaaaaagcaactgggctgggtctaacagccaaaaaccactcacatttggtcagtctttgtccctgttagaaactggaagccctggcaggggattttcactcacagaacccatcttcagactaacagcagcagttcctcaggctcagctaggctcgcacctgcctgcgcactgaccccggctttactagcactgggtctgtcctgcagcccttcagagctgggagggctcccttcgctaaggcgggaaggggactcagggccacatccccaaaatcacgatccgtcctgtgcagggcgaacggctcaccgagaagccctcgtctcttacctgaatatcggcgtctgagactccaaaatccagattggacaccagcagtttcccacctgtctccacgccggcaccaccgccgaagccactgtcgaaaagatcgtgctgccacttgtcgggaagttgttttggctgaaaaaaaaaccgcaacaagagcagatctgtgagtctcagtccagggctttcctgaccctcacggctactccggacccttcctcttcccggcctgagaggatccggccgaaacggggccgccagcgctccctccggcgctgcagctgccccagcccgaggccgcacggtcccaccgcggccgcacaacttcagttcccttagactaacttcccgccgcctgtgccgcgcccagcgtcccctcctctcctgccacgaggccccaacgtccggaacaaacaaagagctgggaagggtctcagcctccgggaccggaccccgaaagaacgacctcgctcccgcccaccaccccctccgcgcccacacgcaccctccggacctccgggcggccgctccaccagccttatccacccgccggcccgggtctccgccgcgagcggccccggccccagccccggctggccccctcccactctccggcgcggccggcctccgcactcaccctgctgtagggcgccggtcggttcctgccgcctccgccggccgcgccgcgggcgatggccggccggttccggatgggcccgccgcctcgattcactcgcgcggcggcctgcgccccaccgccgcggccgccctgggagccggcccggccgcggccccggcccccgccccggccgcctcgctggctccggttcagtttaatgatgtcgtccagagacatgtccattttgtcggccatggcgggcgcggaatcgggcatcggctcgagcccgcgcgtcagcacgccggcacgtcacttccggcgccgcgtgaggccttccggtgccacggcctcggagcggctgctgattggccgctggcggacggctgcgcgcgcgggacggggtgaggcggggaggcgcgtgcgcactggcgtgcgagactcggcgggcgctgttgagggagtcgggccgcgactgtggtcgtttttataccttcccgcgcggacgccggcgctgccaacggaagggcgggtagggcggtgcgtgattaggttggcgaaggtgcgagggcgcagggggtggggcggcggccgttggaggcggagcctacgcgcccctccctccccgcacgctccgcccgatcggccagggctgggggcgctgggggcgctacgggcgcggcgggtgcctgggagctgctgggagtccttgtttccgctcccgcccaggactgtgcgctcggctcgcggtggggtccggcgggcgcggcttcggcgggcggcagccgctgcagacgagctgcgggttggttttttggtctccacctgcagcccccccaa

SEQ ID NO: 19315 - DNA, 2300 bp, Homo sapien
gaagggactcagctccttacggacaaggagatcacatttgggagcacaggacagtcaggagtttggttttacctcacgttgaggatatcttcaaagatctcaaatgggcctggccaacatgacgaaactccgtctctacaaaaaatacaaaaaaattagccgcaggtggtggctcatgcttgtaatcccagcactttgggaggccgaggagggtggatcacttgaggtcaggagttcgagaccaacctggccaacatggtgaaaccccatctctaccaaaaaaacaaaaattagaggccaggcgtagtggctcacgcctgtaatcccagcactttgggaggctgaggcaggcagatcacaaggtcaggagttcaagaccagcctggccaacatactgaaaccctgtctctactaaaaatacaaaaaattagccgggtgtggtggtgggcaactgtaatcccagctactcgggagggtgaggcaagagaatcacttgaacctgggaggcggaggttgcagcgagctgagatcacgccagctcccagctctattcgggaagctgagccacaggaatcacttggacctgggaggcagagattgcagtgagccgagatcgcaccactgcactccagcctgggcaacatagtgggactgtctcaaaaaaaaaaaaaaaagccagctgtggtggcgtgcaccagctgcctgagaggctgacgtgggaggatagctcgagcccaggagtttgaggctgcagtgagccaagatcacaccactgcactccactctgggtgacggagggagaccctgactcaaaaaacaaaaacaaaagcaagtatctcaaaacaacttaaaatccatgaaatgggctgggtgtggtggctcatgcctgtaatcccagcactttgggaggccaaggcgggcggatcatctgaggtcaggagttcaagaccaccctggccaacatggcgaaaccctgtctctattaaaaatacaaacattagccaggtatggtggcacgtgcctgtagtcccagctactcgggaggctgccgctggagactcgcttgaacccaggaggcagaggttgcagtgagccgagatcgccccactgcactccagcctgggcgacagaatgagactgcctcaaaaaaaaaaaaaaaaaatcaatgaaatggcacactggttttcattaataagttgcaaaaataatttttttttggagacagggtctggctctgtcgcccaggctggagtgcagtggtgccaccacggctcactgcagcctcgacctcctgggctcaagcaatcctcccacctcggcctcccaagtagctggtagtacagaagtgcaccaccatgcccagctcatttttttttttagagatgggggtctcacgatgttgccccggctggtctcaaactcctgggctgaagcgaacctcttgcctcggcctcccaaagtgctgggattacaggcgtgaggcccgcgcccggcccgcaagaaaacttgtaaaggatatgactggcaaaatgtgacagtgcagacttgggggggctgcaggtggagaccaaaaaaccaacccgcagctcgtctgcagcggctgccgcccgccgaagccgcgcccgccggaccccaccgcgagccgagcgcacagtcctgggcgggagcggaaacaaggactcccagcagctcccaggcacccgccgcgcccgtagcgcccccagcgcccccagccctggccgatcgggcggagcgtgcggggagggaggggcgcgtaggctccgcctccaacggccgccgccccaccccctgcgccctcgcaccttcgccaacctaatcacgcaccgccctacccgcccttccgttggcagcgccggcgtccgcgcgggaaggtataaaaacgaccacagtcgcggcccgactccctcaacagcgcccgccgagtctcgcacgccagtgcgcacgcgcctccccgcctcaccccgtcccgcgcgcgcagccgtccgccagcggccaatcagcagccgctccgaggccgtggcaccggaaggcctcacgcggcgccggaagtgacgtgccggcgtgctgacgcgcgggctcgagccgatgcccgattccgcgcccgccatggccgacaaaatggacatgtctctggacgacatcattaaactgaaccggagccagcgaggcggccggggcgggggccggggccgcggccgggccggctcccagggcggccgcggcggtggggcgcaggccgccgcgcgagtgaatcgaggcggcgggcccatccggaaccg

SEQ ID NO: 19316 - DNA, 2300 bp, Homo sapien
gctcacacctgtaatcccaccactttgggaggccaaggcaggcggattgcttcaggccaggtgttcgagaccagcctggccaacatggcaaaaccccgactctactaaaaatccaaaaaaattagccgggcatggtggcaggtgcctgtaatcccagcactttgggaggccgaggtggatggatcacctgaggtcaggagtttgagaccagcctggccaacatggtaaaatcccgtctctactaaaaatacaaaaaagtagccgggcatggtggtgcatgcctgtaatcccagctactcaggaggctgaggcaaaagaatcgcttgaacctgggaggcagatgttgtggtgagccaagatcgcaccattgcactccagcctgggcaacaagagtgaaactccatctcaaaaaaaaagaaaaaaagtggaaatgtttgattatgtttaggttgaaagcagagttttgcatcagcgaaatggtttttcatgagaccgaaatgagcgtaaagcagaagcaagggtcaaggttttgcccagggaggacaagaagaactccccagaggacagtggggaatggagaggacagtggggaatggggaggaccgagaagctactcactaccccaagtaaccaggcgtatttttgtagggccaggtgcatgcccatattgattgacagggtctcactgtgttgcccaagctggacgtgaactcctgggctccagccatcctactgtctcagcctcccaagtagcataccaccacactcatctgcctcctttgctttttttttttttttttttttttttttttgagatagagtcttgccctgttgctcagactggagtgcaatggcaccatctcagctcaccgcaacccccacccttctgagttcaaaggattctccggcctcagcctcccaagtagctgggattacaggcatgcaccaccacagccagctaatttgttgtatttttatttttattttttatttattttcgagacagagtctcactctgtcaccagggctggagtgcagtggcacgatcttggctcactgcaacttccgcctccctagttcaagtgattctcctgcctcagctttccgaatagctgggactacaggcgctcgccgccatgcccagctaatttttgtagttttaacagaaatggggtttcaccatgttggccaggatggtctcgatctcttgacctcgtgatccgcccacctcagcctcccaaagtgctgggattacaggcatgagccactgcgcccagcccttgttgtatttttagcagagacagggtttcaccatgttggccgggctggtcttaaaactcctgacctcaggtgatccgtccacctcggcctcccaaagtaccaggattacaggtgtgagccactgcacccgcccctgtctttgcttcttaaggtgaaattgagatgactgaatcttagtacaattttttttttttgagacagggtcttgctgtcacccaggcggcagtgcagtgtggcaaaatcatagctcactgtagccttcaattcctcagctcaagtgatcctcccacctccacctctcaagtagctgggaccacaggcatgctccacaatgcctggctaattttttatttttttattttttgtagagacagggttttgctatgttgccaaggctagtcttgaactcctgggctcaagggatctgcctgccttggcataccaaagtgctgggattacagacgtgagccaccatgcctgaacaaaactacataaatttttaattttttttgtggaaatggagtctcactatgtttcccaggctggtctcaaactcttggctctgtcctgccacagcctcccaaagtgctgggattataggtgtggcgcctggcccgtacaaatactttttattctaggcttaacttttacattggccctagctaaatagaaatctcatcactcaggaattaatcctcatttaatcaaacgggtagggtgtaatcttaggaaattattgattgactctacctgattggatttgtagttaatagctaattaggttaataactaaattcacaaggcacagttttatttgatctcttttaaattgctcttaaggatgtaacaaagagtgcgtgggatgccctgagggcaggcattcgacttctggagcagcagcttaacttctgaaattcctccgaaccatgtgtccacacctcgtctggctgcatccgtgggccagatgtgggtggtgaatcctgtggattagaggtggtgctaggtagcccccaagtgac

SEQ ID NO: 19317 - DNA, 2300 bp, Homo sapien
ttcattcaacaaagaccgtgggagcccgaggctggtaaacaatgagtccatcccgcatcccaggggactctggtggcagtgcagttttgccgagaggagttttaatttaaaaaaatgcaatcaggagaccagcaggtcctggaatgagtcaccctcagtgcatctgcggactcatcagacaccccaggccggcttcgggtggggaatgcactagaacgaagtgacacctttgactaaacgaggcctcccccgagtactcagagtggcccagacccctctcctcagggggctagcaggcttcagctctcatttgaaagggccgatatcaagcagagttgtgctgaggccagaaacccccacgggcaggtcctcccagggctgggagtgggcatgccgtggggccggcgctgccaggacaggagggtggccacgagctccagctccacaatgccaggccgaccctgccgtggggctggggctgggacttgctgtgctctgttggcagcagctgttcctcaggggtttccaggctcttggagatcagggacactcatttctcttgatcatggctgatacaagcatccctctctgtgtcaggtcctctccatggagaaagcatttctaggtgtttgggctggtgcccgcagcctgtgcctgtcctgggaggcagggcccatccacaggtgcccatcaacacagcttccccaacgcctgggcagcacaccggatccctgatgtctagggaagagtcttctaggtccccagaccccacccctcctgcccttgatcaagagaccagttcactactcagatgcacgtctccttggtgccttgaccattcatgtgacctttttggcatcacagatcaagtgtctgcagatgggcccagggcctgtaggtcagacattgccctttttccccagcctcaagcacaggggacacagggtgggctaggccagagcgccacctcctcagagaggcccctgggctccccactgagcatgatgagcctgggtgaggggaggcgcctgctgcggttgccccgggtggaggccgcatgtccggtgtcccttggtcattgctggtcttcgcctgggggcgggctggtcaggagaccgattgggtaacactcctgatttcggcttctctgaaacatgagaggctgcagtgctggagccactgcccagggtccctacctgcacccctgcctggcttgtcacatgctctgtgtccagcctggtcatgcctgtccttttccccacctcccctccgtaggcaaggtgcccggcgacgactgcccgctggtgtggggccagtgctcccactgcttccacatgcattgcatcctcaagtggctgcacgcacagcaggtgcagcagcactgccccatgtgccgccaggaatggaagttcaaggagtgaggcccgacctggctctcgctggaggggcatcctgagactccttcctcatgctggcgccgatggctgctggggacagcgcccctgagctgcaacaaggtggaaacaagggctggagctgcgtttgttttgccatcactatgttgacacttttatccaataagtgaaaactcattaaactactcaaatcttgctggaggcctctgggtgcctgtgttctcggcatatagatgtggtctcggtgtgttttgatatgaaaactctcatgaataaacatctccgtgaaacgccaaggccctcgtcaaaccctgagtcatgactgggaggagaaggagcaggatcagacggtagagcctggggcatgctcttcaggcatgctcttgcctgctggattgccggcggcggccctgggaccctccctcaggctggctctgagggaccctggctgtgcaaagctggcggccactgcttgtggcgcctccagactgaaggccaccatctctgagtgggcgtccattgttctcactgggactgtctgcagcggggctgggcctcccacagtgtagggatcagtgtcctgacactgggaagtgtgtccacacgtctgaggcttcccttcctagggaaaggtggccctgggaggctcctttgtgtgcctctgctccccacaatcgtggtgggaaggggccgctgggggagtggcagccccggcatctcaggctgcttctggacagagcacaggctgtgtctccagtaacctagggagcccttggcattcatggggccagtgacccgtgcccagtgtctcttgacccttcctcacagcaacctgaggagtagaccaggcctcacctgaaatctgtgtcagggttctctagagag

SEQ ID NO: 19318 - DNA, 2300 bp, Homo sapien
gagctgcgtttgttttgccatcactatgttgacacttttatccaataagtgaaaactcattaaactactcaaatcttgctggaggcctctgggtgcctgtgttctcggcatatagatgtggtctcggtgtgttttgatatgaaaactctcatgaataaacatctccgtgaaacgccaaggccctcgtcaaaccctgagtcatgactgggaggagaaggagcaggatcagacggtagagcctggggcatgctcttcaggcatgctcttgcctgctggattgccggcggcggccctgggaccctccctcaggctggctctgagggaccctggctgtgcaaagctggcggccactgcttgtggcgcctccagactgaaggccaccatctctgagtgggcgtccattgttctcactgggactgtctgcagcggggctgggcctcccacagtgtagggatcagtgtcctgacactgggaagtgtgtccacacgtctgaggcttcccttcctagggaaaggtggccctgggaggctcctttgtgtgcctctgctccccacaatcgtggtgggaaggggccgctgggggagtggcagccccggcatctcaggctgcttctggacagagcacaggctgtgtctccagtaacctagggagcccttggcattcatggggccagtgacccgtgcccagtgtctcttgacccttcctcacagcaacctgaggagtagaccaggcctcacctgaaatctgtgtcagggttctctagagagacaggactctatatgaagagtatatatgaagagtttattgggagtattgactcacgtgatcacaaggtgaagtcccacaataagccatgtgcaaggtgaggagcaaggaagccagtctgagtcccaaaacaaaagtagagaagccgatagtgcagccttcatcctgtggccaaaggctgcagagcccctggcaagccactggtgtaggtccgagagtccaaaagctgaagaacctggaggccgacgtgcgagggcgggaagcatccagcatgggagaaagatggaggccagattcagccagtctagtctttccacgttcctctgcctgcttgtatcctggctgtgctggcagccgattaggtggtgcccacctggattgagggtgggtctgcctctcccagcccactgactcaaatgggaatctcctctggcaacaccctcacagacacacccagtgacaatactttgcatccttcaatccagtcaagctgacactcagcattcaccatcacacctgggaagcatggaacccagaaacaagtgccagggctccagtgccagtgcctgtcctgggaagatacccaagagaagacatgaccaggaccttgggggagcatgaaatggtgagggcacagtgagcttgaaggctgatgtcacctgccaggagagcggctggcagtcctgcctggtgccccccaaggggcagagctggcagagaggggcctccaatcgaaggccaggagtcgtggagctccagtgccttggtgtggctggccttcttgcccccctcccagaggaccccgccagtaacagccctgctggtggaaccttccccagtgggcatgaaagaaatgagggccccacaagccacatggactctgatgcctggagccaagaataccccttagggtggtagaaaccgcccccggggcactgtgcagtgtggctggctctccagcatcaggagtactggggattgcctgggggacgactcctagggctgggcgcccgtgggccctcccctgctgccactgcggcccacgcaagccgggcctgaagggcgcgagcggcatgggtggggagcttgagggggcgttgggctcccaccaagcgccagatccttgcgcgcctccagcgctcgcccgcgcggctggttcctttgggatgcggaggtgcgacggctcctccgcgcgcgcccgctgcaccccagcccgcccgccgcccctcccggccctccgcagcctcggcccgccctcgccgcagatataaggcggcccaggcggtggctgctccgagcccggacgccgccgcccaccagtcagccggcgtccccatggcccggtccgcgacactggcggccgccgccctggcgctgtgcctgctgctggcgccgcctggcctcgcgtggtacaagccagcggcggggcacagctcctactcggtgggccgcgccgcggggctgctgtccggcctccgcaggtccccgtacgcgcggcgctcccagccctacagaggggcggaacccccgggcgg

SEQ ID NO: 19319 - DNA, 2300 bp, Homo sapien
ccaaaaagtctccgggctgagctagccgcactctggccgcaggaggtcaatcactacaaggggaagaactaccccatcatgaatctgcatgaacggactctgagcgtgctggcctgccgggtgagtgggggccaggagccagcccaaggatggggagacattcccacaacatcccccctactaagggcctccctgagccagggcaggggggcttgggtcactggcagagctgcacccagcaccccgagttctgtggcacctgcccatacctgtttgttgaggcatgaggaggggtggtcaggtctccagatgctgttccttcttgtctcatggaggagccccaggggtccccagcctgcccagcccatccctgctactcactggcagccccgccccatgtctgagccgtctctcaccaccctgtggccctggcttaccagtagcagggaccgagcaagtctttctgcccccactgtccccacagtacgtgtcagaagtggtgattggagccccgtacgcggtcacagcagagctcctaagtcacttcaaggtgaggctccgcatgggctcacctcgttccctctgttcacctctgttcctgcatgggctgggaatgcaggctggctgtgggctcctaggcggggcccaggaggtacctgggctgaggaaagggcagggtcagctctcccaacccccggggcctgtgctgggctgtgggtggcgacggccgctgcctccccggggagggctcctgaccccactccttctccaggtggacctggtgtgtcacggcaagacagaaattatccctgacagggatggctccgacccataccaggtgggtcatgctggcccttgctgggcacaggggttgccattggcacctcccagccatttaatgactcactgtgcctgcctgggaaacgggcatggtggcgcagctgctccgactgcaccactcccatgggaccctgggcgctggtctccctctggggcagggcatcagatgggtcttggggaggtcagcagggaccttcatcccgctcctcctctctggacccccaggagcccaagagaaggggcatcttccgtcagattgacagtggcagcaacctcaccacagacctcatcgtccagcggatcatcaccaacaggtgcagttgggtgggggcacctcggagccgcctcatgggcgctctccgctagacttaccctgccctccccctcggagccgcctcatgggcgctctctgctagacttaccctgccctctcaggttggagtatgaggcgcgaaaccagaagaaggaagccaaggagctggccttcctggaggctgccaggcagcaggcggcacagcccctgggggagcgcgatggtgacttctaacctggcagaggccctggccggccctccccctgctctgcttctgcgccttctgcgtttggacataggactctgcagggctgccctctctaactggcctggctctggaagggctggtgaggactctgcctccttgcctgcctacaaggtgcctggtttgcagcaggctctccgctctttccagcaaagctgctcagagagggtgtccagcacagtggagaggccggaagtgagacgggcagacggcacctgcagcctgaaacgcaccgctcctgcgtgcgcccccacctggtccccggatgcccccaccacctggacagaggccacactgactgcccacccagctgtggcgggaggtgcagagcagagggctttagggagcagtgactgcggtcacccctttagttctctgggtgtagaccacaccacctcccactgggcaccccccaacacggtgtcctgccacccagcgcctggctccaggaaaacacgcttgccttccttcccggcagcttcgccactctccttatggactctgttctgtttgtacatggctgacggaaatctctttggtacaaccgaataaagcctggtggcagtgctgcgcggggctcccagccctgctgggaaggaccagggaaccactcagcaaggagaccctcttggccctgcccccaccatgcacccagcagccgggagtgcagcgggcagcctggcagtgagtgaaacccgggcctccagccctccaaagcctggggccaccccctgtagcaggcgatgctagaataaggaggagagccagagctgaggctccttgccccttggcccctccaggggccatgggatctctgtctcccacacccctgtcacggcccgcctggagcagcccagaggccgaagaggttcttactgcagc

SEQ ID NO: 19320 - DNA, 2300 bp, Homo sapien
cacacaatccccgcggggagagggattctgcccgcgtgctcctgctccaggcctccccgtggagctctccgagatgcctggtgggaagcatctggaggggacgagcactcggcagctctggtcagacagaatctgtgtgcttggttttgggagttggcgtactttgggaaagcttaaacaaactgtgccttaatacagaatttgtgataatttagacttggtgtatgtattgagtaaaaagtttacactctctttctctgtgaattttcagggtcttataggggaaatcaataacttcttttaatcaaagggttcaagaaattaaggatcccttcaccttctgggcctggcacttcttgtatgttatgtgtgtggtgttctgtgatgtgggctatcgtgtactgtattttttttttacattaacttagctcattttccttatcagtgcgtatctgtatcttaagttatgatctgtggttctgcatctccgtcagacacatgctttcttcacggggtcgtctgtaggccacgcctccctagtcagctgggaagggggagagggtctggtccacctgccccagcggtacaagtggaaggtggggcccagagttgctagtgactcatccctggagacggaggcagccctggggccactgctgccccaccctgtgtgtgcacgccgctcagtggtggacaaggacacggagttttgaggagaccgagctagtgtgggtgccgacctttgagtcaccacctaagaggtgacctctcccacatccgttctgcagcttggtaacaatgaagctgccgccaaccagagccccgccgcagttgacacgggagggaaggggatgggaaggcagggaccgcagacagctttcccgagctggggcaggtgtgactgcgagaggctcccaggcccgcctgatgccgctttccctttttggcaggtggcaggatcccattttctcactggcgactcccctgcgtgctggtgaagaaggcagccacagtcggaagtcgctgtgcagaagcagagaggaggccccgcctggggaccggggtgcaccgcttagctcggcccccatcctagggggctggtttggcaggggctgcacaaaacgcacaaaaaggaagaaagtgacgtaatcacgtgctcgatgaagaacagttggcactttgcagatggccagtgtcacggtgaaggctgggttgcccccacgggtctagggagaacgaactctttggggatgacattttcaccgtgacatttttagccatttgtccttgaggaagccccttgcactgctgcggttgtaccctgatacggcctggccatcgaggacacctgcccatccggcctctgtgtcaagaggtggcagccgcacctttctgtgagaacggaactcgggttatttcagccccggcctgcagagtggaagcgcccagcggcctttcctcgctcaccaggccagtctcagggcctcaccgtatttctactactacttaatgaaaaagtgtgaactttatagaatcctctctgtactggatgtgcggcagaggggtggctccgagcctcggctctatgcagacctttttatttctattaaacgtttctgcactggcttccggtgtccccgagtggtcggcgcgggctccccgggctcaggtctgccgcctggcagctcggtcgtggcttaaaactcccttggttggacaggggacaactgtagattattgtgccaaaaaataagaaaaaaaactcccctggttgggacagcgccccgtggaggttcccggaggtggcggcggtgggacggtccccacgccgcactgccccgccagccgagcgccaggtgtgggcggtgcggagaggccaggtgtgggtcggggggcggggctcggaaagcgcggcacacgccattggctgtgcgtttggagggggcgggactctgtcaggggctcacgccattggccgtgcgcggaggtgcggtggggcgcggccttcggggggtggggctcggggcggagggcgggaggcggggcgggggaggcgggggcggggctcgggccgagcggcgcacgccattggccgtgcgcagcgggtgaggcccgcgtgacggccgctgagcgtgcgcctggcggggcgggcggcggcgctcggagtcgccgggagctgccaggctgtccgcgccgccgctgcggggccatgatccggaacgggcgcggggctgcaggcggcgcagagcagccgggcccggggggcaggcgcgccgtgagggtgtggtgcgatggctggt

SEQ ID NO: 19321 - DNA, 2300 bp, Homo sapien
atggaggttattaaagatctaagtgaggaggggctggggtttggatgcggggtgaggcccgagcgctcacacttcgtgtagggcgggcaggggcctgacctcttgcagggcagtggccttggtgccctacccctgccctgcgcagtatttattgctaaattattgtccaggaggggcagcactgggcctggccccccgggtatttattgctgtacatagtgtatgtttgtgatatataaggttttctttattttgtatatgatcaataaaccttttaaagagactggcaggtgcttctttggggcgacgcggcgggcggagccggaaggggtgggtgggggcggggcccatcttgcgcatgcgccctgagcgcggcctgccgtgtgaggcggaagcggaagagcaggtctccaggggagcgatggcagccgggggtctgagccgctccgagcgcaaagcggcggagcgggtccggaggttgcgggaggagcagcagagggagcgcctccgccaggtacgccgccgccgctccccggcccggccatgcccggcccgcgccgccgctcaccgtccgcctgcccgcaggtgtcgcgcatcctgaggaaggcggcggcggagcgcagcgccgaggagggccggctgctggccgagagcgcggacctggtaacggagctgcagggccggagccggcggcgcgagggcctgaagcggcggcaggaggaggcgagttccgcgtgcggcgcgcgggcgcccccggtttcgggagcagctggggcgacgggcggtcccgggtggggcggcccggggcggtgaccaccctggcgtcttggcaggtgtgcgacgacccggaggagctgcgggggaaggtccgggagctggccagcgccgtccggaacgccaaatacttggtcgtctacacaggcgcgggaatcagcacggtagggagggaggcggaggcgtaccccaggacggagtatgagctccagtaatcgcgaaaaactcgcctttaaagcagctctaaggttttttctcttaaagaaacgaaatgaccaaaacttacctaaggtaaacgctttttaaacgcttggcctctgtgttacagccagttaaaaaaaacaaggagtagagatacgaatggggtgtagtagccgactgctcgcaggcacccccaggttatgtggacagagctaagcccaaagttgtgattttccactctgttctgtccatgtcgagggaagataagtagaaagtgacacagtaagagccagaatacaccaggtgaaggagagaattgcattgtgttttgagaagtttcactgacaagttatcctgggctgtgggacatcactagctttgaaagtgtagctggcacctcgtccatctaatttgatgggtgtgtgtggggtgttgggcacgcgtcggcctagcagatctgaacccaggtgatttctgttctcaggaagcttttaggtgacaaggatcaggcatgtgaacaaataaccatactgtaaagctggctgtgctgggtcgctagagcaaactcagacacacactctgcgctcttggagttgggaaacccacctgcgttggctttttgtgggaggtggccttgattgggccttgaaggatgggtgagatttacagaaggttggaatgaggcactccaagcaaagaacagcagaggctcagcagcaagaatgcaaaaagggagttcactactgactcaaatacccggagccctggggtttagtctcctccctccacaagtcacatgtaaaagtccagtcatgctgggcgcggtggctcatgcctataatcctagcactttgggaggccgaggtgggcggatcatgaggtcagtagttcaagaacaacctggccaacacggtgaaaccctgtctctactaaaaatacaaaaattagtcgggcatggtggtgggcacctgcaatcccagctactcgagaggctgaggcaggagaatcacttgaaactggaaggcggaggttgcagtgagccgagatcatgccactgcattccagcctgggcgaaagagctaaactccgtctctcaaaaaaaaaaaaaaaaaaaaaagtccagtcatgtaattatgtaacagtcacgtgacctgttatggaacttccaatggcaactaaaagcacatgcagctagtggatttcatcggagtgtttgaggttcccgtcttgaatgtgactgtcggaactactgtccgggggggtggtgcatttttctgagtttaagcaggagtcgggagtccccaaaagggaacacaagacacctt

SEQ ID NO: 19322 - DNA, 2300 bp, Homo sapien
tccacatctggaaagtcggagccgcagcctgctgcaccgtttccgctctgggatcttgtgagttacttttttaggctgtggtttggtgaaaggaaccaacacattaacgatttttcccccagaagccactgaataattctttttggtgtatttttgccttcctgttggctgtctggccttggagcaggtcgggagagtagagtacataatcagtgccacacagaggcagggcgtgtctgagagactaatgcctgtcctgcctctggcctgtgtcctgggtgtgtaccatacctgctgggccagtcccacacatttccaccctgcccctggagcagcagctttgataccatgggtgtcccttgagtctgagctagagtgtgtccccgataaactgtgagacctccctgttcttggtgaccccagttgggctttggcccctccagcaaccttgtgtcccagccctgcccttcttcccaccccctcaatctgctagtccctgaagcctttaaccaaacgggagtgggcacagaaagccttctcctggcaacaggacaagggctgcccgcgtgtccagccctgttgctctcctggcgctgagaggtgggtccaagcagagttgatcagtccctgcctgccctgcctaggtctagccaggggaggttgtgtgtgtgggagaagaccccgggatctgctggggtgggatggaggttattaaagatctaagtgaggaggggctggggtttggatgcggggtgaggcccgagcgctcacacttcgtgtagggcgggcaggggcctgacctcttgcagggcagtggccttggtgccctacccctgccctgcgcagtatttattgctaaattattgtccaggaggggcagcactgggcctggccccccgggtatttattgctgtacatagtgtatgtttgtgatatataaggttttctttattttgtatatgatcaataaaccttttaaagagactggcaggtgcttctttggggcgacgcggcgggcggagccggaaggggtgggtgggggcggggcccatcttgcgcatgcgccctgagcgcggcctgccgtgtgaggcggaagcggaagagcaggtctccaggggagcgatggcagccgggggtctgagccgctccgagcgcaaagcggcggagcgggtccggaggttgcgggaggagcagcagagggagcgcctccgccaggtacgccgccgccgctccccggcccggccatgcccggcccgcgccgccgctcaccgtccgcctgcccgcaggtgtcgcgcatcctgaggaaggcggcggcggagcgcagcgccgaggagggccggctgctggccgagagcgcggacctggtaacggagctgcagggccggagccggcggcgcgagggcctgaagcggcggcaggaggaggcgagttccgcgtgcggcgcgcgggcgcccccggtttcgggagcagctggggcgacgggcggtcccgggtggggcggcccggggcggtgaccaccctggcgtcttggcaggtgtgcgacgacccggaggagctgcgggggaaggtccgggagctggccagcgccgtccggaacgccaaatacttggtcgtctacacaggcgcgggaatcagcacggtagggagggaggcggaggcgtaccccaggacggagtatgagctccagtaatcgcgaaaaactcgcctttaaagcagctctaaggttttttctcttaaagaaacgaaatgaccaaaacttacctaaggtaaacgctttttaaacgcttggcctctgtgttacagccagttaaaaaaaacaaggagtagagatacgaatggggtgtagtagccgactgctcgcaggcacccccaggttatgtggacagagctaagcccaaagttgtgattttccactctgttctgtccatgtcgagggaagataagtagaaagtgacacagtaagagccagaatacaccaggtgaaggagagaattgcattgtgttttgagaagtttcactgacaagttatcctgggctgtgggacatcactagctttgaaagtgtagctggcacctcgtccatctaatttgatgggtgtgtgtggggtgttgggcacgcgtcggcctagcagatctgaacccaggtgatttctgttctcaggaagcttttaggtgacaaggatcaggcatgtgaacaaataaccatactgtaaagctggctgtgctgggtcgctagagcaaactcagacacacactctgcgctcttggagttgggaaacccacctgcgttggctttttgtg

SEQ ID NO: 19323 - DNA, 2300 bp, Homo sapien
gttcagagacaagtcctgtgtctacctgcgtcagcctgaaaatggaaatattggctgttgactcttgtcatttagtgacttcatccccctcccctcagtctgatcttgtctaagtagaatccaggcgttagttggaatcatatcataagtatccatgaagaaaacgtcatgatctgcctcggagtggggagaaacaggccctccttgtccttgtgcagcccccacttttgtcctggctgtgggtggccatccattttgagcacctctgccaggctgcagacctggaggcgaagggagtgtggaagaggagggtgtaagggtcgacgcgtgctgaatgggaggtgcaggtcctcggtgcgttggcagaagaggcttctggagtttcgaggccatacctcctttcaagagctttggatttggggcgacttccctgggtctaggggagtgttcctgtcccctgtcaggtcagccctgcggagccactccacccctcttccccttcccctggatttcctgacatagatggtgtgttcatgtgcaggtgtgagtgtgctgtccttctgatctctgttgatcccgctttcctactgagagggtggtggagagggtggtggtctcttctcacctcagtttttctgacacagcgaatcgagggctttggccaaggccaggtctctcaaacttgtccgccaagtaaaccatgatatatgtcttcccttccaccttaactttgccccaactcctcttttatcctaacatggacgctcagatttcagaggaatacccagcagggacaggtcagctctcaccaggagagtgaggcccctggctgctgctcggggtggcactggtgttgctggctcagctcttggtgcatgtttcagatatgtgtgtacacttctgactggtgatcagggcccggcccacggccctgagcggctgcagcctgctttgggacgatggtcaggtcccatgttgtccctgctgcctccctctggagtggccacttggccaaagcgcccatccacatctggaaagtcggagccgcagcctgctgcaccgtttccgctctgggatcttgtgagttacttttttaggctgtggtttggtgaaaggaaccaacacattaacgatttttcccccagaagccactgaataattctttttggtgtatttttgccttcctgttggctgtctggccttggagcaggtcgggagagtagagtacataatcagtgccacacagaggcagggcgtgtctgagagactaatgcctgtcctgcctctggcctgtgtcctgggtgtgtaccatacctgctgggccagtcccacacatttccaccctgcccctggagcagcagctttgataccatgggtgtcccttgagtctgagctagagtgtgtccccgataaactgtgagacctccctgttcttggtgaccccagttgggctttggcccctccagcaaccttgtgtcccagccctgcccttcttcccaccccctcaatctgctagtccctgaagcctttaaccaaacgggagtgggcacagaaagccttctcctggcaacaggacaagggctgcccgcgtgtccagccctgttgctctcctggcgctgagaggtgggtccaagcagagttgatcagtccctgcctgccctgcctaggtctagccaggggaggttgtgtgtgtgggagaagaccccgggatctgctggggtgggatggaggttattaaagatctaagtgaggaggggctggggtttggatgcggggtgaggcccgagcgctcacacttcgtgtagggcgggcaggggcctgacctcttgcagggcagtggccttggtgccctacccctgccctgcgcagtatttattgctaaattattgtccaggaggggcagcactgggcctggccccccgggtatttattgctgtacatagtgtatgtttgtgatatataaggttttctttattttgtatatgatcaataaaccttttaaagagactggcaggtgcttctttggggcgacgcggcgggcggagccggaaggggtgggtgggggcggggcccatcttgcgcatgcgccctgagcgcggcctgccgtgtgaggcggaagcggaagagcaggtctccaggggagcgatggcagccgggggtctgagccgctccgagcgcaaagcggcggagcgggtccggaggttgcgggaggagcagcagagggagcgcctccgccaggtacgccgccgccgctccccggcccggccatgcccggcccgcgccgccgctcaccgtccgcc

SEQ ID NO: 19324 - DNA, 2300 bp, Homo sapien
tttagaaaaaaaacaagcaagaagaccatttgaccatatgaatggaaaagggaagaaagtataatagaaactttgctagttaaaaaaaaaagaaaaaaaaagaaaaaaaatccctttcttgtaaacttacggacacctctttgtggctgttggagtttagtttttatatacacagagttatcagacattatttataaaacttagtttaaaaaaaagacaaaaaaaaaaaagccaagccgtgagccgaccagaaggccgtcctctttgatatcttttgcaattgtaccgaaagtgacttactcctctgcccttcctgcttccgtctcttgccggtgccgtggtgtcgtccgtgcctggtgaggttttgtgcagcggtaaagtgctggtgcttctggtgacctttgacctgtgggtgtcacttcttgtgtctgttttcccgtgttcgttttttgggtttagttgtgcttttgcttctgctggcttgctggacctgggctggggtgccaagtggcgcctgctgcgtcagagctcaaggaatctgtgcccaccaccagctcctggtccgtaggaggtgagacatggggttctgtcatgcccccctccactgagccttggctacatctgtgtctagggcttgggctgatctagtggcggggtaggtgaaactggggtcccttggggcgccccacgctgcttccacacccaccacctctggccttgggtggtggcattacagggatgagggagtcactgtgggtggccacagggctatggccaagcgttccctggccgtcttcctctggcctcagctttgttcctataggctgcccgcgccgtgggctgcaggtctcgccgcccgcttgatccctgaggtgtttccatgctgcgggtggtgcttccaggcagagtgggtgggggcccaccgggcaccgccctttcttccttgtccctgcctcactctgagagccttgggggtctccaccagtgcagacaagggctacagtctccagggccgggtcttgtccctcttctccgctggtccacgctggcagctcttggcttcgggcctgccttctgcctccctttgggatctgtgtcttccagggatcagctgcttggcttctgctggaggtgcctccctgtgggggcgcagcctgcctcctgctctcagttcctcgccagaggctgctgcccttcctggctgggctcaggaggctccttgtaggcatatgatggggagggggtgcccctacccacctccaagaggctacagccctgtgtctggccatgtgagccctggcctttcaccgggttgctggtttcttttctgtggggcccagacttctgtaaagcacacagatgtgggtaagatgaaaaactgtggcccaacagggcttaaccctatggatggtgggatttttatccaatagtttggcctggtgtgcccacaggatgggaacagggaggcaccatcaacacttgtcatgttaatgagcttttctttgctcgaggtgttcagagacaagtcctgtgtctacctgcgtcagcctgaaaatggaaatattggctgttgactcttgtcatttagtgacttcatccccctcccctcagtctgatcttgtctaagtagaatccaggcgttagttggaatcatatcataagtatccatgaagaaaacgtcatgatctgcctcggagtggggagaaacaggccctccttgtccttgtgcagcccccacttttgtcctggctgtgggtggccatccattttgagcacctctgccaggctgcagacctggaggcgaagggagtgtggaagaggagggtgtaagggtcgacgcgtgctgaatgggaggtgcaggtcctcggtgcgttggcagaagaggcttctggagtttcgaggccatacctcctttcaagagctttggatttggggcgacttccctgggtctaggggagtgttcctgtcccctgtcaggtcagccctgcggagccactccacccctcttccccttcccctggatttcctgacatagatggtgtgttcatgtgcaggtgtgagtgtgctgtccttctgatctctgttgatcccgctttcctactgagagggtggtggagagggtggtggtctcttctcacctcagtttttctgacacagcgaatcgagggctttggccaaggccaggtctctcaaacttgtccgccaagtaaaccatgatatatgtcttcccttccaccttaactttgccccaactcctcttttatcctaacatggacgctcagatttcagaggaataccca

SEQ ID NO: 19325 - DNA, 2300 bp, Homo sapien
gacgtggggtcgccccaaccccttttgtaccagggccatgcaggcttggagtccagagttggtgctgtgggaacggactagagagagttgcgggagagagaaggagcaggcacgctgggcctcgcgtgtccccgagcagtgagggtcccagtgttccctccactcccgagtggccacaggctcgcgggctgggaaggattcactctctttagccccaggggagcagctcagcttagcccagcatgaagagatgggctctgctctgagagtagggcgggcttgaaggccctgatgggtggaccaccagcctgggcgcagtggtgctgggggcgtgcagctgggcccaggggctgtgcactcaggcctgacccgttgcactgaacaagaccaaatcgctggttgtgcgcttaacgtgagggtgggtccagtgtgccctgcgatgggtcccgtgtcactgtttacatgacctatttgtgtggttatatagccctttatttaaaagagagaagttccttttacaaagttattaaattaattatatgtttaaaagttaaagaaaaaagagctgcagagtatttataaaactgtcttttagaaaaaaaacaagcaagaagaccatttgaccatatgaatggaaaagggaagaaagtataatagaaactttgctagttaaaaaaaaaagaaaaaaaaagaaaaaaaatccctttcttgtaaacttacggacacctctttgtggctgttggagtttagtttttatatacacagagttatcagacattatttataaaacttagtttaaaaaaaagacaaaaaaaaaaaagccaagccgtgagccgaccagaaggccgtcctctttgatatcttttgcaattgtaccgaaagtgacttactcctctgcccttcctgcttccgtctcttgccggtgccgtggtgtcgtccgtgcctggtgaggttttgtgcagcggtaaagtgctggtgcttctggtgacctttgacctgtgggtgtcacttcttgtgtctgttttcccgtgttcgttttttgggtttagttgtgcttttgcttctgctggcttgctggacctgggctggggtgccaagtggcgcctgctgcgtcagagctcaaggaatctgtgcccaccaccagctcctggtccgtaggaggtgagacatggggttctgtcatgcccccctccactgagccttggctacatctgtgtctagggcttgggctgatctagtggcggggtaggtgaaactggggtcccttggggcgccccacgctgcttccacacccaccacctctggccttgggtggtggcattacagggatgagggagtcactgtgggtggccacagggctatggccaagcgttccctggccgtcttcctctggcctcagctttgttcctataggctgcccgcgccgtgggctgcaggtctcgccgcccgcttgatccctgaggtgtttccatgctgcgggtggtgcttccaggcagagtgggtgggggcccaccgggcaccgccctttcttccttgtccctgcctcactctgagagccttgggggtctccaccagtgcagacaagggctacagtctccagggccgggtcttgtccctcttctccgctggtccacgctggcagctcttggcttcgggcctgccttctgcctccctttgggatctgtgtcttccagggatcagctgcttggcttctgctggaggtgcctccctgtgggggcgcagcctgcctcctgctctcagttcctcgccagaggctgctgcccttcctggctgggctcaggaggctccttgtaggcatatgatggggagggggtgcccctacccacctccaagaggctacagccctgtgtctggccatgtgagccctggcctttcaccgggttgctggtttcttttctgtggggcccagacttctgtaaagcacacagatgtgggtaagatgaaaaactgtggcccaacagggcttaaccctatggatggtgggatttttatccaatagtttggcctggtgtgcccacaggatgggaacagggaggcaccatcaacacttgtcatgttaatgagcttttctttgctcgaggtgttcagagacaagtcctgtgtctacctgcgtcagcctgaaaatggaaatattggctgttgactcttgtcatttagtgacttcatccccctcccctcagtctgatcttgtctaagtagaatccaggcgttagttggaatcatatcataagtatccatgaagaaaacgtcatgatctgcctcggagtggggagaaacag

SEQ ID NO: 19326 - DNA, 2300 bp, Homo sapien
gtttcaccgtgttagccaggatggtctcgatctcctgacctcgtaatccacccacctcggcctcccaaagtgttgggattacaggtgtgagccaccgcgcggcccatttatgtacatcttctcagtcacttatgcatcagtggaaactaagttttaggttctgttcaaagagtgactttcaggagctgagagcttatggagcagaggccatgactgccggggagtttcggccgctgggctttgcagccaggtggggctgtctgtgttcaggcacgggagtttctactttagccaaaggagacggagctcccaaatctccctccctttcctggctctcagtgtgaatgggtggcctaggtaccctcgcaggttgcggagccgtgaccatctgtgcctcctgcgtgaggtgggcttattagcctctgggagcagagggtgcatgacaggccccagctctgcccagccttgagggctggaggagggcgggggcagcttctcctcagtccagctcctgggatccctgcatggtccctctcagcccaggtccagaggccaggccaggagcctggaacgcactggctgtgctcagggctgcccctcccccaccccccggcgcacctttgataggaggcgatggcttgcacttgtgctgagttcaggccttctgcggagggcaaaatctgtcgaggaggcacttttccgtgtgatctcttcaggaagtcaccactgtcattgtgcttagcagcaggggtgggggcgatgggggtgggagaagctggtgccagggcagtgtctctgcaccctgacttgcactcaaggctggggggcccctccatgcttggctgagggcctgtctcctggggcagtgttgtgccggacgtgtaggaaagggctcctgtgggccttctgacctccagctcaggtcttccccatcctttatctggaagaatccagtggctggagcctcgggaccttgcctctgagctggcttggctgtggggaggggtctctggcctcccctccctgctctgtgcttgcagcctcacctcctggtcccaggctgggtgaggtggagtcttgagcctggtgaggatgtgtgcatccgcctggccacacttcagctcccctgatgagagtaagaagccccccagcccataatttcctgaagtgatcctagctcctctggaggagtctcccatctgtctgcatcaaacctggaaagtgggggatggagcatgaggcgggggtccatgcccaagggtctggtgggagctgggctgagctgggaatcccagaaacatccttagcaagaaagtgagagcagagtgctggagggaccccgagtggggaagagttggttgttaagtccggccaccccagcacttttgtttttgctccctggccctgtgggcactcacccggggcagggaccagagagcaggctgcagctcggaggggctgactccgccagccttcacgttgggcaggcccggggtggctcactgtgggagcccttgtgaaataccctggatggggtggggcaggggctgcttcctgcaacccaaagccacaggatggttactccatcagtggaggaggccgactgggaggtctagaggggcctcgggccaggctcctcccagctgatggcctgccacctggaaggtgggggaactccctggtcagtcctgccaacagaccagagctagatggacggcccacccccagcttttcaaagttaggaggctgggagactcggggttccctgtagcctcctctctggccaggtcccccgtggggcccctgtgcacccagggagcagggggctttgtccgaggccggctcaggggaggtggctgtagaaggtaggaccctggaagatgcacacacagggtcactggctggccctcacctgctattggccaggctgggggctgcggctctcgtggggcgctgttggctggcgggccagggagtgcgggcgcggcggggaggcagaggcaatgtgctgagtcagcgtgactcgccaggaacagccgcgctctgggcagtgccggggttatttttaaagctcccggcttccttctaggcctgcctctcccgcgtcttattccttctaatctctcccccgccccttgtcttgcgcctgccttcctaacagccttcagttccccttctcccgtcagaccttcctgacctcccacctggttctctaggggcagggtggacaggaagcagctcagcccagcctgggagaggccaagggctgcctcctatcaggtattgggggctgggcacct

SEQ ID NO: 19327 - DNA, 2300 bp, Homo sapien
gtccctccaggaccccaaaattttcccagggcatcaaactccaggccaacggtcagctaaaacattgaaacatctggaatctataagccccggggctcactgagagtggacctgtgttctgtgtgtatgtgtggggggtgctcactgagaatggacctgtgtgtgtgtgtgtgtgtgtgtgtgtgtggcggggggcggggggcatccctgagggcaaaccacaaagtagcctaacccagccatgaaatgaactcctgggcaaaggaagtcaaccttcgtgaatctccacatacccaaggaaaggtggctctggccacatcactcccaagctgccactttctaagcgtcctgggctgccaggccagacacccaacagggccactccctttgctaacttcacacaacgctgagaccccacttcaggtagcgacaactttagggtggctgggtgctgcgttctgccaccctgtgccatccacaccagcccatctgctgcaccccaaggctaggcaccctgaagctcccaccacctacagtctcaacccagactccagggccaactggggagagaggctgggctgcttcctcccctttgccgtttcctggtagagctgcccctgcttcctccctgcccagcccactgtcacccagggcttggtacacacacccctctttctcccaggacctcgatctctggccaggggctgtccaaccaggccagtcccagggaaagccgacttcccctttggctagctcggcccaccgaagctcctcccctccctcactcagggaactatttcccagtttggaaaactgctccagacttgggaccaggaccagctgccggaaaagagccgcctgggaaggggtggaccgcccggggcttcacctttgaccccgggagaacacctgcagcgagccacccccacttcctcttcaagcacccctgccttcaactggatcgctcggcgctcacttaaacaggcaccccaaggcgccgggcctggccccctcccacatccccacggctccctcccacctcccgctggcggccttttagtccccgaggcccctcgctcgaatcccctccggtatcagcttgagcaccgagtgacctcacgctgatgactcagcaagtctccctccgggctctggcacgcgactgacggaacccgagccccagccaggggcagggtcttccccgcagcacccccatcgccgcccctcctcccgggctcgccgcggacccccgcgccggggagagctgacgcggccaccggatgaatcagcagctgcgggccgggccgccgggccctggcgcggacccccgggcgcctcgctcgaccccaccctttcctcccgccgtccagtgcccctccctccaggacgcccgggtctccgagtccgctccgcactcgcccggctccgcgggtccgccgccgcccgcggcccacctccagtacccgggcgccaggggcaggaggagctggctcctgaccgctggggaaatcgaggcacgggccgccagcagggtgcgcggcagacccgaaaccagcggcccccgccgccgggcccccaaccgcccgcctagctccgggaggagccctgcctgcgcgccccctcggcccccgccgcccccgccgcgccgcccccaccgcccgggcccgccgccgcagccgcactcaccacactgcgggcccggcgggccgaggccggggcggggcggggccgcgcgcgctccgaggccgcgcggggcagggaccggcgcgaggggtccgggcccggggctcggaggactcgccgcctgcgcgggccgggccgagcgcactgggaaggccgggccggaccaggctcgggatccgccgccgccgccgccgctccacagacgtcacatgatgtttggtcacgtgggctccattcatgaagcggcgacgcggccggccggcgcttaaaggggaaggcgcggcggcgggagggcaaactgcgcatgcgcaacccgcgcgccgtcgtccctggcaacactggctgctctagcgcctggcggggtctcacgggcgggcctgggcgcacggccaaagcgccaggtctccacccccagcccccggcgtcctgcagccggagcctgcctcgcctggctcctgcgcccgccgtccagggcccctgtccaagctcgcggacgccggcggcgttttccagctcgagtgctcagcctagggcaggctctgcgtgcgccccctcgagtgccggcctgggccctgccaggcagaggcgctcttgcgtcaggacggcgccgccggggc

SEQ ID NO: 19328 - DNA, 2300 bp, Homo sapien
gctgtgacgggaagtgagctcctggaggtgcagagaagtccaaacagggagccaggcctcaaggccgcacttaaagccggtcgtggagatgagtgtgcggagtgagagggatgcttggaaacctgtgggcctctctcgcagtatccctctcagtacagtagcctttcgcggttctggtggcctcatggtttggcccaagcatggctgcaccactgtgtccagggacaagtgtcctgggctctccgtggggagctggccaggagccgctggggaggtgaggagatcttcgtgcagagccagtgccagccctcactgaccacggaacaccttcagctctctaggaggacagggagacaggtcctaggggtttggcttgggctgtttccacgtggcacctcccctccctcgatactctttctacaagccaccgtatgctactctgcaggtgcctgggaccccacccaccccaagaagattctggggtgaggggcagcaaaggagcctgggcagctccctgagtgtcctccccagcccgtcctgcccatctctatgacagtgcccagggaggggaggactgaggctccttcccaggagaagacagcaccgcagtgaggacgattcataaatccgttccaaattcgcgcggaggtgcaaatgagagcgggctcgaccctgtgaggaggagttggggtgtgggagtgagtggggacagcctggtgagcgtctgcccgcggggtgggggctgccagccccagggccaatcacccctggctcctgacggcaccgtggctccagctcccgctgtgtggcacggagggcgggtcctgaggagactcgggggcccgccaggtccccgctgtgtggacctagccctcaccgcccagcaatgcacgacttcaccctcccgcggagcaggatgcccagcggctcagggcgccctcccctcgccagcccagtgtggtgtggtaggatgaggacgcgagcagggaggagaggcaggagacggagctgcactcctggcctcagggccccgtgtgctgttttgtacactaaggttgaggcctcggaagccacgccaggaccatatcatgcccctagagcctgtgagactcgggctgtgtccagagcagggggagcaggtccccgacgactaaggacaccaccgtaagaaccacacgcagccccacagcgcacacggcgacaacgtgctgtggggctcggaggagttcctggggtctggcagggacaggcggagggacgcttctgagccttacacctcacggcttcgggactttggggccggcctgttcatggacggagcccaggaggaccccacagcccgtccccgccccttcctccccgctcacctgctggcggggcggccacccttcccctcccaggattcacagctgcgaagggaagagggtggaggagaaagtccagacacgggatcccccgtttatcttcctcccgagtcctcgccccctaccgctgggcatctccaacaagcagcgaagtctcccccgggcggagctctgggtacacgtggcgcaggaagggcctgggcagctcggggtctgctgcgcgggcggggatcgcccctcgctgctgggagctgccaggccgtccccgccccgcgccgctccgggacccccgagttggaatcgcggggccccggcggcgccgtcctgacgcaagagcgcctctgcctggcagggcccaggccggcactcgagggggcgcacgcagagcctgccctaggctgagcactcgagctggaaaacgccgccggcgtccgcgagcttggacaggggccctggacggcgggcgcaggagccaggcgaggcaggctccggctgcaggacgccgggggctgggggtggagacctggcgctttggccgtgcgcccaggcccgcccgtgagaccccgccaggcgctagagcagccagtgttgccagggacgacggcgcgcgggttgcgcatgcgcagtttgccctcccgccgccgcgccttcccctttaagcgccggccggccgcgtcgccgcttcatgaatggagcccacgtgaccaaacatcatgtgacgtctgtggagcggcggcggcggcggcggatcccgagcctggtccggcccggccttcccagtgcgctcggcccggcccgcgcaggcggcgagtcctccgagccccgggcccggacccctcgcgccggtccctgccccgcgcggcctcggagcgcgcgcggccccgccccgccccggcctcggcccgccgggcccgcagtgtggtgagtgcggctgcg

SEQ ID NO: 19329 - DNA, 2300 bp, Homo sapien
agggctgggagacttccttcagagtcagtccttttgacagtgtatccctggcccagagggctgtccattttgggtttttgggtttttaggtaaaagtgttacttgctgttatcacttggggaaaagtgattttgtaacagcctggggagcttggctctcaaagcgcctaggcgatgctagcctccgtgccccaggtttgagctgtccatctggacaagctcttcccatggccaccacagagcagcctcccagtgttggtggtggtcattacgtgttcacggtggggggaccaggtagacagatagccagaacgcgtggccctgccgctgtggcagaagcatcccaggccttctgaaatgatgtgctagaatagcctgtcatcatctaagatacagcacagaaaaaataaggcagctcctctcaccccttggcaggggaatgggctgccagtgatcccttctgacttcgcccttaatcttggccaccgacagggaccctgactatccagagccccagatgcaggcccgaatcagatgaactctgagcatgtcctcagggggaagtgactggagcttcactccccctaaaacccaggcaggcgagaggtttgggtattggaggatgctccgggctgcgtgggagtgggggcatgatggggtgggcttccttcgtttgcttagtggagcaccgctgcgtgcccagttagaggaacacctgtggccgcactgtcatgcctctttcttttcttttcttcttttcttcctttctttctctctctctttttttcagatggagtctcgctcttgttgcccaggctggagtgcagtggcgcaatcccggctcactgcaacctccacctccagggttcaagcgattctcctgcctcagcttctcgagtagctggaattacaggcacctgtcaccacgcccggttaattttttgtatttttagtagagacgggggtttcaccatgttggtcaggctggtctcgaactcctgacctcaggtgatccgcccgcctcggcctcccaaagtgctgggattacaggcgtgagccaccgcgcccggcccaaatggtgatatatttaaaatgcttccacttggcaaattattttcaactctgcccccaagggaaaaaaaaaaaggaaagaaaacgctgtacagccgggcttctccaaactcgatgacagtagaagggactgattcccagagagagccggccgcgcgcccagggacgccagctggacgcgtccgtgtccgggtggcccaagacaaagccctgcgtggagggcccctcacaggccccaatcgggccgccccctccgcccgcgtcctcggaccccacgtgtaggtcccgggaagcgcgaccaggaggagcgcgggtcaggggaccgcgtgccggagagggtgtctatccgggggccgggggatcccggggcgcgagagaggcgagggccggcggtcggcgtgggaggggcgcgcagatgatgcaaccgctctggcgccgccgcgcgctctgattggccagcgcctggcggccgcgcccggattcgctggcgcgacgggggcggggcctgggtgcgggtgccgcgtggcggccgcagcgctgaggggtgggtacgacccgcgcacggtagctgggttggggtcgggctccgggaatggtgggcggcggtcgccgggtggggcgcgacggtagcccagttctgggcggggtgggaacccagacgggggacccctaggcgccgggccctccctctccccgtacttttcccccttcccagtcatttcttctgcggaacctccacccctccagtgggtgcgggaccctaggcagcaggccaggcaccgccgctctgactgggggccccgaagcagttaacgggccggacagcaaagtggaaagttagaccagctgggaccaggggaggtgggcacccggctgcgggaggagcggccaggctggcactgcccccctaacttgctctcgatcctgccggtctcgtcccgcagagccggtgccatctgtgggggctttgggccaggggtctccggacagcatgagcgtgggcttcatcggcgctggccagctggcttttgccctggccaagggcttcacagcagcaggtaggcccccaggtgggggacggtgaggcccagtgggagagactggcctctttccacttctgcagggctgggggctgaaggtgggtgctgggtcacaaggcctgagtcctgcgggaactggcaacttctgtgtgtttggggctttacctgtgctgtctcactcttcttcctg

SEQ ID NO: 19330 - DNA, 2300 bp, Homo sapien
tcccccacgcccatctgggggtctcgagaggccctggacacagcgatggacagacgcactgttgctccttttagacggcggtccccacagccaggcctgtgctgctgccatgaagaatgtgaggaaggggcctcactggccgctgaggaggggtctcgctcacgttagccaacaaacagggtccggccgacatcctttactcagagggggtgggtgttttggggtcaatggcagatcccagatgagggcagtcagctgttcagggcctgccgctggctgagggcgatacagagggggcatagggatcacctgcttcctgactcaggggagacctgggcaccagtcttggagaggacccagcctccttctctcctttttttcatgtggccagaattctgaaacgagttaattgtcaccaacttcccaatttcctccctgtccggtggtcctctgccaccttcgcaaaggtcctgagggacagaaaggaaggggaggggacccagggctgggagacttccttcagagtcagtccttttgacagtgtatccctggcccagagggctgtccattttgggtttttgggtttttaggtaaaagtgttacttgctgttatcacttggggaaaagtgattttgtaacagcctggggagcttggctctcaaagcgcctaggcgatgctagcctccgtgccccaggtttgagctgtccatctggacaagctcttcccatggccaccacagagcagcctcccagtgttggtggtggtcattacgtgttcacggtggggggaccaggtagacagatagccagaacgcgtggccctgccgctgtggcagaagcatcccaggccttctgaaatgatgtgctagaatagcctgtcatcatctaagatacagcacagaaaaaataaggcagctcctctcaccccttggcaggggaatgggctgccagtgatcccttctgacttcgcccttaatcttggccaccgacagggaccctgactatccagagccccagatgcaggcccgaatcagatgaactctgagcatgtcctcagggggaagtgactggagcttcactccccctaaaacccaggcaggcgagaggtttgggtattggaggatgctccgggctgcgtgggagtgggggcatgatggggtgggcttccttcgtttgcttagtggagcaccgctgcgtgcccagttagaggaacacctgtggccgcactgtcatgcctctttcttttcttttcttcttttcttcctttctttctctctctctttttttcagatggagtctcgctcttgttgcccaggctggagtgcagtggcgcaatcccggctcactgcaacctccacctccagggttcaagcgattctcctgcctcagcttctcgagtagctggaattacaggcacctgtcaccacgcccggttaattttttgtatttttagtagagacgggggtttcaccatgttggtcaggctggtctcgaactcctgacctcaggtgatccgcccgcctcggcctcccaaagtgctgggattacaggcgtgagccaccgcgcccggcccaaatggtgatatatttaaaatgcttccacttggcaaattattttcaactctgcccccaagggaaaaaaaaaaaggaaagaaaacgctgtacagccgggcttctccaaactcgatgacagtagaagggactgattcccagagagagccggccgcgcgcccagggacgccagctggacgcgtccgtgtccgggtggcccaagacaaagccctgcgtggagggcccctcacaggccccaatcgggccgccccctccgcccgcgtcctcggaccccacgtgtaggtcccgggaagcgcgaccaggaggagcgcgggtcaggggaccgcgtgccggagagggtgtctatccgggggccgggggatcccggggcgcgagagaggcgagggccggcggtcggcgtgggaggggcgcgcagatgatgcaaccgctctggcgccgccgcgcgctctgattggccagcgcctggcggccgcgcccggattcgctggcgcgacgggggcggggcctgggtgcgggtgccgcgtggcggccgcagcgctgaggggtgggtacgacccgcgcacggtagctgggttggggtcgggctccgggaatggtgggcggcggtcgccgggtggggcgcgacggtagcccagttctgggcggggtgggaacccagacgggggacccctaggcgccgggccctccctctccccgtacttttcccccttcccagtcatttcttctgcg

SEQ ID NO: 19331 - DNA, 2300 bp, Homo sapien
gtcagaggacacggggccacgtcagcctgagcttcacacctgccctgcggccacggctccattcccagagtggccaggaccgtaggaccctgtgccttggggacatgtcctggggtctgactctctgtgccaatgagtcagggctgccctgggcctgagaatacccagacaggactggtgcccgtgggcaggtgtctgccaccccaggcagagccaagtggcctgtccacgatccccctgtggagcactcctatgtggtctctggagggaatccatggagtcccagcagccaatggagacgacaaggtcagagatgtggagaccgagggctggaggtgagagaaggggtccgggggagtctggtggcctccttctcggggcctccagagccagacctccaggcagggccttggacaggactccccacaaggacagagctcgggagggagagggggctggggagcccgaaagaggcctggctgtcaccctgtctggggagactttgctgggacccctgccgtgctgtgggagctgggggagccacatgcgaggtgctggctcttggccaactctggcttgagcactgcagtctggcaggcgtgatgtttgctcctctgaggtggctgaaagggacctgagggcggatggtggtgtgtgtctggggggaccaggctcactgaacaggacacttgtgggttgggcccaaagggatttcaccgacaaataaaccctttcttcccacatttgtgccgaaagagaaagaggcgcagctcacctaatggtcaatcggtcaatcgctgccatgctgtcctgcaggaccagggacaaaacgagccctaggacacgaagaggacgctggcctgtagctccgcagtgacggtgaccccaggctgtcctgcaggaccagggacaaaacgagccctaggacacgaagaggacgctggcctgtagctccgcagtgacggtgaccccaggctgtcctgcaggaccaggaacaaaacgagccctaggacacgaagaggacgctggcctgtagctctgcagtgatggtcaccccagcttgtccacgctgacttctcacctttcccaggacggttggcgcctttcattctctggggcgaaaacagtcaggacattcatccaacactgagccgtgtctcttccagcagcgatggccaaggcatagcctttgctattcagggactgaaagcagggaacttccactgtgtgacaacattacaaatttaaactctgtacttaaaaaaagaaagccagctgggcgtggtggctcacgcctgtaatcccagcactttgggaggccgaggcaggtgaatcacgaggtcaggagattgaaaccagcctgaccaacatggtgaaactctgtctctactacaaatagaaaaattagctgggtgtggtgctgcgtgcctgtaattccagctacccaggaggctgaggcaagagaatctcttgaacccaggaggcggagattgcagtgagctgagatcatgccactgcactccagcctgggcaacagagcgagaccccatcttcaataaataaataagtaaaaataaaaatatttgttaacgtttgtgaatgtataccacagcagcaacaagcgtgcctggcccccatgtcttggtctctgatgccattcccccaacacaaggaaccaggttcctgggagacacggctgactccagggctgggctggtgtctgagacaggaaaaaaaaacagtgttttccctgctctcacacactcaacagtcaacatccaacatggaatacttcatctctggtcaccaaaatgtgtgtggggattttccccaaacaccaagcaagtctccagtggacacctactaggcatcctccaaccctgctccagcgagtctccgcaggcacccactgggtgtcctccaaccctgttccatccagtctccgcggacacccgctgggcgtcctccaacccggttccatccagtctccgcggacacccgctgggcgtcctccaaccctgttccattgtgacgctttctccctggagacagtacccgatcctgcaggctaaggtctcagtcccacaagagtgtcctccacttcagatgccagtcccaagtacagctgtccctttgtatccttgggggatgggatccagtacctccaaaacaccagaatccacaaggccagagtccctgatacaaaatggcatgttatttgcatataaccccctcctctggacttaaatcacctcttgattacttataacacctggtatgtaaattctatgtaaacagtt

SEQ ID NO: 19332 - DNA, 2300 bp, Homo sapien
agaggcctcctccggacaggttcctgctggacgctgaaatctgccctgggtcagccttccccgccggggtgtgggtgggagaacgcctcaggatgggacctgcgtctgaagctactgcccttggccagccccacacttggcttttaaactgacccgacggcggagggacagcaggggggatttctgagtgagcagagagctaagggtgagcctcagctcttctgttagtgtccctgaacctcagttcccctcgtcaggaaaatgctgcaacctgccctgtggggagagggacctgagtttgtgacagcctgcctccctctgagaatgtccccaggttaggctgacctccagggcaccccagcctgatcttaggccttgtggtttacactggggtgccttacacccatcgaatgcgcggggcaacagctcccagcgtttggtctctctgtttcacaagagcccaggtaactcggctgtctgcgggtgcaggcggcgctgggactttctccctaagctcctcactcagcccggggctggcaaggaggacgtccacatggccccggccggcggctcgggggcatcctggctgcaggcaccgccctgcgcctctgctctcctgccccacgtggtgccgtaggctccccactgtcctgaattaggaggggctctggaagctctgcttgtgtctagatcgttgtcctgaaatgtaagacctggttgtcctgaaacgtaagacctgtttcctatttttaaaatgggtgtcatggcgcccagcaggcttcagaccggagggtgaaggagaaagtctgcccggccccgctggccctgcgtatgtcctttcctttcttttgtccatcccacccgcgctcaccccagcaggaaacctcctgaacccctcctgtccaccctgctccagtactgatttcccacaggaaccttgttctaaccccactgcccagagcctcgggagtggacaggggtgctctccaaggtgaagcatggggcaggtgcccttcgtggcatgaagggccgcaagcagaggcctagcgggcagccactggacccttggcctcctcccccagtggcggctggggcaggttcttggggggtcctcggcatggggccagcagccaggctggggcgggcggagatccaggacctcacctctggccccgcgatctccttaagtcgtagctgcttctctgaccccagcgccagcaggagcgccccggaactgagcgactcccccgcggcgccttgctggggcgcgcggtccctcccgcaggtctccgagggagccaggacctcgcgccccacctgtccgcttctccaggaggccccggcgccactgctgccgggccctcggctggaagccctgtgtccgccgccgctttgatcccggggggccctgctggataaaagtccctggcggctccgcgccagcgccagagggggagcgcagccgagccgggcgcaccagcgggacggcgcagggccaggggcgctgagaggacggggccactgggccgcccgcgctggccgcggtgagagcggggccccagggctgcgcgaggtggggcgatgcgggccggggtccgaatcccccacggcctgctctgggcctgggcactgggggatgagagggacactggcggctccaggtgagcgcgcctgccccgcgcccccagcccgtcgggctcggccagctgcgccgcgggcggagttccccgccccccaccccggcaggcgcggaaaagcctcgcccctccccgtcgccgccgccccttccagctgccccgcgggggggggcggcggcgccgggctggccgcggtgaatggagccgccggggccgcccggccgcgctgcccccccacggagccgggccgggagcgcctccggcggccgcggcggggtagtccaggcccctccgtcaggcttgcggtttgggaagaaaaggcgatgcctccgccaagaaaagagcgagcgcggccccctcccccctccgccgagcccgggcggcggcggcggcacatctaacgcgcgggcacccgggccgccgcggcccccgcaaataagcccagcctcggcccccgccgctcattggcgcgggccgcagccagcgcacccagaccctgcgctgccctcggacggccgggcgcggagccccagctgcggaggccgacggcacccggccccgagcgcctcgacgccgagccgcgcgcgccttctccgccaggcccggcgggcgggagcgggggcgagggagcaggagcggccagtgcccccgacacccccggcc

SEQ ID NO: 19333 - DNA, 2300 bp, Homo sapien
ttctccgtccccacccctctccggtttaactagtttttttttgttgttttttttttttgaggcagagtctcactctctcacccaggctggagtgcagtggcgtgatctcagctcactctaacctccatctcctgggttaaaggaattctcgtgcctcaacatcccaagtagctgggattacaggcacgcgccaccaccatgcctggctgattttttttttttttttcatcccatgagttttctttctgtaatgatttttgtgtttttagcagacagggtttcaccatgttggccaggctggtctcgaacttccgacctcacgtgttttccctgctttggcctcccaaagtgctgggattacaggcttgagccaccgcacccagcctggttgaactagttctaaggagcaactgcagccaggtctggagagggctcggctgccaccttccctcccagacagcagctagacagctgctcccaggatctgctttgaattaaaagtggcgtggccctttaagagaagcatccgccggccgcccccgccgccgccgcccctctttgatgtcgctggcgctgaaaggttcccagtggcaagatctgagggtttgtttctgcctccccagaggccacgtggggatcacagggagggagggagggcgagcgaaggtcacatggcctccctggcctgctgccgctgttgcggcaggagcaggagcgtggggaccagcaggctggacgggtgggggccgcggcctgcagctcgtgagggcggtggagcctggcagctgggagggcaaaggaccagcctctctgcccctccccttggcacccgggagcctgacctccagcctccctcacctgtccaggaaggagccacacactgtctgcgtgatgtcccaagaggcggcatctccactgatgagctgggactcccccatccccatgcccttcctcccccagctttggagggtggcctttccctggtggccctgccactccatggttagcccagtaggctgcatgttggcaccagccgggtgaagccgtagggaggaggcgggatggggcggagctcagctgcaggggtgccaagaggggcagatcccgccaaatacctgggtccaaaaatgacagcctcggcctccccgctgggctctaggagctctcacctgggtgaaggacatcctagggcaaggccgatcctttccaccagggaatccagaggccactcactcccaggcactggggccagggagagggcagccccaacaccaagcccaggagcagccgccccgcccaggggcccccctcgcccctccaaggacctgggcgagagccacagcagctcctgacaagggacttggctcatcaaggtcccaggatatgaggccaagaagggtccttctgatggatggggtgaccagaaaaggaggttgggggaaaccaaaaaggggccatgctctgcgacggcaccgcctggcctcggcacctcccccactctgagccggttggagagcagggcctcccccaagagccagccaagggggaagcggcggcctcccccaacagccagccacatggggaagcgggtggcccgcctcacttccctgctcacttgggcctcagaggccagcagctggggcgcagggcagcccaggtggccaggcggggcggggcggccgaggccagcacacaacagctgggccccagacggctggcagcagctggagcccagagcggccctggcgctcaaggccctggggggaggggcccgggatgtgcggcagggagccgcctccagtatggacaaggaagccgggtctggggctgcctgacatgctgtgtgctggacgctcatatcaccaagttccagggccccacgcgaggtctcgaggggacccctgtaccgccagctgccctccatcacaccttcctccctctccgactgcgcctgcccgccagcttgggcccttgcttcctgaaatgtgctgtcttgacccctttttcccagggggggggctccggccccccagcacagccgtgaccccggcggattgactcagaaccacctgtgcatccccagctccctccccaggggaaggcggtgaacagaaccctcaccccgtcctgtctcggggtgcctctcctgaagcacagagtcccctctgggccttcgtttccccagctttcctgccgcggggcacacagagtctaggctcagtcagaagccccggcgccacctgaatgggagcctggggaaccctgtatggtcctccctgaacaggacagtggggatgggg

SEQ ID NO: 19334 - DNA, 2300 bp, Homo sapien
ttcatattaataaatatatatatttcaagatggggtttcactcttgtcgcccaggctggagtgcaatggtgcgatcttggctcgttgcaacctccatctcccaggttcaagtgattctcctacctcagtgtcccgaatagctgggattacaggcacgcaccgccatgcccggctaatttttgtactttttttttaagtagagacaggatttcaccatgttggccaagatggtctcaatctcttgaccttgtgatctgcccaactcagcctcccaaagtgctgggattacaggcgtgagccaccgcgcctggccatatttaatttttttttttttttttttttgagacagagtcttgctccgtctcccaggctggagtacagtggcgtgatctcagctcactgcgagctctgcctcccggattcacgccattctcctgcctcagcctcccaaatatttaataactttttaaagaaggggaagcttgaccgaaagtgactataaatgtagaagaaacaataaacttgggaagccatgattttgcagctttacggtttaacactgaatctactcattaactgatgctaaaactgttgggcaaatggttattgggaaaacttgatgcttgtggtctcagagaatgacctcacgcatgccttaattactccacaaggagccacggaccttgaccatggaggaattcagcagacccaaagctgaccaagtggttcaacttcacgtcctcactcatggccacgctgatgtcctgcacctcctgctgacttgtcacctcccttcatcattgccccaaacgtttaaccaaggatccagactgtgggacagtctaaggaaaataggaacagactcttcaaaaacgccaataaagaattaaaacccaccaggtgatgtgtggctcagtaaggttctgaggttgcacagagcatgggactggctggctggatgggagggctatggctagcctggggctttccccaggtttctccaatgtacatagatgtccgtgtttgtcagcatacaggtgtgtgtgggtgacatggatatgtcatcgacaggaaggcacaacagcacccatgcagagatgtccttagactcagcaatgactgccgggtgcggtggctcacgtgtgtaatcccagccctgtgggaggattgactgataactgcaccagttcccccttccacaggctactgggcagctgagccctagccaggagtccgcagagacaggcaggcacatggagagaggagtgccaaggcccggctgagccatggaggtggggggcggggcggaacacgtgcgagtgctgtccatgagtggcccaggtgctgggagctaagcacattcgacggctgcgagtcaggagggcagctccttctggaagcctggagctggtgaggccaggtgctttccctgctgcggtggctggcgatgggagtgtttcctgaggctgccaccaagcccctcctcagcatgggttggtgcgggaagtccttgagtgcctgtgggtcggcaggagctccggtgagactcaagttcgctcaccccacggttctgaaaccggtctcccgcctttcctaccctcaggtttagggaccgtcgcggcagccctagggctgccagattctgcactcccattttaggatgaaagaaatcaggtctagactgagggccacgagtcccaacacccagggaggatccgtacaggggcggggggactgccccaaaccataaggtcaggaggtggacgctgaccacagggacaggtgggcagggaagaggctcagctgctggagtggaggaagccgggagggtcgggggagagcagggcaccgagctggggacgtgtcagggacgaagcgagggtgggcgagcgcggaccgctgggaccccggggctcagtgccgctcaccgggggtgaccgcgcgcccagccccggcccagcctggccccggcgagcccatccaagccgcgcttcccggaggcagaggacgaccgcgctttccgggtctggcgcgggctttggcggcccaagggcggggccggggcgccgtgggtggggaaagggcggggcctggcaggacccggaagtgcgctgcggccccgccccctggccgcgtggctgcgcgtcctggctgttgccgataaagttgtttgacgccggcccggcggcgggtcacgtgagcggaaaatggcggccccggcaggcggcggaggctccgcggtgtcggtgctggccccgaacggccggcgccacacggtgaaggtgacgccgagcaccgtg

SEQ ID NO: 19335 - DNA, 2300 bp, Homo sapien
caggctggagtacagtggcgtgatctcagctcactgcgagctctgcctcccggattcacgccattctcctgcctcagcctcccaaatatttaataactttttaaagaaggggaagcttgaccgaaagtgactataaatgtagaagaaacaataaacttgggaagccatgattttgcagctttacggtttaacactgaatctactcattaactgatgctaaaactgttgggcaaatggttattgggaaaacttgatgcttgtggtctcagagaatgacctcacgcatgccttaattactccacaaggagccacggaccttgaccatggaggaattcagcagacccaaagctgaccaagtggttcaacttcacgtcctcactcatggccacgctgatgtcctgcacctcctgctgacttgtcacctcccttcatcattgccccaaacgtttaaccaaggatccagactgtgggacagtctaaggaaaataggaacagactcttcaaaaacgccaataaagaattaaaacccaccaggtgatgtgtggctcagtaaggttctgaggttgcacagagcatgggactggctggctggatgggagggctatggctagcctggggctttccccaggtttctccaatgtacatagatgtccgtgtttgtcagcatacaggtgtgtgtgggtgacatggatatgtcatcgacaggaaggcacaacagcacccatgcagagatgtccttagactcagcaatgactgccgggtgcggtggctcacgtgtgtaatcccagccctgtgggaggattgactgataactgcaccagttcccccttccacaggctactgggcagctgagccctagccaggagtccgcagagacaggcaggcacatggagagaggagtgccaaggcccggctgagccatggaggtggggggcggggcggaacacgtgcgagtgctgtccatgagtggcccaggtgctgggagctaagcacattcgacggctgcgagtcaggagggcagctccttctggaagcctggagctggtgaggccaggtgctttccctgctgcggtggctggcgatgggagtgtttcctgaggctgccaccaagcccctcctcagcatgggttggtgcgggaagtccttgagtgcctgtgggtcggcaggagctccggtgagactcaagttcgctcaccccacggttctgaaaccggtctcccgcctttcctaccctcaggtttagggaccgtcgcggcagccctagggctgccagattctgcactcccattttaggatgaaagaaatcaggtctagactgagggccacgagtcccaacacccagggaggatccgtacaggggcggggggactgccccaaaccataaggtcaggaggtggacgctgaccacagggacaggtgggcagggaagaggctcagctgctggagtggaggaagccgggagggtcgggggagagcagggcaccgagctggggacgtgtcagggacgaagcgagggtgggcgagcgcggaccgctgggaccccggggctcagtgccgctcaccgggggtgaccgcgcgcccagccccggcccagcctggccccggcgagcccatccaagccgcgcttcccggaggcagaggacgaccgcgctttccgggtctggcgcgggctttggcggcccaagggcggggccggggcgccgtgggtggggaaagggcggggcctggcaggacccggaagtgcgctgcggccccgccccctggccgcgtggctgcgcgtcctggctgttgccgataaagttgtttgacgccggcccggcggcgggtcacgtgagcggaaaatggcggccccggcaggcggcggaggctccgcggtgtcggtgctggccccgaacggccggcgccacacggtgaaggtgacgccgagcaccgtgctgcttcaggtgcggccgcccgcccggggcggacgggtaggcgggcggggggcgctgcgccgaggccccgcccattgcggtcggcgtcccggtgttcgggggcggggcctcggcggccaatgagcggcctcctgagcggcggccccgccccctgctcgccgtcacctgcgcttccgctggggtcccgggggtcccgggggtcccgagtgggggcggggcggtggcgagccttcccaggggtgaggtagaacggcgccgcgtgtcacccgcatcgagtactcggcgcccggccgagcccagctcgcgagggcgccgggaagagggaggagtggagccctagacccgcgttcccattccggggcgtcc

SEQ ID NO: 19336 - DNA, 2300 bp, Homo sapien
cattttcattttattttattttatttatttttttgagacagtctcgcgctgtcacccaggctggagtacaatggcacgatctcggctcactgcaaccttcccctcccagttcaagtaatttttctgcctcagcctcccgagtagctgggattgattacaggtgtctgccacctgtaatttctgtgttctttgtagagaaggggttttgccatgttggtcaggctggtctcgcactcctgacctcaggtgatccacttgcatcggcctcccaaagtgctgggattacaggtgtgagcctctgtgcccagcctatttttatttttatttttattttttgagacagagtctcactctgttgcccaggctggagtgcggtggcatgatctcagctcactgcaacctccacctcccgggttcaagtgattctgctgcctcagcctcctgagtagctaagaggcgcctgccaccatgcccggctaatttttgtatttttagtagagatggggttttaccatgtttgtcaggctgatctcaaattcctgacctcaggtgatctgcctgctttggcctcccaaattgttaggattacaggcgtgagccaccgcgcccggcctgttttcatctttttaaaataactttttttttttcgagacagggtctgtctatgttgcctagcctggagtgtggtggtgcgatctctgctcactgcaacctccacctcctgggttcaagcgattttcgtgtctcagcctcctgaatagctgggattacaggtgcccgtttagtagagatggagttttcatcatgttgacaggctgctcttgaactcctgaccttaggtggtctgccggccttggcctccgaaagagctggcattacaggcgtgagccaccgtgcccagcctaaaataacttttcttggctgggtacagtggctcgcacctataatcacagcacttcgggagaccgagctgggaggatctcttgagcctaggggttttagaccagcctgggcaacataacgagaccccatctctacaaaggaaatttaaaaattagtagggcgtgatggtgtgtgcctgtagccccagctacttgggaggctgagacgggaggattgcctgagcctgagagatcaagactgcagtgagctgagattgcactgctgcactccagcctgggcaacagagcgagacgctgtctcaaaacagaaacatctctgctttgggccttccttgttggcctctccccagccatgtggccactcgctggcaggcccgggccatgagcatcggtgcggatgctgtgctcagcctgggggcggcgccgtctcctctgggtgggattcgaggcctgatgcctctgcctggtgcaggagggatgttgtgctgagggtgttccccgtgctttggatgtaaaatttgggcatggagtttgtggtgtcttcagaggcagtcccgcctgcgtcctttgtgcatgcctgtccacgccggtcgcagcggtctccccacagagcccgcgcccacgccctggcacagcctctcctgctgtgcacgtcccaggcctttgatggcgtccacgtgctccgccgcctgcctccgagggtggccggggcgctgagtaactcgggaggtttggcccgtgtctggcgtagtgattcattgaagctcagagcctccaggggaaactccacactccctctcaccggagccctggcggggcaggccgggccgagacggtgggagggagggaggccgggagggaaaaacacaaaccctcagagacgctggaaactctgaggttggggccacctccgaatgggttcacatttttcctctgtgtgtcatcacatcctggaaaattactgtcaagaaaaggagacctctgggcagtgtcccggcctgtgtgcatgcccctggcgccctcaccctgcagcccccagcctccctcccctcggtttcccagctcagcggcccagggatgccccagcactgtctgctgtgaggccgcgcgcccgcagggctgcccccggcatcccggacagcgtccctgtccttagtcctgcccgtcctttctggcctttctccggcccccttccagtttcggggcatctggataaatggttagcatcattgtggtccggtccttggcggccctcctggaggccgggacctgggggtccaccgggggcctgggtttgcaggagacaggaaggggctaaaggggcagaagcatgcaggggcttcacctgcaggaggagtcgggtctttcacagctgcccggccaccctcggagcctgag

SEQ ID NO: 19337 - DNA, 2300 bp, Homo sapien
gagaggccatcacacctttccctcatggtgccagctggaccctccacgctccttgcctccttgtgtgtcatgtggcagccacaggcacccccaccctgtggcgcattttgagcttctggggagctcagcacacacagcccctgtgaaagtgcagtgccggctgctggaccctgctgtgcccccggcatcacccctgtcctctgagacctctgactctgcccagcaagaggggcagggtcgggaagaagggagtgtggggcctttggaagccgggcccaggcagtgaggcggaaaccaggctgggctcagcatggcgagctcctcctggtgaaggcactggtgtccgggggcatcagcggcacagagaaggttctgggctccatctcctgaacctgtctggaagagcccagctgctcccatggacctgcgacctgctgcccggggccgggggtctgggcctctttgcatcggctcaggggaggccatccgtggctgggcgagggtcagctgccatttggatgccccggcagccgtggggctctcgcctctgccagagcaggcagcttccgaggtggcaagggctttggggagcagcgggaggcctgggggtgccgagtgttccggaaatattgctggttcttctggggcagtcctggcccgctgggcagagcagaacacggcctctgctcagtggcagggtggggcgccggggtggcggaaacatgaggccgcgtgaagtgggcatcagttgggccctggggtttggtctcggaggcctgcggggcagtggtcccccggctcttgctgccctgcggttcagttcctcctgctgcagcgcctgtgtgccccgtgggtcggcaggtctcgtgagaggcctcatctgagacaggaagccccacgcaggcttctggaaggctcctcctggctctcagccaccccgttggctgagtgagactgaccccagcagcttcctgaggcgtggcaaggcccccagggacacctggcggccacacacctgggggaccccaccaaggctgagacccaggttggggccccctgcactgctgaggtttgggcctcattccccgctggccctccgtctgcttgggagctttccaggtggggatgtttgtagggacagtggtatggcatccagttgcctcctccctgaaaccttcaacccgaacctcactcagcacagagaattgggggccagaccacggcggacggaggcgtcctgctgacacagcccctgtcgggatgtgggaaggggcggaggcacagctccagccccagcgtgaccgtgtgtgtgggaaaaccgtccgggtacttggggacagcagggacatttccagtgtgggtgtgtgagagccacctcccccatgcggtgggccctggtgtgatgctggcagctgggacaagagtccttctctcagcagatgctgctgtgctcctggggcacagtctgtggttttcttttgtgtgcatgtccatgcttgggtgttgtgtgcatgtccttgcgtgtgcgtgtccttgcgtgtgcacgtgtgtgcttgggggcgtgtgtgtgtccttgcgggtacacatgcgtgcttggggtgtgtgtgcatgtccttgtgggtgcacgtgtgtgcacgggtgtgtgtgtgtgcgtccttgcatgtgcacaggtgtgtgtgtgtgtgtgtgtccttgcgggtgcatgtgcatgcttggggggcgtgtgcgtgtccttgcgggtgcacgtgcgtgtttgggggtgtgtgtgtgtccttgcgggtgcacgtgtgcttgggtgcatgcaggtgtgtgtgtatatgcatgtctgtgtgtgcacatatgtgcatgcatgtttgccccagagcggaaggaaagtgaatgcagccgaatgatcacatctgcatgaggggtgttcactgttgtgtctgcccatctttctgtgggctgaaatatttcaaaataagaaattgaggggaaagagaaaggagggtgcttgtctctctccttgcctcctgctcctcctccctgtgttggaggctccaggacgcctcacccccggttgacgtcatttttggcctgcacaggcagcccgtttcttttctcctggcaccggcgaggaggctggggaggggggacgggaattcccccaggggccaggccttgactgccctgcagggccctcgctgtcgcttttttccctcacagtgtctcatccctcaacctctgttttccatccaaaggcatctctgtgaatccacctggcgcgggagcggcgctgatgccacaaatgcgggccagac

SEQ ID NO: 19338 - DNA, 2300 bp, Homo sapien
cccggctcttgctgccctgcggttcagttcctcctgctgcagcgcctgtgtgccccgtgggtcggcaggtctcgtgagaggcctcatctgagacaggaagccccacgcaggcttctggaaggctcctcctggctctcagccaccccgttggctgagtgagactgaccccagcagcttcctgaggcgtggcaaggcccccagggacacctggcggccacacacctgggggaccccaccaaggctgagacccaggttggggccccctgcactgctgaggtttgggcctcattccccgctggccctccgtctgcttgggagctttccaggtggggatgtttgtagggacagtggtatggcatccagttgcctcctccctgaaaccttcaacccgaacctcactcagcacagagaattgggggccagaccacggcggacggaggcgtcctgctgacacagcccctgtcgggatgtgggaaggggcggaggcacagctccagccccagcgtgaccgtgtgtgtgggaaaaccgtccgggtacttggggacagcagggacatttccagtgtgggtgtgtgagagccacctcccccatgcggtgggccctggtgtgatgctggcagctgggacaagagtccttctctcagcagatgctgctgtgctcctggggcacagtctgtggttttcttttgtgtgcatgtccatgcttgggtgttgtgtgcatgtccttgcgtgtgcgtgtccttgcgtgtgcacgtgtgtgcttgggggcgtgtgtgtgtccttgcgggtacacatgcgtgcttggggtgtgtgtgcatgtccttgtgggtgcacgtgtgtgcacgggtgtgtgtgtgtgcgtccttgcatgtgcacaggtgtgtgtgtgtgtgtgtgtccttgcgggtgcatgtgcatgcttggggggcgtgtgcgtgtccttgcgggtgcacgtgcgtgtttgggggtgtgtgtgtgtccttgcgggtgcacgtgtgcttgggtgcatgcaggtgtgtgtgtatatgcatgtctgtgtgtgcacatatgtgcatgcatgtttgccccagagcggaaggaaagtgaatgcagccgaatgatcacatctgcatgaggggtgttcactgttgtgtctgcccatctttctgtgggctgaaatatttcaaaataagaaattgaggggaaagagaaaggagggtgcttgtctctctccttgcctcctgctcctcctccctgtgttggaggctccaggacgcctcacccccggttgacgtcatttttggcctgcacaggcagcccgtttcttttctcctggcaccggcgaggaggctggggaggggggacgggaattcccccaggggccaggccttgactgccctgcagggccctcgctgtcgcttttttccctcacagtgtctcatccctcaacctctgttttccatccaaaggcatctctgtgaatccacctggcgcgggagcggcgctgatgccacaaatgcgggccagactgctgggcagagctcaccagtcaacagggctgggtgtggctggggcagccctgagaccccaggccctgccgctgtggctcccccttcctggcccctcttctctgtgggacagaaagtctctcctggggaaggctcggagctgagctgatgggtgtttgaagtttctccacacacagggtcccctggcatctccctctgtcatttggtggccaagtgacatttcccagcagccctactgcagacgccatatgttctcggggtgactcaggtggcctgggcccttctggtagccgcttatccagcctgaccccaggctccagcgaggctgctccggatcggggctgctctgcccaggtgaagggcgggtgtgggaggtttccgtagaggccgctctcccctgctaccacggccccgtgtgggaccctgggtctgtctgacagacagaggcttcctgagccaggcccttgggatgacgggtaggaatctagggtggatccacaggaattagagattttttcagttttgttttccaaatgaagtcaacagccccctagcagcgtgatgctgatggtcctgtcccctatggcccccatcctggaggcaccctggtgtgggctgtgggcctgggggtccttggcactgtccagtatgcggacgtggcagcagcccacatttcccccagtgaccaccaggctgtgccctggacgtggccgcctgagcacggcatgtcctggggccccgtctggtggtcaggctcagtacgagcccatcaggggtactctgcccgcctggg

SEQ ID NO: 19339 - DNA, 2300 bp, Homo sapien
gcccagtgccacctgctggtccttccagctgcttactgccagcagtaccagaaaggcaccagaaaaggtagagaaggcactatctccccacctgctccgggacccccaacactgctgccccaggccttggaaggaagaccacgccagagagtggcggatgccaggtctgcctcgacaatccatggggcttccccgtacatcggcagtggcctcggaaggcaggcccagcactggggcggttgtggagggtgcctaggacacagccagctttgccccatgacgtgggcgccacgccagggctacgggccccccactccccgtcattctcacgctcattctctgcaatgaccacaactccagctctggccagagcccctgggcctctagttgtcaggtgggcttgatagaacacatgacctcctggggtgtgtacccagtgccccgtctccggcagtggccttttggctactttaacctggtgttctcacaaccacccagtgaggtggcccaagcctcagtgactttctctttctgaattccggcaagaatcttcaactccaccaccagagttccccacaccgacaccccccgccccccacgcctgctgccttgggtgataaagaagggcctgattcaggagaaacagaattctccctgcttctacagggctgaagtcctccctccaggatgggttcacaagggcctgagaccctcccttcccaggccacagaggcccacgaggccctgctgacatcgaggaagctcggtgccccaaccttcaggtagagcagtagaaaggttcagaaaccactctgcctgcaccgatggggtcctctgcacatggcacccccagagagctccacttccaggaacagggaagagcagggcacgccctccagcctgggcggatcctggctcagacggcctaggtctgaccctagccctgctgagtcacttaacgcccccgtgcctcagtttctccactggcaggtggggttaatccctgtcaagtgtgtgtaacgtggagcaccgaagaaaccacgcgttcctagcccagtgctggcgcccaccggggagcaaacaaaagggaaaccactgtgcctggcggctggggtaggtcctgccggctcctcgggctggacgatctcactgtccccgtcctggggcctcatctccccttaacaaaagaccccaggctcagggcgcagggcggcggcccagctcctcctctctcttcgccggcttggactccgccgtgacggcgcccacccctgcctgtttctgcagaccctctccaccttcccgcagccccggctgctccacgccccctcctaccagctgcgagacaccagcccacgagggcgcggggcgcgcggcccggccggagatggagtctgagaacgggcccaacctcaaaggcacagggggcggcgcgggggctggcgtctggccctcacagtgtcacgcgtgaggtcgggacggagcgtccgcgcctgcctagcccctgccctccggccctcaccttccggaagccggatccagctcctgctccctccatgaccgcagcctcaacgcgcgcccaccggaaccccgccccgcgcctccagccaatgagaccggagcgcgcccccggagccccgccccgcgcccctagccaatgagtccgaagcgcctgctctcggagccccgcccccacgtctcagccaatgagcccggagcgcgccctccagcagcccctccctcacgtcccgcagccaatgaacttggaacgcgccctcccggggcaccaccctcacgaccctcagccaatgagcccggagcatgccctcccggggccccaccctcatgcccctagccaatgaacctggagcgcgctgccccctctcagcttgcggcccgaaaggcgcgccagttcctttgttctcattggcccgcaccaagcgctgcctgcgcagagcctgctaggagttgtagttcccgcggcctctcccggcgcgccttgttcttcctggatactgaggccccgacgcggctgtcgcgagggcgggggtcggggctgcaggcggggcagggctgggtgggggcgcgcgacgcacctgcctgcttcctgcacgggtggtccccaagcactgcggggccccagcccaaagcggaccttgactaccgcccagccccgcgctcccaggacctcccgcccgcggagcccactcggattgctctccgcccgggtcggcggaggccccgtctcctgtacccggcgctgggactgctccgcaccgcgcggctccctttcagcagct

SEQ ID NO: 19340 - DNA, 2300 bp, Homo sapien
gtgttcacctaggggactgcctagcccgtggggtccagggcttggggacgggtgtgggcttggggtctgatgggccggagcctctgcctacccctgccaacgtatgtgaaacatgggcacctggcaatggggaactcttgggctgcagaagcatgtgctcggggccaatcctcaaccacacagagacagggcctggggtcgggaccaccacccacctctgaatggacttgttctgttggaggagttttcccagagcctcggcccctgcagcccgaaggttgttgccctaggagagaaacaggccggtagtcactcgcgtgccctgactggctctgaattcccgcccatgccccaagggccttggtcagccaggggacaagcctggggtgcaccctgcagccttcctcagctcctgggctccctgtcttcagggggcttccaagggccggcttgtttgccaatgtgaactcttgctctggagatggtcacacacaggaggccatcagagagcggcctggggactcacagacagcttccagccacctgcccagaccccaggcccccgagacctggcatcttccacctctcctcttgcccttgggtggcacactcggacactcaagagtgcaggtatctcacctttaagtccagaaagcgcagcacggtgttggcacacaggcctcggagcagcagtgtggcccctgtgtaaggggggccggcggtcactctctgcccctgctgaccccaaggccctccccgtgggccccttttcagggcagctccctagacccaggaagggacaactgtcccgatggtctgggttggcgctggccaagagtctcgctgcgaagtcatgtttgaaacacctgcagcccctgccaggcaccaagccggctctgcacgcggggaaccaggtaagaccgcgaatgttaaggcctctcccccgtcatacagaggaactgccctctactcccaggtgcaggaaggggcgcccctgctcgctttaactacggcacagaaattggagagcctggagaggaagcgacctcgggctgccgaggcaatggtgtgggcagctaaggagcagagggatccaccccgccgcgcctgcccaccttcctcgctgagcatgcagtcactcaggaccagctccgtgcacagcgtctccctcggcagcagcttgcccagggccctgcaggtctccaccgtcaggctttgcgtggccaggtccagccggcccctgggaagctggtgcagctgctgcaggacagcctcctggggctcggccccactctccctgcacaggcggctgtaggagcgccggaactcctccatgacccgcggggccggcagggcctcctccgcatgctcccgcagctgctgaaagggagccgcgcggtgcggagcagtcccagcgccgggtacaggagacggggcctccgccgacccgggcggagagcaatccgagtgggctccgcgggcgggaggtcctgggagcgcggggctgggcggtagtcaaggtccgctttgggctggggccccgcagtgcttggggaccacccgtgcaggaagcaggcaggtgcgtcgcgcgcccccacccagccctgccccgcctgcagccccgacccccgccctcgcgacagccgcgtcggggcctcagtatccaggaagaacaaggcgcgccgggagaggccgcgggaactacaactcctagcaggctctgcgcaggcagcgcttggtgcgggccaatgagaacaaaggaactggcgcgcctttcgggccgcaagctgagagggggcagcgcgctccaggttcattggctaggggcatgagggtggggccccgggagggcatgctccgggctcattggctgagggtcgtgagggtggtgccccgggagggcgcgttccaagttcattggctgcgggacgtgagggaggggctgctggagggcgcgctccgggctcattggctgagacgtgggggcggggctccgagagcaggcgcttcggactcattggctaggggcgcggggcggggctccgggggcgcgctccggtctcattggctggaggcgcggggcggggttccggtgggcgcgcgttgaggctgcggtcatggagggagcaggagctggatccggcttccggaaggtgagggccggagggcaggggctaggcaggcgcggacgctccgtcccgacctcacgcgtgacactgtgagggccagacgccagcccccgcgccgccccctgtgcctttgaggttgggcccgttctcagactccatctccggccgggc

SEQ ID NO: 19341 - DNA, 2300 bp, Homo sapien
tgaaagcagcggcactcagcgagcgtggccaggctgaggaggagctgatcaaggccaagagccaggcccgcctggaggaggtgagccacacatgtccgccaccctccgggggagccaggctgcccggcattgcggcccgcatgcagactccagagcttcggtctgagtggggaggcgggagtgtggtgttgaggtcagatgagcacaccctggacactggtgggtccgcttcagccttggatcagggcctgagacggtggagaggtttggcccatctctgcagcctgtgactacacgcatggatggatgggaggggtggtgtgaccgaagagggaggaggagagcccagagggcatctggaggaggtggctgccaggggagcgggttcagagtcatagtaactagagcagccagtcctgcagagaggtggggtcgtgcccgtgcagacattccctcagctgagctcaggctgagcccctcatgcttcgtggcggcccctgtgctcacagcaacagcgcctggctcacctggaggacaagctgagactgctggcgcaggcacgggacgaggcgcagggcgcttgcctacagcagaagcaggtggtggccgaggcccagacccgggtcagccagctgggcctgcaagttgagggcctgcggcggcgcctggaagagctgcagcaggtaggcggggctccggtggggggccccgggcgtgctagcccccaaccctcgcctcactccccagccttcgtgcctggcaggagctgagcctcaaggaccaggaaagggtggccgaggtgagcagggtgcgcgtggagctgcaggagcagaacggccggctgcaggcggagctggcggctcaggaggcgctgagggagaaggcggcggccctggagcgccagctgaaaggtgagccagacccttgtcctcccgccgcccactggtgggacgtgaggccagccagagagcggggctggccaggtctcccgtgctgaggccgtgccacggtgcgctggggctgcgtccgctcactgcgctccttgccctgcagtgatggcgagcgaccaccgagaggcgctgctggacagggagagcgagaacgcgtctctccgggagaagctgcggctccgggaggcggagatcgcccgcatccgggacgaggaggcccagagggcgagcttcctgcagaacgccgtcctggcttacgtgcaggcgtcccccgtgaggaccctgagccccccaaagtgagacaggccgggaggacccgggcgcagtaggagtgcatcaggcggcgcccgagatggaccaggggctgcgtcccgcccgcgccgcctctttgagacccgggtcgtctgttccacgcggcggttgcggcgactgttggtggtgtcgcggctgcgggggaaccccgtgggaggcgcctgggaagggctccctaccggccccttcttcccggtcgacgccacgtgggagcacaccgggaaggggtcccgcgggcgcgtctccccctcgccttttgcgatgtcaccgtgaacgctgcggccgcctgcgcgcggcggggtttggaaatacagcgcgtttgcactttgtgatacattctggccccgcctctccctccaaacgcgcgaccgtccgtgcctctccaaacgcgcggccctctgcccccagccctgcagggagggcctgccggggtgcggctgttcgcccctcctcgccgctgccttgaagggacgggagggccgcgggggctgtccgtctgggggttcgggcggctgcagaccccggagttcccagctggctcccggcggcagggggcgggtccccgagaaagcgcagcgcgcggagccctccccgccgggtccaggtcgctgggctctctccggcctgcgctgcgccccgagggacccgtaggagacccccgggccggggtcgcgctggaggcgggggcgccgcagctcgcgcagctctgcccgggttcgggcggccccgccccgccagccgcgcggccgggcgccccccgcccgcccccgcccccgccccccgccccccgccggccgcgctcggctgtctccgcgcccggcgctcggcggcgctcggctgtctccggccgatcgctcggcgctcgggtccgcggccgctgcggcgccgggcatttctccgcagctcggctcgcggccgcgcccgccgccgcccggcccgcgcccatgcaggccatcaagtgcgtggtggtcggcgacgggtgagtgcgcggcccggaggccgcttggctgggctgggcgggaggggggctcgggggct

SEQ ID NO: 19342 - DNA, 2300 bp, Homo sapien
agatgatccaaaggccctacagtcaccaattccatactcctggccacagaaggtcactcctggccacagaagggcagtagttctagactttcctaccatgacccacagaacaaagtagcttttacatggaggcccagtgtgtgggtgcacacacacacgcatctgtaactgaccccaaagcctcgggaagcaatgctggtctttgctggaccaccatgtacttccatgaccccaatcccttcctatcctattcaacttctaaaaggtgcccctggccggatgctggctgtccaaggtgacctggggttcaagtccctttcagatgaatgtagggtacagccctatggggcttagcaggtcttctccccgtgtgcggagacacgagattgtgagaaataaagacacaagacaaagagataaagagagaacagctgggcccgggggaccactaccatcaagacacggagaccagtagtggccccgaatggctgggcgcactgatatttattgcatacaagacaaggagggcagggtaaggagggtgaatcttccaagtgattgacaaggtgaagcaagtcacgtgatcataggacagggggcgcttcccttttaggtagctgaaacagaaagagaagaccatacatcagcgctttcttctatgtacttataagaaagatcaaagactttaagactttcactatttcttctactgctatctactacgaacttcaaagaggaaccaggagtacgggaggaacatggaagtggacaagaaatgtgaccattaaatcatagcaccacagggagggggttaggcctccggatgactgcgggcaggcctggataacatccagcctcccacaagaagctggtggagcagagtgttccctgacgcctccaaggaaaggagactccccttcgcagtcttctaagtaacgggtggcttcccagacaacggcattactgcttgaccaaggagccctcaagcagcccttatgcgggagtgacagagggctcacctcttgccttctaggtcacttctcacaatgtccctaggttatattagtaatgcaacaaagagtaatattaaaagctaatgattaataatgtttatactaatgattgataattatccatgatcatgatcatttttatatctaatttgtattatgactatttttattttaactgttttttttttaaagatggagtcttgctctgtcgcccaggctggagtgcagtggcgcaatctcggctcactgcaagctccgcctcctgggttcgcgccattctcctgcctcagcctcctgagtagctgggactacaggtgcccgccaccgcgcccggctaattttttgtatttttagtagagatggggtttcaccgtgttagccaggatggtctcgatctcctgacctcgtgatccacccgcctcggcctcccaaagtgctgggattacaggcgtgagccaccgctcccggcctattttctttgttatactgaaacagtttgtgtcttcagtctcttgccttggcatctaggtaatccttcgcccacagatgaaagcggagctctgctgacattggtgtcttctccagacgtagttggttgtccaaattctttcccttggctttaaagtgagccggcggtgtcctgctcccaagcctgagagatgatgggcacaggcgacactttttaggacatgccgatgttttcagaaacaaaacaagaaatgttagccctgaaattctccatttcacgtgttcttcctgatattaaccacacattctttccgatattaaccaccacatcgtctttttgcaataatcttggcagggaaaaatatgctagccagggtccactacgtcgatttcaagcacggaagatgggtcacaccaggcacttcaaaagacccgtccctgaggcagcggagaccccgccccgccccggcgcgcccactcctttcggccaatcactgcagcggggagcagctatttgaatgtccccaccgcctatctgaaggccgccctgccattggccccgccgcgccccgcccatcgtggccagagcttcaagttccgcagccccagtgcggagggcggagactgcgccgacatggagctgttcctcgcgggccgccgggtgctggtcaccggggcaggcaaaggtgggcggcggggaaaggtgggcaaaggccggcggcgggcagaggcgggcaggggacgccttcactgagcccgctcccggcaggtatagggcgcggcacggtccaggcgctgcacgcgacgggcgcgcgggtg

SEQ ID NO: 19343 - DNA, 2300 bp, Homo sapien
ctgtgcagtcatccggcagccgcacctgctcagctgtgctcatgaagctgcccaggctggggggaggccggtcagcacctttcaggtctcagcctccgcctcccagcccgggcagctggacccccactcacctggcccatgggctcatcttgagggcaaggcctctgctgaggcagaacccggccccaccagtagcaaaccagaacttgaccgtggtcacctgaagatggggtggtggtcagagctgcccaggacagggcttctcacccctgactcttcatgggactccccaggcatctttcttaagctgccccttaggagatcccacccaggtaacagaagcttcttggagcaaaaagagccgggggcttctgcaggccattgacccgtagcctccagaccctccccacctggcccagacaccccctctctgcccagtacggtgagggcctcctggcctgctcctgaaacaccacatgcaaaccacctgggtggatcagcttgggcccccaaccctatgcccttctcaagccagctttccacgccctctgctgtgcctcccgggctggtgtcaaggaaggcgtctgctccgatggcgtctgctccgacactcacagttctgccaccctggaccctctcggtggcctcaatggggtggtccaggctgggccgccccaggtagacgtcctggctgggtgagaagctggagagcaggtgcaggaggctcctggcgttcacataattgtcatcatccacgtggcaaaaccacctgtgggcgaggggagtcctgggcacgagggcctggcatggctggacaggaggcccccacccagcttggctctgagctctctgcgggtcgggtcagcgccgcgtacttgcgcccggactcaatgaacttgtcatactccacggacatcttgcagcagagggcctgacgagtgcgcaccgccgagcagttggtgttgatgacacggtcgcctgcgaatcagagacgggaagcacgcacgtagaggatggcactggggttggggtaaggcctgtgccccacctgcccccaagggccagggcacaacgtggctgtctgacatgcctggacaccttgcctgggtccaaccacagccctagccctcacgcgctgaccctgctggtgccaccgaggctgaagcaggcggccatcggttgggatctcttgagtggaaacaggacggaggcagctcgccctgacctggcctggaagggcggattccctgctggcgcttcttcaggggacgtggcactagccccacgccccgggaagcggctagtgtgagaggctggtggggagcagagcttggctggcagggtgggccctccgcaggccgcgtgacctgggcagcgtcggggcctccccgggcctcgggagcctgggcagagaaaggcacccacagcagcgaaggggccgtggcttcggagcgagaaaggctcggggggcagatcccgcgggcgccggggagtgggggacactcaccgccctggagctcgagctcagggtcgtccccgtcggtgaagataaacgtctgggggagaaacaatctatgaggcttctggggcgctgcccaggccggagaccgacccgccccgcgcggagcctccgggggcctgggccgggcctagaccctgggaggcggggcgggtgggcgtggggctcgccgtcggggtcggggtccggcgcacctgctggcgggcccgggagatccaggtgcgcagcagcagccgcaggcgcggcccgtggttcttccgggtggtcttgacggcgatgaagacgtcgtcaggccgcaggctgggggcagcgggccgggacgggggcgcgcgcggggccggggcgggggtccgggccggggcgggcgcgcggggcagcggcagcggcagtaacagcagcgcggccagggccgcggccagcgcgaggcaggcccggcacagcgccccacgcgcgcggctcatgcggccgccgggacccccggcgctgcgagcggagaacctggccggagccgtgggtgggcggcggcccctttaagaacgcagcggccccgccccgccccgcgccccggaagcgacggcttcgctgccccggaagtggacggcacgccgcggcggggtgggtgcaagatgccgctgccggttcaggtgtttaacttgcaggtaacgagccgaggccgccccgggcctccgcgcccccgcgccccccgccactggggccgggctgaggtcgagcaggggcgcggggcctgcgccaggagtcggtcgggcacgctccgtgccgg

SEQ ID NO: 19344 - DNA, 2300 bp, Homo sapien
agacgcgccctcggccctgcagcccccgacgcgcgctgcccgcggaggcccggcacggagcgtgcccgaccgactcctggcgcaggccccgcgcccctgctcgacctcagcccggccccagtggcggggggcgcgggggcgcggaggcccggggcggcctcggctcgttacctgcaagttaaacacctgaaccggcagcggcatcttgcacccaccccgccgcggcgtgccgtccacttccggggcagcgaagccgtcgcttccggggcgcggggcggggcggggccgctgcgttcttaaaggggccgccgcccacccacggctccggccaggttctccgctcgcagcgccgggggtcccggcggccgcatgagccgcgcgcgtggggcgctgtgccgggcctgcctcgcgctggccgcggccctggccgcgctgctgttactgccgctgccgctgccccgcgcgcccgccccggcccggacccccgccccggccccgcgcgcgcccccgtcccggcccgctgcccccagcctgcggcctgacgacgtcttcatcgccgtcaagaccacccggaagaaccacgggccgcgcctgcggctgctgctgcgcacctggatctcccgggcccgccagcaggtgcgccggaccccgaccccgacggcgagccccacgcccacccgccccgcctcccagggtctaggcccggcccaggcccccggaggctccgcgcggggcgggtcggtctccggcctgggcagcgccccagaagcctcatagattgtttctcccccagacgtttatcttcaccgacggggacgaccctgagctcgagctccagggcggtgagtgtcccccactccccggcgcccgcgggatctgccccccgagcctttctcgctccgaagccacggccccttcgctgctgtgggtgcctttctctgcccaggctcccgaggcccggggaggccccgacgctgcccaggtcacgcggcctgcggagggcccaccctgccagccaagctctgctccccaccagcctctcacactagccgcttcccggggcgtggggctagtgccacgtcccctgaagaagcgccagcagggaatccgcccttccaggccaggtcagggcgagctgcctccgtcctgtttccactcaagagatcccaaccgatggccgcctgcttcagcctcggtggcaccagcagggtcagcgcgtgagggctagggctgtggttggacccaggcaaggtgtccaggcatgtcagacagccacgttgtgccctggcccttgggggcaggtggggcacaggccttaccccaaccccagtgccatcctctacgtgcgtgcttcccgtctctgattcgcaggcgaccgtgtcatcaacaccaactgctcggcggtgcgcactcgtcaggccctctgctgcaagatgtccgtggagtatgacaagttcattgagtccgggcgcaagtacgcggcgctgacccgacccgcagagagctcagagccaagctgggtgggggcctcctgtccagccatgccaggccctcgtgcccaggactcccctcgcccacaggtggttttgccacgtggatgatgacaattatgtgaacgccaggagcctcctgcacctgctctccagcttctcacccagccaggacgtctacctggggcggcccagcctggaccaccccattgaggccaccgagagggtccagggtggcagaactgtgagtgtcggagcagacgccatcggagcagacgccttccttgacaccagcccgggaggcacagcagagggcgtggaaagctggcttgagaagggcatagggttgggggcccaagctgatccacccaggtggtttgcatgtggtgtttcaggagcaggccaggaggccctcaccgtactgggcagagagggggtgtctgggccaggtggggagggtctggaggctacgggtcaatggcctgcagaagcccccggctctttttgctccaagaagcttctgttacctgggtgggatctcctaaggggcagcttaagaaagatgcctggggagtcccatgaagagtcaggggtgagaagccctgtcctgggcagctctgaccaccaccccatcttcaggtgaccacggtcaagttctggtttgctactggtggggccgggttctgcctcagcagaggccttgccctcaagatgagcccatgggccaggtgagtgggggtccagctgcccgggctgggaggcggaggctgagacctgaaaggtgctgaccggcctccccccagcctgggc

SEQ ID NO: 19345 - DNA, 2300 bp, Homo sapien
ctgactgctgtcccaggagctacgaagaccgctggggtgggcctggcgcaggagcctcaggagtgggaccctgcacccgggggctttcggggatagacacccactagtgactgctggtcgctaggctgagcggggaggagacctgccctggcttctccatgagcagcatctgaagctgagctacaagcctcatgtgagtgcgcaatcagaaacgctgatggtttcggggtcagaaaaagacgacagcgatcactgaggaggatcattctacctgctgtgcaggctgcagcggggagtgtgccctggacccctcagcaggactgagacacccaaggtccccccactgggctccgtaccaggctggggttctccaccacgtagttgacgtcaggtgcattctgcgggtcttcctgggggtccacgtcgatctgcatgggctccacggccccctgcaacatgggccaggcacctggcacctcgtcctggggactgccccaggagggcgagagacccgcactgttctctgaggtcagctctgcccaagatcttccaggccagtcggaccacactcccgccgctgctgtcccccaggtgtgccctcccagtcacccccgcccccacccaggctcctgtgccaccacatcagggaggggtctcctcacaagactctaaggctcagaagcagaaacccctcgcctgattctagccgctcatctctgaaagccagaaagcagacaggggacaaccaactacacaggggcctctgagggcccctacacgttcccagccaccatcctgatgtagtttcctccaagccacggagaagaacgggacgccacctcaaccccaggaggcaggaggaccagcccccggaatctgtcctgagcagcggagcagcaatactgggctgagagtcacgccacggagttgggagaaggggaaaagagtcatctcagggagcctcatggcccccagctgggagacacagagaagccaggacctcggcttaacacaaagcaggctggaaaagccgccatgccgggcactcgccggacccgtgggcctcccgcgctccttcgggaaaagcaccaagagctcggctccctccgcaggccccgggcccaccggggctccctcccctcctgcgcttggcactgagtccctgtcctcggccagcagagcagcaggggcccagccacagcaggggcggccggggccctgctcccccctccctcgctcgggggtccctgtcctggaaggtacctcgtagagcagcgtacaggccgacaggctggcgctcaggctgaagtccccggccgtgccgggcaggacgaggtctgacctactgctgtgaggggtgcagtacagatctgtcactgacgaggaggccgagctgggggccgagctatccctcattctgtcctgactttctgcaccccccgaccctgacacagagctggctggctgctgaagggagaaagagcgttagcgtcggggcggccgggaacctctcccgtgagctgctgggaggggaggcggggcgggcgcggcccggcggcccccgatcgcagcgcgcagccacggcggagacgcgccctcggccctgcagcccccgacgcgcgctgcccgcggaggcccggcacggagcgtgcccgaccgactcctggcgcaggccccgcgcccctgctcgacctcagcccggccccagtggcggggggcgcgggggcgcggaggcccggggcggcctcggctcgttacctgcaagttaaacacctgaaccggcagcggcatcttgcacccaccccgccgcggcgtgccgtccacttccggggcagcgaagccgtcgcttccggggcgcggggcggggcggggccgctgcgttcttaaaggggccgccgcccacccacggctccggccaggttctccgctcgcagcgccgggggtcccggcggccgcatgagccgcgcgcgtggggcgctgtgccgggcctgcctcgcgctggccgcggccctggccgcgctgctgttactgccgctgccgctgccccgcgcgcccgccccggcccggacccccgccccggccccgcgcgcgcccccgtcccggcccgctgcccccagcctgcggcctgacgacgtcttcatcgccgtcaagaccacccggaagaaccacgggccgcgcctgcggctgctgctgcgcacctggatctcccgggcccgccagcaggtgcgccggaccccgaccccgacggcgagccccacgcccacccgccccgcctcccagggtctaggcccggcccaggc

SEQ ID NO: 19346 - DNA, 2300 bp, Homo sapien
cacacagcaaacgctgcccgccgcgtggctccggaggagtctcgcgaggggcgcccctgtggcgtttcgggccagccgggccgcctggccgggtgcggagaaggaagctctgcccttcccctggcccggcgcggagccgattctcccgggaaggggccgggggtcctaacttcaccgccgggcggcctgctcagggccaggcccgcggggacgctggcgtcaaggtttcttcccccttcacgccagtcccctaccaggccgacatcgagtcccgctccccagggagggtcaagtcccaggggtccagcggctcccccgaggtccgctaggaggtggcggcactggagtggccgttctccagcctgcaccgacccccgcctttagtgcccccgcgtgtgacccaacggtggtactggagcggccttagaagggtgaccgctgcctctgagttgagtcttaagcccctcgttgggcctggctgaaccccgggtctgcgcctttcccccagcctggagacgatgccaaagctgcagggcttcgagttctggagccgcaccctgcgaggggcccgccacgtcgtggcccccatggtggaccagagcgagctggcctggaggctgctgagccggcgccacggggcacagctctgctacacgcccatgctgcatgcccaggtctttgtccgcgacgccaactaccggaaggagaacctgtactgcgaggtgtgccccgaggaccggcccctcatcgtgcaggtgcgcaggaggggctgtggccgcggccgcggttgggttcccggtcctggaatgcctggggaaaaacccttctctctgtggcgggacatcactttcagcctttccagagacagctcaattccaggaggagagggagaaggtggcaccaggcatgtagagtccacgtagccacagcagtgattcctgtggtggagccagggctgccaggtgcacctgccagaatccaaccccattctctaggagtggctcaggcagcctgggtgctgtgaggtttgcagccctgctggggcctctggattgctgcctctcacactcacactccctcttcagaaccagtggagatggctctgctcttcagaagtcagtgattgtggcttctgccacagttcagaagaaaatctgtaaatccgggtggcttggggactcctcccggctttgtcatattgtaagcctccgcaggacagagcaccctcctgcagtgaacctgggcccacaccctcatggggtcacactggacctctcgtagggctgggcagcaagggactagggcctggctgggcccgtggctgactcctgcatcttctccagttctgtgccaatgacccggaggtgtttgttcaggcggctctcctggctcaggattactgtgacgccattgacctgaacttgggctgcccacagatgatagccaagagaggtgagctccatgtggagcatgggggcacctggggcaggggccagagccagctcagtgcagccccaggtgtggtgagcttggaggacggcaggccctgcctctgtcgtgacagtggctcaggctggagccagctgtcctctgtgctccgcctctggagggtggctgtcctcaggccttgggggctaggggccgagccctactggctctctcttccctcagggagctccctctgcataaacatgattgctgatacagggtccccattacccccttgcactgctgtgtgtggggctgagcctgctacctcaccgggcccctgaggaggtgttacttggttccagaccgtgcagggtgggggttccattcagcaccttctgagcttaggcagctgggcaaatagagcccctgagtctgatgccgacaaaccactgctctgactgtcccactgccccaactggagacactgctggttctggggacctgtgtcccgcctgacagggcagctcctggcctgcgtggatgcaggaaagggtgcagagggggtgcaaggcttcggccccaccagccttaacacaggtgccagccaggccatgcttgctccttgcaggtcactatggcgcctttctgcaggacgagtgggacctgctccaaagaatgagtgagttggctgggtggatggtgaaggacccccagagaccctcaagagggacacatgggcactgtccacttggttggggctcaggagaggacaggcgttggcaggagttctcagcatcaccctggggcttcctgcccacagcagcctctctgctggaaggaggtggctgtgaagttgcctgtcctgcacc

SEQ ID NO: 19347 - DNA, 2300 bp, Homo sapien
agggagcttcctggtcacagataggtgatacacaaacggttacattgttttgagtttctgattagccttttttttttttcttttcctttttgatcagtcttgctctgtcgccaggctggagtacaatggcttgatctcggctcactgcaacctccgcctcccaggttcaagcgattctcctgcctcagcctcccgagtagctgggactacaggggcgcaccaccacacctggctaattttgtattttcagtagagacagggtttcaccgtgttggccaggctggtctcgaactcctggtctcaatgtgcgccaccgcgcccagccttctgatgagccttttcaaaggagtcagtcagatatccatctatctcagcgagcagagggtgactctgaatagagcgggaggcaggtttgccctgagcagcttccagcctgagttttccttagtgattccgggggcccaagagatttcacatgttttaggtactgaatgtcctggttcaacttcgggcttcgctctcagatatggaaagctctgacaaagctgctttttacatctgttgggtctcaaatgccttcagtttaaaataaccttcacatccactctggggttcccagtgggtccccacagctcgaaataacccaaggagggtccacggcgggtaggaaagtcgatcgaaggctggcggctgcggaaacccagggcgggcaaggaaggtccctggagggtgattttccgcaacgcagcggcggaaagtgagtggctttcagaggcggcaggtgagtgggttcgaggcagggctctggggccgctttaggatataacgggatgaagcccccaatgcgaacttgggggctgggcagcgcagggcctcagcgcccacggtctacccgcggcccgggccttatgtgcgcctcagcgaggcccaatttccacatgcctcgtttccagcgagctgtcggtgagtcccggcgagccccgacccctctctagccacggcctgacgggtacggtggtgacctcagcctctgacctccgaccccgcgccgcgacctctcgtcgccggtcccctcggagccgggcgcggtttccggggaacgcgtttcccgccgcaccgtgggccgcccggaccgcgcaggaccgggcaccttccggtggcggcgcggagccttgggcccggctgcggcccggcggcggccccggcgcggtgcgggcgttcgcggcgccccgggagctgcaggggccccgggcggcggcgaggccggagaggggcgggcccgggacaccggcacccggcgccctcggagccaaaggcgcgcggcggacacggcggggccctcgcgcggtgaggacgcggaggcgtgtgggctcctgtcacttcacacagcaaacgctgcccgccgcgtggctccggaggagtctcgcgaggggcgcccctgtggcgtttcgggccagccgggccgcctggccgggtgcggagaaggaagctctgcccttcccctggcccggcgcggagccgattctcccgggaaggggccgggggtcctaacttcaccgccgggcggcctgctcagggccaggcccgcggggacgctggcgtcaaggtttcttcccccttcacgccagtcccctaccaggccgacatcgagtcccgctccccagggagggtcaagtcccaggggtccagcggctcccccgaggtccgctaggaggtggcggcactggagtggccgttctccagcctgcaccgacccccgcctttagtgcccccgcgtgtgacccaacggtggtactggagcggccttagaagggtgaccgctgcctctgagttgagtcttaagcccctcgttgggcctggctgaaccccgggtctgcgcctttcccccagcctggagacgatgccaaagctgcagggcttcgagttctggagccgcaccctgcgaggggcccgccacgtcgtggcccccatggtggaccagagcgagctggcctggaggctgctgagccggcgccacggggcacagctctgctacacgcccatgctgcatgcccaggtctttgtccgcgacgccaactaccggaaggagaacctgtactgcgaggtgtgccccgaggaccggcccctcatcgtgcaggtgcgcaggaggggctgtggccgcggccgcggttgggttcccggtcctggaatgcctggggaaaaacccttctctctgtggcgggacatcactttcagcctttccagagacagctcaattccaggaggagagggagaaggtggcaccaggcatgtagagtcca

SEQ ID NO: 19348 - DNA, 2300 bp, Homo sapien
gtcccagctactcgggaggctgaggcaggagaatcgcttgaacctgggaggtggagcttgcagtgagcagagatcgtgccaccgccctccagcctgggtgacagagcgagactctgtcttaaaaaaaaaatcttttaccttttacaattactggttcgatactgtgcttaaatattctgaaccagtagggcctccagcctctgctgatggcgctgtgtgtgggttgtggctgcatttggaattcaggtagtttttacaatttggacttggcttttactttttgcttgtacaaagcctcacgttcagccagggcggtggacagctggggccctcgcctgtctttccttagtgtgcacccaaccttgcagtccaccagggacatctggccacctctgaagaccaccaaggctgttctatctgtgaatgcagaaaatctgagacaggtctcagttaatttagaaggtttattttgccaaggttgaggacatgcccatggcacagcctcaggaggtcctgacaacatgtgcctgaggtggttggggcacagcttggttttatacattttagggagacatgagacatcaatcaatatatgtaagatgaacatagcggctagctgcggtggctcacgcctgtaatcccagcactttgggaggccagcggatcacctgatgtcaggagttcgagaccagcctggccaacatggtgaaacccccatctctactaaaaatactaaaattagctgggtgtgttggtgggtgcctgtaatcccagttatttgggaagctgagggaggagaatcgcttgaacctgggagatggaggttgcagtgagccgagatcacgccaccgcactccagcctgggtcagaaagcgactccgtctcaaaaaaaaaaattggttcagtctggaaaggcgggacaatttaaagcaaaagccatcggggagggagcttcctggtcacagataggtgatacacaaacggttacattgttttgagtttctgattagccttttttttttttcttttcctttttgatcagtcttgctctgtcgccaggctggagtacaatggcttgatctcggctcactgcaacctccgcctcccaggttcaagcgattctcctgcctcagcctcccgagtagctgggactacaggggcgcaccaccacacctggctaattttgtattttcagtagagacagggtttcaccgtgttggccaggctggtctcgaactcctggtctcaatgtgcgccaccgcgcccagccttctgatgagccttttcaaaggagtcagtcagatatccatctatctcagcgagcagagggtgactctgaatagagcgggaggcaggtttgccctgagcagcttccagcctgagttttccttagtgattccgggggcccaagagatttcacatgttttaggtactgaatgtcctggttcaacttcgggcttcgctctcagatatggaaagctctgacaaagctgctttttacatctgttgggtctcaaatgccttcagtttaaaataaccttcacatccactctggggttcccagtgggtccccacagctcgaaataacccaaggagggtccacggcgggtaggaaagtcgatcgaaggctggcggctgcggaaacccagggcgggcaaggaaggtccctggagggtgattttccgcaacgcagcggcggaaagtgagtggctttcagaggcggcaggtgagtgggttcgaggcagggctctggggccgctttaggatataacgggatgaagcccccaatgcgaacttgggggctgggcagcgcagggcctcagcgcccacggtctacccgcggcccgggccttatgtgcgcctcagcgaggcccaatttccacatgcctcgtttccagcgagctgtcggtgagtcccggcgagccccgacccctctctagccacggcctgacgggtacggtggtgacctcagcctctgacctccgaccccgcgccgcgacctctcgtcgccggtcccctcggagccgggcgcggtttccggggaacgcgtttcccgccgcaccgtgggccgcccggaccgcgcaggaccgggcaccttccggtggcggcgcggagccttgggcccggctgcggcccggcggcggccccggcgcggtgcgggcgttcgcggcgccccgggagctgcaggggccccgggcggcggcgaggccggagaggggcgggcccgggacaccggcacccggcgccctcggagccaaaggcgcgcggcggacacggcggggccctcgcgcggtgaggac

SEQ ID NO: 19349 - DNA, 2300 bp, Homo sapien
tcctactggatgcgttcttcaacgagagcagtgctgactggcgggaggtgtgggcgcttgtgcaggccggcatccgggatggggtggtacggcccctcaagtgcacggtgttccatggggcccaggtggaggacgccttccgctacatggcccaagggaagcacattggcaaagtcgtcgtgcaggtgaggggaggagtcccggcgcctcgggcaccccaggctctggtccccaggcagtgcctgagccggtgggtgctgcttggacgcaggtgcttgcggaggagccggaggcagtgctgaagggggccaaacccaagctgatgtcggccatctccaagaccttctgcccggcccacaagagctacatcatcgctggtggtctgggtggcttcggcctggagttggcgcagtggctgatacagcgtggggtgcagaagctcgtgttgacttctcgctccgggatccggacaggtgagtcggcaggggtgcttgtggaccagcctgggccaggcacagccccgggcccctgagcccttctctgcagcccaccattgtgggctgtcacggtgcctggggtctgtccccctccatcttgtggggggcttgctggatggggctctgcggctgctccccacttccccagcccggcgtgtagggaagagaccgtaccctggcccagtccagcccacagtcctgtgtcccgcaggctaccaggccaagcaggtccgccggtggaggcgccagggcgtacaggtgcaggtgtccaccagcaacatcagctcactggagggggcccggggcctcattgccgaggcggcgcagcttgggcccgtgggcggcgtcttcaacctggccgtggtgagggaaggccccaaatggggccctcaaaagccccaagaccaagggggggaccctgggtggacgggtgaggccctggagctgcagggagtgctgaggatgcctcccccaggtcttgagagatggcttgctggagaaccagaccccagagttcttccaggacgtctgcaagcccaagtacagcggcaccctgaacctggacaggtgggtaccgcacagccctgctcccgcctctgccgggctctgggctcagggccgtgggagccaaggtggtttgttgacagccctctctggcgtttcctggggatgggacgttgggggctcctggggatgctggccaatggggagtgacacgcgtgcccacagggtgacccgagaggcgtgccctgagctggactactttgtggtcttctcctctgtgagctgcgggcgtggcaatgcgggacagagcaactacggctttgccaattccgccatggagcgtatctgtgagaaacgccggcacgaaggcctcccaggtgggccccaccctctcccctcgaccctgcccaccctgccctctcccagtggccactccccacccccaccttctccccgcagccctgcccaccccaccctctcccagtggccactccccaccccgacctccccgcagctctgcccacctgccccctcccccacaggcctggccgtgcagtggggcgccatcggcgacgtgggcattttggtggagacgatgagcaccaacgacacgatcgtcagtggcacgctgccccagcgcatggcgtcctgcctggaggtgctggacctcttcctgaaccagccccacatggtcctgagcagctttgtgctggctgagaaggctgcggcctatagggacagggacagccagcgggacctggtggaggccgtggcacacatcctgggtgagcactcccagtaggagccgcgccaggtgtttcccctgctggcatcagggtcttgggacatagcagtcgtgcccctgtgcgcctcagtttccccatctgcagagccagggtgcgggcgcaggtgtcactgtggtggtggtgctttgggagatgcacagcccacgcacccctgggtgtcagccctgccgcatacaggccgtccccatgccccctctggagttgccgacccggcgcatcccttccaggcatccgcgacttggctgctgtcaacctggacagctcactggcggacctgggcctggactcgctcatgagcgtggaggtgcgccagacgctggagcgtgagctcaacctggtgctgtccgtgcgcgaggtgcggcaactcacgctccggaaactgcaggagctgtcctcaaaggcggatgaggccagcggtgcgtgtgggtggccaggcgggagtggggtccccgggcctccccagcccttcctccttgttgtctggaccgtgtcc

SEQ ID NO: 19350 - DNA, 2300 bp, Homo sapien
gagcctcttctccagggtgtcgctgcgcctggtgggcctgaagaagtccttctacggctccacgctcttcctgtgccgccggcccaccccgcaggacagccccatcttcctgccggtggacgataccagcttccgctgggtggagtctctgaaggtcaggccctgccccacctccaggccccaccccacctcccaacttgccgagtgtggcctgaccctccccgacccgctgtagggcatcctggctgacgaagactcttcccggcctgtgtggctgaaggccatcaactgtgccacctcgggcgtggtgggcttggtgaactgtctccgccgagagcccggcgggaaccgcctccggtaggagcacggcccctcaccacttccccttccccaccagcctccccatccccagcctgagctccccgcctctgcccccaggtgtgtgctgctctccaacctcagcagcacctcccacgtcccggaggtggacccgggctccgcagaactgcagaaggtgttgcagggagacctggtgatgaacgtctaccgcgacggggcctggggggctttccgccacttcctgctggaggagggtgagcccccgacactgccctgcccctcccgggagactgcacccgaaggccccgcagcagccccacctccctgtttccctagacaagcctgaggagccgacggcacatgcctttgtgagcaccctcacccggggggacctgtcctccatccgctgggtctgctcctcgctgcgccatgcccagcccacctgccctggcgcccagctctgcacggtctactacgcctccctcaacttccgcgacatcatgctggccactggcaagctgtcccctgatgccatcccaggtatgggtggcatggggccgtgggagtggactgggccggggagcagagaccccagcagctaggacctgcctgggagcccctcgggagggaagggcaggcggtgaggggctcagtgccgtctcccccagggaagtggacctcccaggacagcctgctaggtatggagttctcgggccgagacgccagcggcaagcgtgtgatgggactggtgcctgccaagggcctggccacctctgtcctgctgtcaccggacttcctctgggatgtgccttccaactggtgagtgtgtcgagggtgtgagcctgggccccacgtggatggcggccaggcctgtgctgacccacctgctgcatccccaggacgctggaggaggcggcctcggtgcctgtcgtctacagcacggcctactacgcgctggtggtgcgtgggcgggtgcgccccggggagacgctgctcatccactcgggctcgggcggcgtgggccaggccgccatcgccatcgccctcagtctgggctgccgcgtcttcaccaccgtgggtaaggccccgcccccggtgcctcccgctgccctcctggccccgccgccctggctcaccagccgcgcttcctctcttcaccagggtcggctgagaagcgggcgtacctccaggccaggttcccccagctcgacagcaccagcttcgccaactcccgggacacatccttcgagcagcatgtgctgtggcacacgggcgggaagggtgagtggcccccacagcccccacctgcctcctgcctagcctccggcccagggagaagcagggtctggccctctggactgtggtggctgggcttgcagtgggtgtgattgtctggcccctctggccccctaggcgttgacctggtcttgaactccttggcggaagagaagctgcaggccagcgtgaggtgcttggctacgcacggtcgcttcctggaaattggcaaattcgacctttctcagaaccacccgctcggtgaggccggcagcgcctgggcgggggtgggcatggatgggtgtgggtggacctgtggaaggccctgggtgagcacggcccctgcccgcaggcatggctatcttcctgaagaacgtgacattccacggggtcctactggatgcgttcttcaacgagagcagtgctgactggcgggaggtgtgggcgcttgtgcaggccggcatccgggatggggtggtacggcccctcaagtgcacggtgttccatggggcccaggtggaggacgccttccgctacatggcccaagggaagcacattggcaaagtcgtcgtgcaggtgaggggaggagtcccggcgcctcgggcaccccaggctctggtccccaggcagtgcctgagccggtgggtgctgcttggacgcaggtgcttgcggaggagccggaggca

SEQ ID NO: 19351 - DNA, 2300 bp, Homo sapien
gacagagtgggtctgagagcccatgccaggcagatgccctggggctttgggaacaccaggcctgcctccctccctccccagggctggtgcaggcactgcagaccaaggtgacccagcaggggctgaagatggtggtgcccggactggatggggcccagatcccccgggacccctcacagcaggaactgccccggctgttgtcggctgcctgcaggcttcagctcaacgggaacctgcagctggagctggcgcaggtgctggcccaggagaggcccaagctgccagaggaccctctgctcagcggcctcctggactccccggcactcaaggcctgcctggacactgccgtggagaacatgcccagcctgaagatgaaggtggtggaggtgggtgcctcctgggcagccaggcctctgccccggacatggtaggacccaccctgacatcagttgcaggagacagcacagacacggggcgggccctgggcggtgggtggggccggccagttccctgtgtggttctgtgcacgtgtcctgtgcggtccacacagccaccgtggagggtccgcccgtgggctccaagaggtgcagcctaggcaggaccccagggacaagaccagtggcatccatgcgtgcccatggctggcaccgtcatcaggttgacggggaagcctttctgccagactgaggcctcatggacattttgcccagccccaggtcaggggcacctgcctggtgtggggctgattccagaattcaccccctacaggtgctggctggccacggtcacctgtattcccgcatcccaggcctgctcagcccccatcccctgctgcagctgagctacacggccaccgaccgccacccccaggccctggaggctgcccaggccgagctgcagcagcacgacgttgcccagggccagtgggatcccgcagaccctgcccccagcgccctgggcagcgccgacctcctggtgtgcaactgtgctgtggctgccctcggggacccggcctcagctctcagcaacatggtggctgccctgagagaagggggctttctgctcctgcacacactgctccgggggcaccccctcggggacatcgtggccttcctcacctccactgagccgcagtatggccagggcatcctgagccaggtgcggccgccgggcagggggacagggtgggggccgggtgagggccaggcgggcagggtgctgaccaccgcccccacaggacgcgtgggagagcctcttctccagggtgtcgctgcgcctggtgggcctgaagaagtccttctacggctccacgctcttcctgtgccgccggcccaccccgcaggacagccccatcttcctgccggtggacgataccagcttccgctgggtggagtctctgaaggtcaggccctgccccacctccaggccccaccccacctcccaacttgccgagtgtggcctgaccctccccgacccgctgtagggcatcctggctgacgaagactcttcccggcctgtgtggctgaaggccatcaactgtgccacctcgggcgtggtgggcttggtgaactgtctccgccgagagcccggcgggaaccgcctccggtaggagcacggcccctcaccacttccccttccccaccagcctccccatccccagcctgagctccccgcctctgcccccaggtgtgtgctgctctccaacctcagcagcacctcccacgtcccggaggtggacccgggctccgcagaactgcagaaggtgttgcagggagacctggtgatgaacgtctaccgcgacggggcctggggggctttccgccacttcctgctggaggagggtgagcccccgacactgccctgcccctcccgggagactgcacccgaaggccccgcagcagccccacctccctgtttccctagacaagcctgaggagccgacggcacatgcctttgtgagcaccctcacccggggggacctgtcctccatccgctgggtctgctcctcgctgcgccatgcccagcccacctgccctggcgcccagctctgcacggtctactacgcctccctcaacttccgcgacatcatgctggccactggcaagctgtcccctgatgccatcccaggtatgggtggcatggggccgtgggagtggactgggccggggagcagagaccccagcagctaggacctgcctgggagcccctcgggagggaagggcaggcggtgaggggctcagtgccgtctcccccagggaagtggacctcccaggacagcctgctaggtatggagttctcgg

SEQ ID NO: 19352 - DNA, 2300 bp, Homo sapien
cttcatggaggccatcgcacccccactgctgcaggagctcaagaaggtggactaatacggcctggggggtgcggggcgggccaggggacccacaacccagcactgacctggcccctcatgcaggtgatccgggagccgaagccacgttcagcccgctggctcagcacctctatccccgaggcccagtggcacagcagcctggcacgcacgtcctccgccgagtacaatgtcaacaacctggtgagccctgtgctgttccaggaggccctgtggcacgtgcctgagcacgcggtggtgctggagatcgcgccccacgccctgctgcaggtaggcccagcctgggggcagcaggcgccgggagcctgggatgggcgcctcagctgagcaccaagagagcccacctgccctgccgcccccaggctgtcctgaagcgtggcctgaagccgagctgcaccatcatccccctgatgaagaaggatcacagggacaacctggagttcttcctggccggcatcggcaggctgcacctctcagggtgggtcccttcccagcccgggtctcgtctcccggagtcggggacggcgtggggtgggtgagcggggctgcgggcccctcactgacccaggccggtggcagcagccctggatggtccaccgcaggcagtgggtgggctgaacccagagcccctggaccccggtgacgggtgtgctacccatgcctcccttctccgtagcatcgacgccaaccccaatgccttgttcccacctgtggagttcccagctccccgaggaactcccctcatctccccactcatcaagtgggaccacagcctggcctgggacgtgccggccgccgaggacttccccaacggttcaggttccccctcagccgccatctacaacatcggtgagcaggggcccggcgggtgggcagactcttccctccccacagacgcccgctctgtgctgaggcctgtgccctcccgcagacaccagctccgagtctcctgaccactacctggtggaccacaccctcgacggtcgcgtcctcttccccgccactggctacctgagcatagtgtggaagacgctggcccgcgccctgggcctgggcgtcgagcagctgcctgtggtgtttgaggatgtggtgctgcaccaggccaccatcctgcccaagactggtgaggggtaccccaggaccaaggcgggggtagctggggggcgggtgctgccctctgatctccaactctcccgctctgcagggacagtgtccctggaggtacggctcctggaggcctcccgtgccttcgaggtgtcagagaacggcaacctggtagtgagtggtaagcagggccggtggcacgggagctgcggaggctgtgcccgctggccatgccgcccgtcctcaggcccttccgcacctccctttccacagggaaggtgtaccagtgggatgaccctgaccccaggctcttcgaccacccggaaagccccacccccaaccccacggagcccctcttcctggcccaggctgaagtttacaaggagctgcgtctgcgtggctacgactacggccctcatttccagggcatcctggaggccagcctggaaggtgggtactgactacactgctgcccaagccaccggggagggcggtcgtcattgtggggaccacagagggcacccacagctaggcatgcagcttgggagggagcagaggggcccggtgggctctgggaggtggccccagggacctgggagttccacagcaccaaccaggccctgtgtgcaggtgactcggggaggctgctgtggaaggataactgggtgagcttcatggacaccatgctgcagatgtccatcctgggctcggccaagcacggcctgtacctgcccacccgtgtcaccgccatccacatcgaccctgccacccacaggcagaagctgtacacactgcaggacaaggcccaaggtagccccgccccagccccagcccagtgcccccacccaagtatgccgcactcacccagcctgtccccacagtggctgacgtggtggtgagcaggtggctgagggtcacagtggccggaggcgtccacatctccgggctccacactgagtcggccccgcggcggcagcaggagcagcaggtgcccatcctggagaagttttgcttcactccccacacggaggaggggtgcctgtctgagcgcgctgccctgcaggaggagctgcaactgtgcaagggtgaggtcccagccctgctggcttcggacacctctggcgatgaggagcgatcgc

SEQ ID NO: 19353 - DNA, 2300 bp, Homo sapien
ttggggatgggctggaggctctcagtgctctgtggtctcccacacatgtcccctggaatcgagtcacggccctgtgaggtttttttgtttgtttctttttttgagacagagtcttgctctgtcgcccaggctggaatgcagtggtgcaatctcggctcactgcaacctctgcctcctgggttcaagctattctccagcctcagcctcccgagtagctgggactagaggcacgcgccaccacacccggctaatgtttgtatttttagtagagacggagtttccctgtttcccaggcttgtctacaactcttgacctcgtgatttgcccgccttggcctcccaaagtgctgggattacaggcgtgagccaccaagcccggccgctgccgctcactttctgtggaagccctcagggtgctggacgagtctccaacctccttgggagccagccagggctcccctgtagctggcccagccctcgacaggctgcagagagcagggccccgctggccgctgatcaccagcactggcagccagggccacctgggaggtttggagcatggagagccggagctgcgtgcccgcacgcctgaggctgacacagggcctcaccctgaatcagaagaacccccgcagtggggacagcagtgcggggccagccccggccctgtcttcccttgtccttccttgaccctcggtcccaccgtgcgtcaaccacagccccagaagggaaaagacgcggagtggccgcctgaccctcaggcctgctctcaggagaggaaggaagcgggacacctgcagaggggccgggggccccagtctccggttccccttcagcggcccgggcttgctgagccctcaaagtaggacacgcagccagagacacctgtggcctcacaaggcccgcttgccccccatggggtgcctggccccgcaagcgcgaagcggtcagaaaagggaggccgcgcttcagggctcaggccgcccaaggggccacgattcgaggaatcactcgggagggagggagcgcgcgagggccgggctgagcccccgcccgtgggtgcgcgcctggaaaactcgcagcctccgccctgggaagtggggcagcggctccctttgtccgcaccacaccaggtgggtgtcccggccgactccgctcgccacgtggccgcgcccctcccctccgccgagctccagcggcctggagtgcgctcgcccgttcggccctgcgcctcgtccgggtccccgggaagctgctaaggaggggccgtcgggtgggtggacgtccgtctcgggtctgggttccccgccgcacccgcgaggaaaaccggggatgcgctgcgatgaccggcagtaaccccggccggggcgcccgcggccggggtcaacgcccgcacttgcgccgcggcccgcgaggcatccgggaccgccccgccgcccgcccatcaccctatcgcctagcaacgcccacccgcgcgccgccattgggccggtgcgaacacccctggcgcccgattggttgctgctgccgccgcgccgcgcaacgccgcgccctcagccagctccgcgcgggcagcgacggcggcgtggagtcggcggccgaagtgcgggcacgcgggtccgtccgtccttccgcgcgcctgtgggtccgagcgccccgccgcagccggctggacccccggtgtggccacggggtagtccccagtgtggcccaagcattcccatcccgcacacgtggccccggcggacacgggggtcggggatggctcgggaggcgcgccgcgggctcggtcgcagccgcgtgcgcgtcggggcccgcggggcgggaggcggaagtcggggggcggtggtttcccgcccgccccgcccccggcgctcctcagtcccagccccacccccccaggcgcgttcccgcgcagggtcccggctcgggcggcggcgcgcacgagcatcaccccaccggcggcggcgcgccgggtcccggggcgcagccccgacgctcattggcctgggcggcgcagccaagctgtcagcccatgtggcgtggccgcccggggatggccgcggtttaaatagcgtcggcgccggcctagagggagccagagagacggcagcggccccggcctccctctccgccgcgcttcagcctcccgctccgccgcgctccagcctcgctctccgccgcccgcaccgccgcccgcgccctcaccaggtacgagcagccggcgctggggccggggcgcgggtcgtggtcggggctgggcccggggttcccggggtggcccggctcctcatcctccgc

SEQ ID NO: 19354 - DNA, 2300 bp, Homo sapien
ggtgaagacattcctgaatatgtctcaggctgtagaaatcttattttgtggaaagattttagagaatcatcaaaataaacttttaccaaataacattttaccagaaactgaatccgagagaagtagaatcgttcactccctgccccccaggtcactgtgtgcagaatcacgtgactaggacatgggccctgtgatccatgccctccttcctttgcctgtggggtcaacagcaagaaggcccctcagtgcccctcaagcctggcaccagccgcagggcctggtgtaactttgcagggagaggggactgcttttgaagacggaattttctcttaaatctctaagtgttttgaggtttgcaaaatctgttttcgggattgttctttcttcagttaaaataacaaaataacccagtgtgttcctgtagaggatccagggttttagaaccggacttgcgagtctcacctgcctggcccctctcccccagccccaggccatctgcaatctgttttaccagcacaggcctcccttcctctccctctgccttggcctctcccacacccaagagcccattcctgtctattctcccagggtggtgagtgagcctctgcaccacacttgccaagggtgctcacggagcaggcatgaggcccgcttactggaggaagcgagtctggactcgggctcaggcctgtggcgagccttcatgggggctgccctgcacccgtcctcagctggggcctgcggcaccatagaactttctctgtccaagaggaaagcagacatctctccccttcgatgtgtcatcccccgcggcccccgagcgtcccacatgaacctgcggcacatgcccggaggcactgcatacagtggctgcaccccaggccatccaaagaacagcagcacctggaaggcagcagcacctgccagccctggaaaggcacaccaggaagctggcggggacagggtgtgctggcctgttccaggaactcggagctcatgtggccagggccaggtgcagcctggctccttacaggggccaggagtggcacgggagaagtaggtcgtcggctcccgtcttgccagggcctggacactactgctttttcctgtgcccccatttttggtccaggcatccctttgtgttgggattgcactctgtagcactggaatgatgtgggctgcaagtccaggttgggctgagtgaggacaacacagtgcttcccaggggctcagatctagggttgacccaggcttggggtgctaagggggagcccagccagctcctgcccctgtgtcggcctcctccctctccactgcctttgtgctccccctgcacctgcttcaggagggaagccacagccggcctgcagggtggttgtggggtgtccagctggcaggtagagaaaggagggaccccaaggagtggaggagggccaagccacgctggcgggagctgtcctcctgggtcctgggcactgctagaggccacagccttctctctgctctccctgggccgccttcctgggtcctgggcactgctggaggccacagccttctctctgctctccctggggagctgctgtgctggttgggtgtcctcagattctccttgtgttcacttgaaagacacaaaggcatagatgaccagaaggcagggatggcggggaggaggcggagggctgtgagggcctgggagatctgggggccaccctggcctgggagatctgtgggcctttattctatttgtggaagagaaggaacccactgaagcactgggagcagcgactctttttgtctttcttttggaaggatgtcacccagtgacagccagcagtgcccaccctggaagagcaggtgaagaggctccttgggtgggcacccctggcgtcctcccatgagggcagcctcacaggggtgtctgcctgtgagttttgttacagggcctcaccaagagagggcctatggaggccgaggaccagggggagcttttcctgcacctccggtcagtggcacgtgccccccagaccttatctatgcaccgactccagagaaagctgaaggaggcagccagaaaaatcatcagcctccgcctggagaaagagcagctcatcgagatggggaacaggctccgtgcagagctgggccgacccgaaagtgagtccgggaagtggaggccatggcctgagtgtgggtcaggttctgggtgtgcacctggttctgggtgtgcgccaggttctggatgtgggtcagattctgggggtgcaccaggttctggatgtgggtcagattctgggggtgcg

SEQ ID NO: 19355 - DNA, 2300 bp, Homo sapien
tatgcccggctaattttttgtattttagtagagacggggtttcaccacattggccaagatggtctccatctcctgactttgtgatccccctgcctcggcctcccaaagtgctgggattacaggtgtgagccaccgcccccggcctctttttctttttttgagacagggtcttactctgttgtctaggctggagtgcagtggtgcgatcacggcttgctgtagccttgacctcatgggctcaagtgatcctcccgcctcagcctccgcagtagctggaaccacaggtgtgcaccaccatgctcagctaatttttgtattttttgtagaaacgaggtttctccatgttgcctaaactggtttccaactcctggacccaagtgatcctcccacactgacctcccaaagtgctgggattataggcatgagccaccaccgatagagaattctctgacaaattgtatttctgtttaagggggaaatggctcttagaactacacagtaccaggaagttaagggcttattcaggatagtttctctagattcagcatgctgtgttgttgtttgatcagtcagattcaagcagagtggttgaagacgccatgcatgggaggcacctaaagcctctgcggtcggtgtgcggggcgacctctgtggtcggtatacggggtgagaggggccgcaggtgcttccattttccatgtagtgcggccgaggtgactgggcgtcaccactcctgtgcgcctaaccttggccccccgttgcagtcttaagctaaatgttgttcttgaatgtcttttcgttttctgtccgtaaatactctttgctcattgagaattattactacacatatgcagtattattttggtagtaagaaacagacttctacattctaaagcttgtatctttcctcttttacttctggggagttcagctatcattcggatcccatgatcccaagtatgagctggcattaaatgatgacctcggctaggcacagtggctcacacctctaatcccagcactttgggaggctgaggcaggaggatcacttgagcctgggcaacgaaacaagaccctatgtctacccaaagaaaagttagacaggtacggtggtgctcacctatagtcctagctactcaggaggcagagcaagactctgtctctaaaaaaataattttttaactaaaaaaatagaaataagtgacagccatatttatttcagttcctttttttctttcttaaaatgaagtagagatggggtctccccatgttgcccaggatggtctcaaactcctggacttaagtgatcctcccatctcagcctcccaaagtgctgggattataggcatgagccaccgtgcctggccagctttgtagttcttaataggtttttcagcagttttgtgctggtttggagtttggaactacagagaaaacctgtaggattaacaggaaagcatttttttcttcctttttttttttgtgacaaggtctcactctgtcacccaggctggagtgcagtggcgtgatctcggttcactgcagcctacacctcctgggctcaggtgatccacccccctcagcctcccaggtagctgggactacaggtgcgtgccaccacacccggctaatttttgtattttgagtagagacagggtttagtcatgttgcccaggctggtttcgagctctgggacctcaagcagtctgcctgcctcggcctcccaaagtgctggcattacaggcatgagccaccatgcccagccttcttttttattttaaccatcccattacgcagaagaaagagaagactggaaagcagcagtgcgatcatggctcactggagcctcgacctcctgggctcaggtgatccttccaccttggcttctcacaaaaagcatttacgctcttgtggtgagcagtgcactcccgctcgtggccgtggtgtcctctgtccctgcagtgagggctcagcagccgtgcccattgatctacacctgagactgtgcatcaggggagactgtccaggaggccccaggcagagtcacatcaccatcctgatgctgggagtggggctggccctcataattaggtggctcatggtccagggataaagctgcttcccagagcaccagaggccgttggtgagtctgtttcttcagtacccacgcaaagcgtggaaggagtccaaacacacattctgtgtcagcccacattgccagagatggctggaaacgttgatgcctttgatggtgtctcttttcagctgtcctaaaatatgtgtccaaaactgttggcagg

SEQ ID NO: 19356 - DNA, 2300 bp, Homo sapien
accacaggcatgtgccatcacacccggttaatttaaaaaaattttttttggccaggcatgatgactcacacctgtaatcacagcactttgggaggccgaggcaggcagatcacttgaggtcaggagtttgagaccagcctggccaacatggcaaaaccccatctctactaaaaatacaaaattagctgggcatggtggcaagtgcctgtaatcccagttactcaggaagctgaggcaggagaatcgcttgaacctgggaggcggaggctgcagtgagctgagatcacgccgctgaactacagcctgggcaacagagcgagaccctgtctcccgagctcaaaggatcctccctttggcctcccaaggtgctgggttcacaggtgtgagcactgtgcccggcccacacatgggttcccatagatcccactttacaggcagggacactgaggcatgcagagccgggatacagaccaagcaagtcctggctcctcttctgggtgtcccagcccgtctcggacacccacgcttacccaggcctggtggctgcatcgtggacatgggggcaaggcagctctctgggtgggcagaggcaggagctgaggcaaggatgtgggcatccttttgggtacatctagtcctagagctgatccaggggccagtcaaatgtgcagccaaagtcgggtcaaccccagcactgtcctgtgggtgggggtagcagggagccaacagtccaggccctacatcctgttctaatagagtgacaagtctgatgaggctgggggtgcacaagcactgagaaggcagcaggacagggagccaaacacatggggtggtgggggaaaccagggagctggacacagggtgggggggtcctgggagttggacacatgggccaggttgggggtccagggagctagacacagggggtggggaggggagtccaggggactagacacagagtggggggtgggtccagggggctagacacacagtgtggggggtgggtccagggagccggacatacacatggggtggggagggggcatccagggaaccaagtctaggcagaggcaactggcgcaaaggacctgaggcagaagagggtttggtgtgtgaggcgggactgaggactgtgggcgagggagacagctctaccaggacgcatggttcggggaggacaggctgcagggtgcctgggctgcaggcacggcacggagaggagtgatccagtgttaacaatgtgggtggaggatgacaccagacccctggcttattgccccaccaggggaattcccagacaccaaacaccccctccactcccacgcagaattgcgggctgagggttcgggtgagccaggctgctctgtcccggggccgggctctgttcatccatccgcagatggatacggacacgtgcctttttctgaggatgtgaatggttgggaatggctgtgcctgaggatgttgttcccacaggatggtgggggcgacttcgggcctcggtgggtcccgacccccctccttcccccagttccctaatcagggtctgagcgaccgcgcgcacggcccctgggccccgccggtctccgagcccgtgggcagcgccgggaactcgtgccccggtggccgcagccgacccttaggcaggacttcgtggcgcccccggcccgaacagacccccacgggcagcctcggccgccccgtgctcccttcatctcagggcaaaagctcaagtcaacccttcgggaccgcgagccgggcggcctcaggaagcgggcgcctggggaccctcggccgggccgggggcggcgaaggtgggggcgcctcgcgcggcggaacccgccgtccccatagcccggagccccgtccggagtcgccccgctgaccggtgaggaggccgggctccctccttcgatctgcggcggtggtcgggtcggccggggcgcccctcggacccgggcgcagcgcggaacccggcggggcgggaggggccggaacctagcgccagggaccccgtttcctgtcggcgggacccgagcgctgcaccgagcgcagccggacgcggccgactgacccggtcgctgtggcaacgcggcgggacctggccagcgctgctggcgggcgttagggtgaggtgcgggcgggcggcgtgggaggcgtgggaggcgtggggggcgccgctccgaccactcttcctgtagaaaaccccagcagctgccgtcctgtcggacgcagcgctttggtggggacctggagcgcgaggtcgaccctcagagctcggccaggcccggaccggggat

SEQ ID NO: 19357 - DNA, 2300 bp, Homo sapien
gaccactctgtggtcttccagtccccccagtcaaagcccacagacttgacctctctgctgggagccagtgctgactggcctgcctgctcccctcccctctgagggcagggaggctccaccccagctctgggtggacagtcctggggcccacacccaggggaagccatgcctaagagggggccaggcctgggggtcagaaccaaaccacaggtgctccctgggacccctggagggatgactgggcgtcttcccagctgggagaaaacctggccctggcaggggcgcccctttgtccttcaggaggcaggagggggcagtgaggtcccaggctctctggctctgtctccctccccctgttgctgctctacggtgggggttcagggttcagggatcagggccaagctgtaggcagatgtggaaggtgtctcggtggcttcagtgggggccccaagcccagctggcaggcctggtgactcaacaatctgggatggggagcacggtaccctcgcctccccggcaggcaataccccataggggacccattcccgcagctgtccacggtgcctcgcacccctctgctgctctccctcctcagaaactgatgaatcgcctggtgcaggaagatgggagcaccacctgccctgggcgggagcaccacctgccctgggcgggagcaccacctgccctgggcgggagcaccacctgccctgggcgggagcaccacctgccctgggcgggagcagcacgggccaactaagtagagtcttcatctgtgaagttggaggccccctcaccacttgccacaggcctgtgttctgctcacaggcacgtgccctcatcttgatgtttggggatgggggtggttgggccccaggtaggggtgagggccagacccagcctctgtgaatgccagcgggagggtgggcttgtaacattacatagaaagaacaggcggccttactggacctgatgtcccgcaaggctgggctgcagatggagagccaaggcccacacggcctcactgtcaggggtggcctccccttgccctctggaggggtcctccattgataccccctgcctcctttgtgtgtgaaggcacgggcttaccagtgcctcggtccccgaagcccccgggtccgggaggggccagttaaagcattcctgtggccctggcagggtggccctgacaactagactccttggtccaggccaacaaaggccttactccctggagccacctcaaacctcagcacccaaagcggcccgttatttccatgttgcaaatgagagaaaacaggctgggagaagcacctcacgaggtccagcgggtgggcagccctcgcctccccgaaggtgggagccgccccggcctccgcgtcgggttctgggccgcgagaggggcggggcaggggcgcagggctggagtcggtggctttgtagggccccgcagggcgcggagccacctggggaaacggaagttcagggagggcgaggccgtgccccacatccaggcagcgcaggccgcgggccgctcccctagccaggaagagccgccgtccgcaccgggaccggagaggaagcggaggtctgaagggggacaggtcggacgtggcctcagagagggaggatgtgggccccggagctgagccaggcggccggaaccccacgggacccgcgcgcacctccccaccaaaggggccccggcgttggggggcgaggggtcgctgccctggaggacgttgggacctgccgcgctgcgctccgaggcggggaaacggagggacggcggggcggaggggcgaagcgagcctggactccgggggaggcgaggccgggaagacccagtcccgaggagcagagggggcgggccagctccgggccgggggcgccgacggggccggttccggttgggggggtccctgggcccggcggggttgcgggacgcgccgtcggggagctgcggcccgggagcccgtccggaggcggcgcggggtccgggcggggcgcgcaggggcggcgccaggcggtgacgtgcgcgggggacgtgccgcgccagcgacccgagcacttaaagtcgcccccggcgcggagcggaccggcagaggcgggcagaggcggcgagaggcggcgagaggcgggctgaggcggcccagcggcggcaggtaggcgcggccgcgatgctcgcgcgcgggccggggcccaggagctcccccgtgccgggcaagggggcgacctcggggtccgcgctctcacccccaccccgcccactttgtccatcaggtccgggggcgcccggggca

SEQ ID NO: 19358 - DNA, 2300 bp, Homo sapien
agggcggtgacagccttgcggagaaggggtcttcaaagctctgagaccccgcagtgccagctcaggattgaagcctgcggcggcacatgcagccttcctttcccaaaggggacttgcgcccagccccacttggggcaccagtgggggctcctggccctggccctgggtgggagtggccaatccgcaaatgaggcctgtgtgtctgccccgccggcccctgccgtcgtgatgtaagcggacacagagcggcagggcacgggctgcgcgaggggtctgcgggggtcagaggtggggcgcagggcccaggcctggggcagccccttgcgcagcgtccaccccctgcaagctcggccccgacacctttgcaggcgcctggggcggggctgccgggagttgctcactgctccttccttgtttgcacaacaggggctgcgggggaagaagggaactgagggaggcccctcccccggtgcagcgccctcccgccctcggcacccctcggcagccaggcgctggccacagaggccgcttccttggtcctcaggcagctcatgggatccaggaaggaaacgaattacccttttcctgccccgcctcctgcctgggccacaaaggcagggccaaagcccatccttcaagggctggagtcagttaggtaacaggccacgggccccgggctcaggccactgcacggacccagggaacgggctgacagtccagcagaggcctcagcgaggcggcggcgctgcgcacaaacctgaggacctaggcgggtgaggggtctgcaggtccagacgcctgaggggaagcatgccagggtgcccagtgccccccaaggtggtgggcgaggtttctggagaggtcccggaggagcgggcttgggcagcaggggtcaggttcaggaccctctgtgcatgagtccaggttgactctgcaggacggcatttcgagccacctggcatggcgttccaggcctgtgacggggcagtgcaggggtccgaactggcaggcacccaggtcctgaggacttcatggtcgaatcctggtctaaagccaggggtccttgcagagccctgcgccctgcaccctcgagggaactgcctgcaggagcccctggcttgggagggcgcatggctgtgggacgcagggtctcctgcaagggactttcccacccacccctgccccaggcctcccgctcagcttccagcagcctggggtcgtagagcctttgggggacctgctctccgggcagcccccacctgggagatcagctttctcatcccagaggccaggttatttctgggtgggttggcatgcttcctggggggcggcggggggggggttggtaaatgtcaggggaaggccagcctgtggcgtgtgcccacggagaggccaatgcttggtggctgtggcgtgtgctccaggcaggacagccccagggttgtccctggaacaccgggcagtctgtaccttggcccatcacggtgccggggttatcctggaagatggggagtgtgggccattattttgtgccccttccccgtactctacctcctgtggaatcccttgccccaagccatgtgggcagacagctggctccaagtcagcccctggacaccaggctggagtgggaactcctggagccatttcagcatggctggcaccacaggctgggtgaggacagacgatggtgccaggttgtggtctgggggcttgtccaaatgcctcatcttgacacagaagatggccctccccacatgagcgtcacgtggaagccacaagcacctcaggtctcagaacatgctgtgctctcctggtcagtgagtcctggcactgccccaaccctctgccagccctccttgacactaattcaggggcgccgcgtctcctgagggtggccactgtcccctgcctccccacacgccctcgtctgtctcctgaggaccctggcgggcttcaaaccctgggtctgcctgcgtctcccacccccgctggtgcagccagggagactcagaggccttggtacctctttgtgttttgcagggggaacctggggtatgcaaaatgtgtctattcctgtttgttgtatacacatttccttccttggccttgcatggcctgtttatttttaaaagtgcaaacttgcaaccccaaacaagctggggccctgaggccgtcaacccctccagtctcccctgtgacccgcagtctgcgtcctgttcccagtttcattcctcaagtgcatatatttttatttttttattttttttttgagacagagtctcgctctgtggcccagg

SEQ ID NO: 19359 - DNA, 2300 bp, Homo sapien
gaatccaggaggcggaggttgccgtgagccgagatggtgccactgcactccagcctgggtgacagcgagacctcgtctcaaaacaataaaataatgaaacaattttttaaatgaattgaatttccctagtggtaccaaaacttgctttaagactaaactaaaaatctgtcttgccatggaaggacataaaaggtttatccaggccgttcacaagccgtatgtgtgtagagccatgtgtatagttgcggatccagtgctgtgaaaacataccgaagagacatgttcttgtggatatgagaaaaaaaaataggaccaaaggacgtattttgggggtggcattttgagaaacccacctgttgctgcagcatttgaatttgactgtggcgtgaggctgcggtgcacattcctgtgcatgtttttaccagcatgtgttttccatctctctgagaatcttcttgtggtcgttgacttttcatacgtaacgtcttgggtgaagtgtccaggtctttcacccattttttctaaaatggatttttttttttttttttgacagggtcttgctctgtggcccaggctggagcacagtggtgccatcacggctcactgcagcctccatttcctgggctcaagtgatcctcttgcctcagcctcccaagtagctgggaccacagaagcgtgccaccacacccacctaatttccagaattttttgtagagacaagggtctccctttgttatccaggctggtctcgaacttctgagctcaagcagtcctcccgtttcagcctcccaaagtgctaggattacaggcatgagccactgcacctggcccgtgtgcctttatagtgttgattatgccttcagcactgatactatgcagccatctttaaattcttcctgttggatttattgtgtctttattttcacttccctgatttgtatatttcaatcctgggttactgtgtaaatccccaaaaagttttcattgcttttgcttttctcttatccagtcaaatacttctaccaacatcggagtaattgaacatattttcttctctcacctaacccacggtagctgctttctctcctcccatctcctgtgtgacgtttctggcgggctctgctgctcctttatgcctgagctcttttctttcccacatcgtggctgctttctgtgtctcctgcccccctgccctagaagacgggagtcggggaggtggggcttcgatcccctccttgtcccccttacagctcctgtctgcttggccctcatccaacgtctgcctcaggccatttgctaatagatggggcctaatctcgaggatgggtccctgaggagcggcgttgccggggtcttctacctccaccacccctcccccgttcaggattgtcaccatgaccccttggtgtgcacagtgcagacttagtgtggagctgaggcagggcctggactgaaacactgtgtctgatttccttgcctagtgggcatccccaccatcagatggtgcggggcagagggggactacaacgtcatggtgatggagctgctggggccaagcctggaggacctcttcaacttctgctccaggaaattcagcctcaaaaccgtcctgctgcttgctgaccaaatggtaaggactgtttcctgacagttggcacacacttgctgtctgatagaatcagccactcgcttgtgctgttcttgccattattatggccattaattcacagaggaaatggaaatttgctgagcctcagccttgaggctgcagtggctcagctcactggcttctcgaggctccggtggctccgctcactggcttctcgaggctccggcggcccagctcactggcttctcgaggctccggcggcccagctcactggcttctcgaggctccggcggcccagctcactggcttctggaggctccgacggctcagctcactggcttctcgaggctccggcggcccagctcactggcttctcgaggctccggcggctcagctcactggcttctcgaggctccgacggctcagctcactggcttctcgaggctccggcggctcagctgactggcttctggaggctccggcggctcagctcactggcttgtcgaggctccgatggctcagctcactggcttctggaggccccggcggctcagctgactggcttctcgaggcccccggcggctcagcacactggcttctcgaggccccggcggctcagctgactggcttctcgaggccccggcggctcagctgactggcttctcgaggctccggtggctcaccgcactgg

SEQ ID NO: 19360 - DNA, 2300 bp, Homo sapien
tacaattcaacatgaggtttagtgtggacaaatatacaaattacctcatgattcttcataaatttcccagcctcaggtgtttcttgatagcaacagtaaaggagctaagacactgtggcgttcagttgtatcaggacagacctgggtgtgggctggccctcatacgtcctgccgggagctctgggggctttccagtctgcaggtcgggacgtccttctactctgagatgttctagtatcatcaaaccgccccacagaccatgcctggagactctgcctcacacatccgttcccagcggtcaccagccccgcatccctccctcgtcaccgcatctgtgcgtctcctctgtgacggaggctgttccttggcaatgactatcctcagcttcagccccctgctgacagttttctagctcagaacctggccatgtctgcaccctccctgtcttctcggaaggggtgctgtcattccctgggctacacacctgctttgtcctcctctctctgaccccagggctccagggtaccactgtcctcttcctttgtcagtttgttgtggctggggctggtggtgggggagccacagcaatcagcctgcctcaccttgcccagcccgcatgttcccagggctcctgccatccccactacaccacagcccagtccgtgtgcacgggttatagagtcaagacacaaacacacaaaagccaggcagacgggcacagtacctgccgcagctgcatgaagcttggggcactatgggtgagaagagctagaaatgttggggccatcagagcccaggaggaccagccgagggaggagcagctgacaggtgggcaggtgcccctagtcagggacagcaggactccccaggaagaaggatcacagccacccgtgggagagctggactctgttcatcaacagaaaagccgtgagcgattccgccaacaaggtcagttttactagtctggcagccccccacccccggcttctgtaactcagaaactgggcagttccgactgcccatccctcattagtgactgatggtggtctggccggcggcatctcctgtctccaggccctgctatgtaatttcgggaatggacgcccgtctccccgacctgacctccagctgtttggagctgaggggtggagaggaaagactggggggtggagaaaggcgagcaccactgtggggcctgtgggggctgctttcctcttctgcagtgacctggacgggctgaggctgctgtctcactcacacggcggtgcccacaccacagccctggtatgctaatgcgtcaaaacacaccttcacctgtttcacattcttgagtttcagcgaggatgcgacaggtctcgagacacatggacgtgggaccatggggacgggttcttcaaggtccccatgcacctgcagcctgggggggcttgtctgaagggctttcttcccagtgatgggaatcaaaggccccgatctttgaagctggccatcagcctgaacgtccactccttgtttcctttgcaaggaggaacattcagatccaacacagataagaatgttgactccgtctccaggccgcagggactggagggaggcaggtggtctggcctcattttgtgaaaggtggtggctttgtcctcaatcttcaggctggacatcaggacctcccagggcgcgggcctgctctgtctctggccttaggtgtcaggaggtaaggccgcagacgctgacgtactgggatgccccaagcccgggaactggcagcccagtgagggggtctcacctgtgtcccctgagcctggcctgtcactctgtccacgcctcagctacctgtcccctcctgcaaagggcaccgcctgtcgcgaggaactcacctggcttcctcgacatctcgggggacacacgaaaagcccccgcgagagcagcaggagcctgcacgtggaaggggctggcggcccgaggtcccggggtaacaggagggcagaggggctgggcacggcgcagggtcgggaggaggcctggagcgctcgccccgcccggccccgcccctggagcgccgcggccccgccccgccgggttgctaggggaagtgacgtcacagcgcgatggcggcggctcctttaggcagctgaaaggggatttaggcccggaagatccgagtccatccgcggcggggagagggcaagcgggaccggtaggggccggagcagcggcggcggcgctcggactgtcccatccgccccgtattgaggcgctgggagcggcggggcgacaggaaagcgatggtgaaagcggggccg

SEQ ID NO: 19361 - DNA, 2300 bp, Homo sapien
agacttcaaaaagaaagtcaacagcaactttattcgtgatcgccaatagccagacacagctccaagtgtccatgaatacagcagataaacacaccggtgtgtttacactggactgcttggcaatcaaaagaacaaactcctgagacatgaaacaacacagaagaatctccagaaacatgacgctaagggaaagacgccttacacaaggacatgtacccaatgatccattagtatgaactcttagaacaggcggaagcatagtggagaaatcagcacaggtggcatggtagcagtggacatagaatggaaaggggcataagagaattttctggggtgagggacgtgttctatttgtcttgatggcatcttcggttacactactgtatttgttaaaactcagcaaaaggaggctgggcatggtggctcacgcctgtaatcccagtcctttcaggagggtgaggcaggaggatcgcttgaggccaagaatttgaggttacagtgagccatgatcacgcactgcactccagcctgggccatagagcaagtactgcctttaaaacaaataacctcagccaatgtataattaagtttgtgcacttcattacaaacttaacattaaaaaactacaaaaatcatatgctagtggtatgcacgctgttttggcggtgatggatactgacatttgcaatttaatactgtaactaacatcgttttactacaacagcgtaataatataacgagcacctgcaagcccccctccaacagcaaaaccaggtatttccagtgacttagatctactcgtgtgcttatcctgtcccagtccccagaatgtgcagcacgttcttgccttacgaggattccccccatgcgtatatacctaagtcatatgttttatttatttattttgagacggagtctcgctctgtctcccaggctggagtgtagtggtgcaaccgcggttcactgcaacctccgcctcccaggttcaagcggttttcctgcctcagcctcccgagtagctgggattacaggcgcccatcacgacgcccggcctaagtcatccgttttacagcttcatgttgatctgcctgacgagatgggctgatgcagggacaggcgaggccgtgagcgcgcacacagtcgctttcaccgcagaatccaggcggtgctcatcgcaaaatcattccgaccttgccagatgtttgacgttcttcattaaacaaaaacccctgagcagaacgccaggggcctgcgcgaaggcggggtcgggggagctgtttgggtcttttttatttttcatcctggtgaccagcaatctggtccgcggtgcccaagttctctgcagccggcctcaggcctgatccaggcggtgccccgggcggggcccacagccctgaacccgcccctccctccccgcagccccgcagcccgcgccctcccctcccctccccgccctctcctcccctcccctccccttccctccttcccccaccctcccctcccctccttcccccaccctcccctccctccccccgtcccctccctccccccgtcccctctccttcccgccctcctctccgcaccctctctcctccccgccctcccctccccgcgccctcccctccccgcgccctccactcccctgcccgcgccctctctcctccccgccctcccctccccttgccctcctcttccctcctcttccctccttccctcctcgcagccccaaaacccgcgacccctctccgacccctcccggcgccctcccctccccgcaccaccgcaccttcccatctcccacccttcccaacgcccgcctcggcagggatgcggccctaagacttgcaggaagcgcgggttcgaccccggcgccctagcaacccctgccctcgccgctctagagagcgggtctcctggccgggccctcctgggtctccgtagccgcgatcgccagacgcggcgagcggaagggcccagccccgccctctccgggcacatgactcgggcctggccattcacagtgcagcatcgtccagccttagtgattgggccatcggagagcacgtgacaacagctaggccaattagagctaggccaattagagaccacccgtttctatttatggtggagccggcgatcggcgtgcggttggaagtggtgtccctgaggcacctgctcgcccttttcctgcgcctccgcaacgtcggctgcgaatgagtctcctaaaggacgcccgggaggatcggaaacagccgagtcccggcgcgggcagtgtcctgcgctcctccccggggtctggc

SEQ ID NO: 19362 - DNA, 2300 bp, Homo sapien
gcacacgagtgtccacacattcccgtctctgcacacgcatgtccacgcgctcccgtctctgcacacacacgtgtccacacgcacccctctctgcacacacacatgtccacacgctcctatctctgtacacacgcgtggtcatgcacacccgtctctgcatacatgtgtggagtcacgcgcacccgtctctgcacacacgcgagtcacgcacacccgtctctgcacacacacgtgttcacatgcacccgtctctgcaaacacgtgtggagtcacgcacacccgtctctgcacatgcgtggagccatgcgcacccgtctctgcacacacgcgtgtccacacgcacccgtctctgcacacacatgcgtggaatcacgcgcacccgtctctgcacacacgcgtggagtcatgcgcacccatctctgcacacacacgtgtccacacgcacccgtctctgcacatgcgtgtccacacacatccatctctgcacacacgcgtgtccacatgcacccgtctctgcacacatgcatggagtcacgcgcacccgtctctgcacacacaagtgtccacacacccgtctctgcacacgcacgtccacacgcacacgtctctacacacgcacgtgtccacacgcacccgtctctgcacacccgcgtgtccacacgcacccgtctctgcacacacgcatggagtcacgcgcacccgtctctgcacaaagtgtccacacacacccgtctctgcacatgcgtgtccacacacacccgtctctgcacacacgcgtgtccacacacatccgtctctgcacacacgcgtggagtcatgcgcacccatctgcacacacacgtgttcacacgcacccgtctctgcacatgcgtgtccacacacacccgtctctgcacacacgcgtgtccacacgcacccgtctctgcacacacgcatggagtcaagtgcacccgtctctgcacacacgtgtccacacacacccgtctctgcacacgcacatccacacgcacacgtctctgcacacgcacgtgtccacacgcacccatctctgcacatgcgtgtccacacacacccgtctctgcacacacgtgtccacacgcacccgtctctgcacacacgcatggagtcacacgcacccgtctctgcacacacaagtgtccacacacagccgtctctgtacacgcacgtccacacgcacacgtctctgcacacacacgtccacacgcacccgcctctgcacacgcacgtgtccacacgcatccgtctctgcacacacacgtgtccacacgcacccgtctctgcacacacacgtgtccacacgcacccgtctctgcacacacatgtccatacgcacccgtctctgcacacacacgtgtccacacactcctgctcatgtgctgcacctactggctttgggcaccaacgtcaacgcttcgtcattgtggcgggaggccctcaggacagagaagtgccccctcccagaggactcagtcaccctggggtcagagcccaggcacaggtctccctcagcccctgaagctgggcactgcggcctgacgcactcctcccagggaggtcgggaaacctcaggcctggaccatacctcagacctcccgcctccaggacatggaacgcagagccacggtcagctggtcggctgcagcgttgggtgcgggtgcaggcccaggctccttccccacggccaaaccagggggtgccaattctggcctgccctgtgctcctctgcactgtgtgggtgactcatgggtcatgggtggctccagatttctgggcataaattgggtcccagcagaaagtaccccagaggaccaggcaggctgggggccagctctgccgctcacttccagaccctgccacccgtccccagccagggagtcccttctctgtcctctggtctgccccgccccaggccttgacctcctccctgtggagatgcaggggcagtgggggatacagggacgccctgctctcagggcagctctcagggaggcagtgctggggaggggtaggtgagaccgcccctcccaccgggcccacagcaccaccctggtctgaggcaccgcctccaggaagccctctctgagctctgagcgcctgcggtctcctgtgtgctgctctctgtggggtcctgtagacccagagaggctcagctgcactcgcccggctgggagagctgggtgtggggaacatggccgggcctccgaggctcctgctgctgcccctgcttctggcgctggctcgcggcctgcctggggccctggctgcccaaggtaagagct

SEQ ID NO: 19363 - DNA, 2300 bp, Homo sapien
aggaggctgaggcaggagaatggtgtgaacccaggaggcagagcttgcagtgagccgagattgcgccactgcactccagcctgggcgacagagcgagactccgtctcaaaacaaaaaaaagaaatggaaagatactgcccagatgtggtggctcacacctgtaaccccagcactttgggaggccaaggcaggcggaccacctgaggtcaggagttcgagaccagcttggccaacatgatgaaatcctatttctactaaaactacaaaaattagctgggcgtggtgatacatgcctgcaatcccaactactcagaaggctgaggtgggagaatcagttgaacctgggaggcagaggttgcagtgatcgagactgcagcactgcactccagcctgggcaacagagactccgtctcaaaaaaaagaaagaaataaacgtgagtggatggctgtgctgtttgtatggaccaggaaaacttctagaaggataggtaaggcagtgtccataactcaacctgggaattgaagccagggtggggaggaaaaggcaacagttggtttcattctattttgtttctgtgcctgtattacttccaaaataaacaaactagtttcactttcacaacatgaaatgctttatcaggatatgcgttttcctccaacccccagtggtgtcccctcacgggacaaaagcctgccagccttcagctgccctccagagcctcacggtgcaggtgctcctgcctaagcagccggacccccctgcccccaggaactgcagccccctctgagttgagagatctagtaggcaggaaaaaaggagaaggaagctgtggctgctgggggatgtggcctcggggacaagcccctctgtgcagaggacgtgggcaggtgggatttcagccccctctccagcatctcactggcagccagggtggctggggtttccccgagggcgggggctggggaatctgacctctgtgccccggccatggtgccgtcttgctgggaggatgacaggctgtgtttcacctgccaatttggcgacagtttctcttttggaacatcccgggggactttgttctgtgccacccacctctggaccctgggtctgatggctgagctgcaggctccaaggttcagcgtccagtctggccctgctccgtccattccccacatttgagggtttcccggagtttggttctgcttcttcctctcttccatgaaactgggggcattgcccacgccccagtgtcccccatcatctgcccggtggggacttgcccactcacgtgactgcagcctgtggggcctcctcctagtgtcccgaagatacctggtcatccttgaccccgcccgcacctgcccgcgtgccccctcgggttctagtggaggacgtggcccgcctgccaccccgccaggcgccgggtcctccaggcctcctcgagccacctcctgcccacctgggatgtctgtgggttcccggcccggatgcgtcttggagccttctacccgcaccccaatctcctgccccaacaggctgggcccctcctcccgggctggccaggccagcacctccgcaggggccgcaggacgcctgaaggcccaggccgcaggtgcaggaccctctgcgggggagctgggggacatcactcctctgctctgcgcgcttttatgaaagggcctctgaccctccgggggtccagctcactctgcccgcgcactcccaggcatctgggggccgccccccgccctccctccccgcggcccactcggcccgcccagctcgccccgtgcacagactcgaggcctccaggagcggagccaaacagccccgcggggaacgcgcgccgcacgcgagctggacccgcccaggcacgaactctcctggaaaaatgctcccggcggctttcctgcttcctttagcgtgaaccgcgggtgcggtgcctcccgtgaaaataataaattcaccgtcacgcttgttgtgaacgcgggtggttcccgaaacttggaggcttcccgtaaacccagctccttcctcatctgggaggtgggtcccgcgcgggtccgccgcctcctccctggcccctccctctcgtgtctttcattttcctggggctccggggcgcggagaagctgcatcccagaggagcgcgtccaggagcggacccggtgaggcgcggagaggggcgggcgggggaaccagaggggcgggctcggtgctggggactcggtgctggggactcggtgctggggactcggtgctgagggcccggtgctggggactcggtgctgggggctcg

SEQ ID NO: 19364 - DNA, 2300 bp, Homo sapien
gtcaaaacctcctttaggcagtgactctggcagctgccggctgggctgtgtcctgagaactgaggctgggaggggccaggtgggagggacctcatcctccaggcgcccactggcccagccctgagtgttcacgacaggtgcagggctccctccccggcccccttctggccagggcagccacagctcagccccgaggccttgagtggccttttcagagaaaaccaggacctgggggctcctcccgggagcctctgacccccagacccataaacaggcttctctgtggggtccctcaaccactactttcctctcacctgaggggaccagccagacagctcaggcacccgagtctttagggaatgagctcactgccctctccacccacagcaggacacctggcagccaaagccccacacctgcccctatcccaggactgggacgaggaagccccagggtgaggggtggccctgatctgagccctaacctggtgggggtggcaggcagccccaggtgtgtggatgacctgagccaggcacagacagctgccaggtggggaggagcagaggtcatggggatgtagggaaagggtttgggggttcctcccacagggccactgtgtgagacaatttgtcactttcttacaaaactaaacacactctgaccacagcatccagcaatctcactccttagagtttaccaaaatgagttgagaacttatgtctacagacacctgcacatgaatatttgtagtagctttattcataattgcccaaacctgggagcaaccaagatgtctttccataggtgaatggataaataaaccatggtacatccagacaatggaataccattcagtgttaaaaaataagtgagctggccatgcaaggtggctcacgtctgtaatcccagcactgtgggaggcagaggcaggcggatcacttgagcccaagtgtttgataccagtgtgggcaacatggtgaggccctgtctcacaaaaaatacaaaacttatcggggtgtgcaccagcacctgtagtcccagctatttgggaggctgaggtgagaaaatcacaggagcccaggaggttgaggctgtagtagctgtgatttcaccagtgcattccagcctgggtgacagagcaagactctgtctcaaaaaaaaaaaaaaaaaaaaaaagaagtgaactatcaaaccacaaaagacatggaagaaccaaagtgcgtattactaaaaaagaagttgaaaaggctacataatgtatgagtccagctctgtgacattttggaaaaggcaaaattaaggagacagtcaaaagattcctggttgccaggggctgggagagggagtgatgaaaatgcagaacacagatgaatcggggcggagaaacccgtctgtacaatattagagtggtgggtctgcatgattatacatgtgtccaaacctgcagaatgcacagcaccggaggaaagcataatggaaactgcagagggcgatgatgataataacaacgtgtaacaaatggctgggacgggaggactggggaaggctgtgcacctgcaggagcaggggagcggtgggagagctccatgcttttggctcaattttgctatgaacctaaaactgctgtaaaaaatagagtctactgaaaaaacaagtgttaatttataagcgtcttgtttaaagagcgaagagatgaaccacaaaggggaaaatgtgtttaaacaataactaattgacaattggctggttcttaaaattcagagaactttaagacagagacagcaaagcagggatcacgttttacaaacgcggcaggaccaggacgtcgtgcccacgacgggccagcaaccacaggctggatgctcaccctgtgccagcctgcagacggagagcacccaccccaatctccagcccccagaggagctgcctctccagggccttcctgcaggtgcccaggggctgcacatggccctccttggagggagctggtgactcagcactttcatttcctggaaactgaggctcatgggagatatgcagatgagcccagagcaccatgggaaatggccctttatatacccaaatgggctctgcctcctcctttccctgggtgcccacatgaacagagacaccaggatggtgagatctcccgaggaggggtctctgaggaggggtctcggagacacggcctggtgctgggtgaggggttgggaggctgaagcggggccaggattcctcaggttccctcagtttccctcaaatttccctcagtttccctcaggttccctaaggttctccaa

SEQ ID NO: 19365 - DNA, 2300 bp, Homo sapien
acccacttcctgaagcacactgttcctggaatgcctgggagttcagcagctctaaatggcaggtgcttctttgttgaggaataactcatgtgaagtgtggcttggggccttgagacccctgcatccacgcgccggtgcaccccaccctccccgccgtggaccccagaagaccatgtcctccacgctctattgggaaggcgggaaggtgggacctgggggtgtctgaaaaagcccctttgaacttgaggccagtttggggaacgtggcgtccactcccactgccctgcagcagctctggtcggggagcaacgatcagaaaccaaaccccagccacgccagagccgcctggagacaggccagacgtggggcagtctgtgagggcgcctggcaaaccaatcacccgccgccaggcacctgccaccagacatccaccccccagccggggacacagttcattcatgcgatcctttgccccccaggcatgggccacctgctgccttgttctcgggaccaaggcccgcccaggacaccttctccctcaccatttttgctctgggctgaagcagctgggggtgtgggtggagggtagcaggggtgggcatggtggggggatatgatagtgctggaaccgagcccctatcctgatgcagggggggccccatccaggctgctccactgcccagggccttccaggggagctgcacaccccacacagcaaaggcctctccagcacaggccctaccatttaccccataggccaaacccaaatttacaaaatctctgatccagcacagtcagtgtctcacaaagggattttcagtcgccttttatgaaaagaaattcctttcccaagtgcacctaatatccagtaaattccaggtgcttgcaggggggaaacaggagggctcgtcccttgccggtgagtgtccgcggcacggctgaagctgctttggggaacagggagacagcgagacagcttccacctgcccagtgattccgcccctgggttctacccagggcaaacgaaagcagaggctgaggcagcagcattcacagcaacttctttagcgactgcccacccagcgctggacccagacagccaccccttagcagcggcagcgatccctcggccaggccccggcagcagaagggaggcagctgtgctgcaaactactggagtccggacatgcaggaccgcaggctgcaggctcccatttgtaaggaatgctggaaccagcaacacctgccaacggcctgcagcagggatgcgcctcgtgggggggggttcagggtgccttgcagcgggggtggggggccttgtggggaagtgagtggcattgtggggagggtccgggggcattgcggggggtggggggcattgcggggattgtggggagggtctggggggcattgtggggggtggagggacatggcagggagggtccaggggagcctggcagtggtcggggccgtgggcacagcagagctgtggtgctgggggcagccagccatggacaacgtcaactaggacctgttagagccggggtcttactcttgctttcagggcagaaaggacttttgctgaaatccccagcggggcactcgacccctctagtgggttgtgccatgcactccattgtcgccgcccccgaccggcccctggcaccgtgtccctcctacctgagcaggctctgactccagccctggacacagctggggtggccacggtgactgctgagaagaggggctgtccacacagcctggtggcttggagccccgggacccccacacctgggtcagggtggggccggatgaggtctgagtaagggagttgggtgccagggaagggcagggcctggggtgggaggggaggaggggagaggaggagaagggcctccaggggtggcccaggggacggggggcaacgcgtagatgaacacgcaggcctgggcccagctctgacctccccagctgcaggcctctcgcatgccatgtcctcctcctcctccaaggcaggcgcccgacagccccgtgtgcaggagacgcacagcactcaccgaccccaggcgtgactacgtttgaggcaaccatgaaggcttcagacattcaaacttcttaatagaccaggcgtggtggctcacgcctggaatcccagcactttgggaggctgaggtgggcggatcacttgagcccaggagtttgagaccagcctgggcaacatagggagacccccgtctctacaaaaaatacaaaaattagccaggtgtggtggcgcgtgcctgtaatcccagctgctcagg

SEQ ID NO: 19366 - DNA, 2300 bp, Homo sapien
atgtatttccaaaacttgaatagagactcatttaaggcatattaggacaatatttcttttatttttttatttttatttattatttttttttttgagacagagtttcactcttgttgcccaggctggagtgcaatggcacgatcttggctcactgcaacctctgcctcctgggctcaagcaattctcctgccccagcctcctaagtagctaggattacaggcgtgcaccaccacccccagctatttttttgtatttttagtaatagagacggggtttcaccacgttggtcaggctggtctcgaactcctgacctcaagtaatctaaccgcctcagcctcccaaggtgctgcaattacaggcaagcaccaccaggctcagcctcaaaagtctatatttctatattaaccattcagtgctgacaaaaactggtactcggtatttcagaaaatgtacaagtttactggaaatttttaaaatgtattaattaaataacttctcatattactattgaaggaaatagatacatgtatgtttatacttgaaatattcttttggagagatttggttttgggagaaggtagaatacttataaatcatcactaggtcattcatttataaaattatagttgcaagctagtctgatggtagtggatccccagaacttattaaccttagtgtcaccaacgttggtatacaaccccccacaactaaatttgactggcttttaaaaaattatagctgtggccaggtgcagtggctcacgcctgtaatcccagcactttgggaggctgaggcgggcggattgcttgaggttgagagttcgagaccagcctggccaacatggtgaaaccccatctctactaaaaatacaaaaattagccgggcatggtggcgggcgcctgtaatcccagctatttgggaggctgaggcaggagaatctcttgaacccgggaggcagaggttgcaatgagccgagattgcgccactgcactccagcctgggcaacagagcgagcctctgtctcaaaaaaaaaaaaaaaaattatagctgtgaactagcatgaggcatttaagatcctatctagtagactccaaaagcagctgagatgaaaaagggataaaaatctcaagaacaaactatgaggtttaagagttattgcagtctatccaaacctgaggtgtcctcctgatatttctaaactgacgacttcaatgtgcaaatcgtcaatagaggggaattgggcactccccaaaagagcaaaatattaatatcaagcaagcgagaagctgtattctgcacgttagaggctccttcactaatacctgcaaaccaatgatcacccgtaacattttaaaatcctaaaactaagccattcctccatggcacccgatcctctagaattccacggggaaagcaggtttcgtggtttaaaagtgaaggcggaggcacgctcctggctcaggcggactttccaggctgctgggtgggttattccacgggacagcgacagccaaacggcaggttcccggagcagcagcagcagctcatcaggctgggagcaaagcccccttctctttctcctgcccctctgggataggtgggcctctgccgtcggctaccgcggctcccgcccgcacctgccctgctcccagcatgggctgcggtagaccccgccccccgcggcagaccacgcccacctgcccccccccacccccccacccgggtcgggccaggccccgccccatcagccccagtcccgcccactccatggccctgtccgccgccgcagcgcgcgcccttcccctcctcaccgctacctgctccggttccggcgctcggccgctccgttgccctcgggcgccttggttgcggccctccgctgaggagccatcggaccaggccgccgcggagccgggccggacgcgggcgccaggcccggggacgaacgccgtaacagggagcgcgaggcaggcacggcgcagggacgcgagtgcgacgcgctcggccatcggcccctgggctggcggccaggcccgagcaatcggcggccgagcggggcggggctcagagcggaggcggcggccgcgagggcggggcggccgggcctggctgcgcccccggacctcgcgggaccgcggcggcgcaggtgaggtgcgggtgcggctctggctctgcgcgctaggccgggcggctcctggctggaagcgtttcccccgcgccagtacctgaagagggacggccgggctcccgagcgacgcctcccagcgtggctgtcccgcagcggcgatgcggggctgctg

SEQ ID NO: 19367 - DNA, 2300 bp, Homo sapien
aagcagctgagatgaaaaagggataaaaatctcaagaacaaactatgaggtttaagagttattgcagtctatccaaacctgaggtgtcctcctgatatttctaaactgacgacttcaatgtgcaaatcgtcaatagaggggaattgggcactccccaaaagagcaaaatattaatatcaagcaagcgagaagctgtattctgcacgttagaggctccttcactaatacctgcaaaccaatgatcacccgtaacattttaaaatcctaaaactaagccattcctccatggcacccgatcctctagaattccacggggaaagcaggtttcgtggtttaaaagtgaaggcggaggcacgctcctggctcaggcggactttccaggctgctgggtgggttattccacgggacagcgacagccaaacggcaggttcccggagcagcagcagcagctcatcaggctgggagcaaagcccccttctctttctcctgcccctctgggataggtgggcctctgccgtcggctaccgcggctcccgcccgcacctgccctgctcccagcatgggctgcggtagaccccgccccccgcggcagaccacgcccacctgcccccccccacccccccacccgggtcgggccaggccccgccccatcagccccagtcccgcccactccatggccctgtccgccgccgcagcgcgcgcccttcccctcctcaccgctacctgctccggttccggcgctcggccgctccgttgccctcgggcgccttggttgcggccctccgctgaggagccatcggaccaggccgccgcggagccgggccggacgcgggcgccaggcccggggacgaacgccgtaacagggagcgcgaggcaggcacggcgcagggacgcgagtgcgacgcgctcggccatcggcccctgggctggcggccaggcccgagcaatcggcggccgagcggggcggggctcagagcggaggcggcggccgcgagggcggggcggccgggcctggctgcgcccccggacctcgcgggaccgcggcggcgcaggtgaggtgcgggtgcggctctggctctgcgcgctaggccgggcggctcctggctggaagcgtttcccccgcgccagtacctgaagagggacggccgggctcccgagcgacgcctcccagcgtggctgtcccgcagcggcgatgcggggctgctgagagaggctcgcacagagcctgtgggtgtaaattgtgtgtaactggtcgtatgtacaaactgaaagtgctgtgttacagagcccttagggtcagcagcctccgaacccctgcacggaaccaggggctggattactgaactgagtctgtctcacatgcaaagctttcctttccttttctcacccaatcctttgtgctttcatagtagataggaaaaataaataaaaaatacataaattttacccttccccagctgcttcgttatcccttggatgccgcctttattcagtataatactacggtcagctctgatgcacttgggggctttttcaaaattatcagcttaccttaaatcctagacagttttctccaacctggagtcagttttgcagtttcttcctctttataatcaagctgatctgagctctagaaatacaaattagttttaatattacctaaaatttggataaatttcctacagaagcatcatattgtgcggcctgataagaaaatgtttagaggcttctgcccgactgttttcactagcatagtacatctagtttaacaaggtctttaaaacaaggttgtttggcagttatttgtgttattatagatcataaccatcttataaacaaactagtgctgttttgttttagcaacaaatcacacatagcagaggtctctatatcttaacatggaggtagacttccagttcattttcatgttagcaaaatgagtttcctccaagttaatctatcaaaactggccagtatcagaactgaaactgaaagtataaggagaaaggcaaagggagaagcttctgcccctgttgataactcttgattttctccactaggaagaagtccccaaggagacttcgccataggagttcacaggaaatattgaaatgtcaggttccactccatttcagatgagattagttcatttagaccttaaaggagctccaccaaaggtctcgtacctctcagaggtaaggactcccttttacctctagagcattactttttgccttggcttcattctttaaagttttgagcagtgttctgtggaaacgggtacctagaacacaaccaca

SEQ ID NO: 19368 - DNA, 2300 bp, Homo sapien
ctgaggcaggagaattgcttgaacccgggaggtggaggttgcagtaagccgagactgcgccattgtactccagcctggatgacagagcgagactccgtctcaaaaaacaaacaaacaactgggcggcttgacacaacagaaatttattctctcacagttctggaggccctaagtccaaaatccaggtgtcagcagacccagctctccctgaaggctgaagaggaggacccttccttgcttctctctagcttctggtgatcgtcagctgtcctcggcatcctggggttcgtggcacgtcatgaccatcttggctgctggcaccgcggggcatcctcctgggtcttcacactgccttccctccgtgtgtctcaggctctaaatttccctctcctcataaggatgccaatcactggattagggttcaccatattctagtacaacttcatcttattttgattacatctgcaaagatcctatttccaaataaggtctcattcacaggtcccaggggttaagacttgaacatatctttttggaaagatacacttcaacccaaaagaaagaagctgtgagtttcttttgttctctgtcttttttttttttcccttttgtcatcctggttgttctgtttttgtgagaggctatggaggaaattcaaaatcaatgctgctgccaccatcttgctccaccgagaaccttgtggttgtgttctaggtacccgtttccacagaacactgctcaaaactttaaagaatgaagccaaggcaaaaagtaatgctctagaggtaaaagggagtccttacctctgagaggtacgagacctttggtggagctcctttaaggtctaaatgaactaatctcatctgaaatggagtggaacctgacatttcaatatttcctgtgaactcctatggcgaagtctccttggggacttcttcctagtggagaaaatcaagagttatcaacaggggcagaagcttctccctttgcctttctccttatactttcagtttcagttctgatactggccagttttgatagattaacttggaggaaactcattttgctaacatgaaaatgaactggaagtctacctccatgttaagatatagagacctctgctatgtgtgatttgttgctaaaacaaaacagcactagtttgtttataagatggttatgatctataataacacaaataactgccaaacaaccttgttttaaagaccttgttaaactagatgtactatgctagtgaaaacagtcgggcagaagcctctaaacattttcttatcaggccgcacaatatgatgcttctgtaggaaatttatccaaattttaggtaatattaaaactaatttgtatttctagagctcagatcagcttgattataaagaggaagaaactgcaaaactgactccaggttggagaaaactgtctaggatttaaggtaagctgataattttgaaaaagcccccaagtgcatcagagctgaccgtagtattatactgaataaaggcggcatccaagggataacgaagcagctggggaagggtaaaatttatgtattttttatttatttttcctatctactatgaaagcacaaaggattgggtgagaaaaggaaaggaaagctttgcatgtgagacagactcagttcagtaatccagcccctggttccgtgcaggggttcggaggctgctgaccctaagggctctgtaacacagcactttcagtttgtacatacgaccagttacacacaatttacacccacaggctctgtgcgagcctctctcagcagccccgcatcgccgctgcgggacagccacgctgggaggcgtcgctcgggagcccggccgtccctcttcaggtactggcgcgggggaaacgcttccagccaggagccgcccggcctagcgcgcagagccagagccgcacccgcacctcacctgcgccgccgcggtcccgcgaggtccgggggcgcagccaggcccggccgccccgccctcgcggccgccgcctccgctctgagccccgccccgctcggccgccgattgctcgggcctggccgccagcccaggggccgatggccgagcgcgtcgcactcgcgtccctgcgccgtgcctgcctcgcgctccctgttacggcgttcgtccccgggcctggcgcccgcgtccggcccggctccgcggcggcctggtccgatggctcctcagcggagggccgcaaccaaggcgcccgagggcaacggagcggccgagcgccggaaccggagcaggtagcggtgaggaggggaagggcgc

SEQ ID NO: 19369 - DNA, 2300 bp, Homo sapien
ccgcctcccgggttcacgccattctcctgcctcagcctcccaagtagctgggactacaggcgcccgccactacgcccggctaattttttgtatttttagtagagacggggtttcaccgttttagccgggatggtctcgatctcctgacctcgtgatccgcccgcctcggcctcccaaagtgctgggattacaggcgtgagccactgcgcccggccacatttcacttcttaagtcttctgtgtttttgggtcatcaaatattcccggagagatgctcttgaggatctaagatccagctgtgggatgaggtgtacttcccaccctgccacaatcactgggcctgcccagacgggcagaggccctgtgcgccccacctgcctctctcacgtggactctgggggtcagagctgggtggggtgtgccgcgtgtgggtcctgagtggccagggcagggtcagcagcacaggaagctgcccagggggtccttgcaagcgtgggctctggccagcgtctgggggaggctgtgctaggcggggcctcccgtgggcatgtccctggagctcacaggctggcgccctatgcccatctccagatagcctgggctggaagctcttctacgtcacaggctgcctgtttgtggctgtgcagaacttggaggactgggaggtaaggccggctcgggtgcgggacagagtccagggctgttcagctcctgggttttttgcaatgggaatgaaaggaggaggaagggccctgggtggcctagcgcctccccgtcctgaagcgttggtccctgcttggaggtctccgttcatcaggacatggcccctgcactcatctgggaccgttcttggccaaggaattccccgaaggcatttttctcttagaagctctccatgactatcttcaccaaagtgctttcttcccagagttgccacaatgggatgcgagtcagctttccccgtggccggccctcccacctcggagcccctcatgagtcctttcagcctggcccagtgctgccctctgacctccatgccctcgtttgctggttccactgcctccctgcacttgttttgcctgcagggtggagcaagcgcctgctgcacctgcccacctctccatttcccaacaggagtcgggttggctgccgatatccggctctgacagagcagcacctgtggcttcaggggtttgggttctgactgggagggtccccagccccccttcttgagtgtccaccctggtgagggtgggggtgaggccccagcggccacggggcccccgttcctggaggttcatggtggtcagtgcatgtcggtttccaggaagccatcttcgacaagagcacagggaaggttgttttgaagacgttcagcctctacaagaagctgctgactcttttcagagctggccacgaccagggtgagtcgtggggagcgtggggacatgggacacggccacagaggcggcgcacttgggcgtctgggtgactcacggggcctagaggggggcctggaagtgcctttggtccaagctcacctgcttggtgaccagggttgtgtcctgcccgctggaagcaggatcccacggatacgccccacctgctcacctgctcagcagggtcctagagcctcctgggttctttagaggtttggcccctggggagagtgggaggagcaggggtctgaggagcaggggtctggcagagcaggggtctgaggagcaggggtctggcccacccgggctcgggcagcctctgtttagctgcattctcccgtctgcctggcagccacttgtccgcaggtgcagtctggccccagcggcaggtcacaggacggggcagggagagccatggcagcccgtgggcgttctggagtggggccacctggcttcttgcgggccttggcgctgctccagctttcctgtgggttctactgggcctgcagtaggggctggatggtccgaggaactccccacccttgagcctgggcactggcccagctgtggtcagtaccagtttcctgtagatgctgccgcacagacagacagaggccccggggtccggccgcccatgcatagccccagaggggacagattctggcgaccagagttgctgggcagtcttgggtttagtgccgcaatgctgcacttctgacaggctgcttcctggatccctgcagggacctggccagggcattggccccaggtcacctgtggctttggggagagcagttgcagggctggcctgggctgtgggaggcagctgtgccgttttctgacagccattgggaccgcccca

SEQ ID NO: 19370 - DNA, 2300 bp, Homo sapien
tacaccaccacaccgggctgttttatgtattttctgtggagacggggtttcgccacgttgccctggctggtcttgaactccgtgactcaaacaatccgcacgcctcgtcctcccaaagtgctgagattacaggcctgagccaccgcgcccagcctgaaccccctacttaatgtcagaaatttgatttgacttcacagggaaagccctgagaaactaccagaacggggtccctggggccagtgttgggagcgtacggtgaagtggcagggctgctgcgcccgtgcggaactccgctgtggaagattagcccctttggtgactcgtcggttctggccgctttgggaccctctactgtgcagtctgaactttcagcaggtggaggagggcagagagagagctgagatcgttggtccatgccagtgcgagagccagtacggccggaagccatgatgggactttcagttcctttcttggtggaggccagcacaggggagagggggtgcccacagatgctagaagcttaaaggctgctgggggctagcggcctcaggacataaggtttccagacaggacggggcaggtggtgatgcagctgtagctcgtgagtctgagcgggaaacagcccccgcgcagtcggtgtcgctgtgaacggaaaagggccttccttacacaggaaacggggtctctgggggatccagtgacgtgcccaaccacagagaccaggtgagactggctgatggtgtctggggctgcaggtgacttagttgggggacctgctcttggcctccagactgggcctgatggcgtgggcgcctgcctgtgtgcaggcccaagggctcagctgcctctgtctgttcccagacccctcctcctgtagagagtggtgctgccctctcgggatgtacctgcaggtggagacccgcaccagctcccgcctccatctgaagagggctccaggcatccggtcctggtccctgctggttggtaaggctctccacgtccctccccagaaccccagaaccggaagcctgactttcaaaaaggatgaaaatgaaacaaaatattttctcttttttctattaccttgaaatctaatggctattttgtttctttgtatccattcaaattctatctggtgtacttggttttacagataatgcatgtctgttttgtccccttttaatcactaacacccagcgtatttaatatactctatgagcttttctgaggtcaccatattttcctttgtacttgttttgaaccacgtgatgggtgatcgtgggttcccatgtctcctcctccctggtcctcagacctcttcgtaggactcacagtccactaaccacgtgatgggtgatcgtgggttcccatgtctcctcctccctggtcctcagacctcttcgtaggactcacagtccactaaccacgtgatgggtgatcgtgggttcccatgtctcctcctccctggtcctcagacctcttcgtaggactcacagtccactaaccacgtgatgggtgatcgtgggttcccatgtctcctcctccctggtcctcagacctcttcgtaggactcacagtccactaaccacgtgatgggtgatcgtgggttcccatgtctcctcctccctggtcctcagacctcttcgtaggactcacagtccactaaccacgtgatgggtgatcgtgggttcccatgtctcctcctccctggtcctcagacctcttcgtaggactcacagtccactaaccacgtgatgggtgatcgtgggttcccatgtctcctcctccctggtcctcagacctcttcgtaggactcacagtccactaaccacgtgatgggtgatcgtgggttcccatgtctcctcctccctggtcctcagacctcttcgtaggactcacagtccacttagcctcccgtcctccatcgctacccaccagtagggtcctgtacccttggggacagctgcacttgtgttgacgggacaccgtgtgaggagtggtgctggctgtacctcagcagctggggcccaccttttttgtgacacgccacagcctcctgtgtgttttgcatgacacgctgtgttgtaatttctttgtgcacagtcttcaggcctcaccacgtgctactggagtaacacccgtgtcagttatggagcctcacacagcagatgtgtctagtaaatactgtgaatagcgtatactgtgttttgcttttgttttctttagtaatgaggtctcgttatgttgcccaggctggtctcaaactcctgagctcaagcgctcttccttcctcggcctcc

SEQ ID NO: 19371 - DNA, 2300 bp, Homo sapien
aaaataagtcgaagaaatttaatgtggggtaaagtacttccatttcttccaaggcttcctatctgtcatgtagtcctataccagagtcaggctggaatttggcgtcattgctacagagtctactttgtcaacttcaagatctgtttttgttttgttttgttattttttattgagatggagtctcactctgttgcccaggctggagagcagtggcacgatctcggctcactgcaagctctgcctcccgggttcacgccattctcctgcctcagcctcccgagtagctgggactatgagcacccgccaccacgcccagctaatttttttgtgtttttagtagagatgaggtttcactgtgttagccaggatggtctcaatctcctgacctcgtgatctgcccaccttggcctcccaaagtgctgggattacaggcgtgagccaccgcacctggccacctcaagatctgttttaatgtgaatgctggtcagctgtgtgcctgaattccaaaagggaggagggagtgaggtatgtctgtctcccccttcccatcactgcctgagctagtttttcaggataacttgggaatgctcttggccaagcggaagggtccattcagatggttgaggtttcgaattgctgactgtatccttgtagaatcctttagtacagtcttgtcttccacatttccagtaattcactctagaagcttgttcacattcaggttaaattttttctggcaagactacttcatagtgttgtgtacttctgatatctaactgacctttttgcgatgttaattagcagtcattgatgacattgcctaggtccgttaattcatagggtgatgttttaatcctactgtttcttcttcatttattagcgggaaaacttctataatgagaaattcttctcatgcagtatttggttactctgctgtaaatttcataaaggcaggacaaatgcttgatgctttccttttattaaccaggccacaaactggggtgagcttaccagcatcctccaaaggtgaacagagttaaaaaatacattattatgaattacagactggagcatctgaggattttaaattcactcgaattcctgttcttattcatgctcaaatcttcttttttggcaatgagaaccgcttcagtttcgcttctatgttagcaagacgttcatagtccttggtaagttctttgctgtcggatacgtttccccgcacgtttctttttttcaagaaaactggcttctttagcaggaaccacccgcctcctcctgcggctccgcccggatcccggaaatccgctcggctccgccccatccaggaaatgcttgcggccccgccccaatcccgtaagcgcgcgcggccccgcccccaatcccggaagcgcgcgcggccccgcccccgaaagtcggctcggctccgctccaatcccggaagtgcgcgcggccccgcccccgccggttcgcgtctctctgctgcggcgcggggaccgctgtgctctcggtaggcggctgggctgggtgggctccgcacttccttcccgctccgtgccgcgcgtcccggcacccttaggcccactccgggaggggtctgcgtcctgggcccgcctgccggctgttccgtgtcccgccgtgcccgtcgcgggcggcctcgcgcctgttccgctgcaggttggccccggcggcgggagcgcccccgatccggacaaagaaacgagcgctcggtgcgactagcggcgcgggcggctttgccagcgcgcgtgtgcttgtgtccgcgagtgtgcgtgtgtgtgtgcatttggatgtggaatgccgggtgtttcgggagcaatgaggcaactgaggcccgggagggagcccagtcatataccagcatctaggattggtttgtgtgatttgaacccactattttttatttttttgagacacggtctcactctgtcacccaggctggagtccagtggcacgatttctgctcactgcagcctccacctcccggcctcaggtgatcctcccagctcagcctcctgaataactaggaccacaggcgtacaccaccacaccgggctgttttatgtattttctgtggagacggggtttcgccacgttgccctggctggtcttgaactccgtgactcaaacaatccgcacgcctcgtcctcccaaagtgctgagattacaggcctgagccaccgcgcccagcctgaaccccctacttaatgtcagaaatttgatttgacttcacagggaaagccctgagaaactaccagaacggggtccctggggccagtgtt

SEQ ID NO: 19372 - DNA, 2300 bp, Homo sapien
gaggcggaggttgcaatgagctgagatggtgccactgcaccccagcctgggcaacagagtgggactttgtccagaaaaaaaaaaaaaaaaaagttgcagagttcctgatcttaaagttgtcatttttcaaatttgtaggttctatccatatccttctctttgtatatatcattttaaaaatcaggtcatttgcctgtaggatttcccatgttgtcaaaaagagtcaaactgaaaaatattttaagagattctgaaccaaatatgagtgaccaagggccagcgacacagcccttaggagatcctaagaacacgtacccaaggtggttaggctacatacatttttggaagacataagacagtcaatacacgtagatgtacattggtttggttcagaaaggtgtggcaacttgaagtgggggggcttccaggtcataggtagattcaaagattttctatctggcaattggttgaaaaggttaagttactgtctaaagacctagaatcaacagaagggagtttttaggttaagataagggtttgtggagaccaagatttccattaagcagaggaagtctccaggtagcaggcttcagagagaatagattgtaagtgcttcttatcagagttctccctgaagcaggaaaaagacctggaaaggaacggggattcgctacagaatgtagattttcttcacaagggacagctttgcagggctatttcaaaataagtcgaagaaatttaatgtggggtaaagtacttccatttcttccaaggcttcctatctgtcatgtagtcctataccagagtcaggctggaatttggcgtcattgctacagagtctactttgtcaacttcaagatctgtttttgttttgttttgttattttttattgagatggagtctcactctgttgcccaggctggagagcagtggcacgatctcggctcactgcaagctctgcctcccgggttcacgccattctcctgcctcagcctcccgagtagctgggactatgagcacccgccaccacgcccagctaatttttttgtgtttttagtagagatgaggtttcactgtgttagccaggatggtctcaatctcctgacctcgtgatctgcccaccttggcctcccaaagtgctgggattacaggcgtgagccaccgcacctggccacctcaagatctgttttaatgtgaatgctggtcagctgtgtgcctgaattccaaaagggaggagggagtgaggtatgtctgtctcccccttcccatcactgcctgagctagtttttcaggataacttgggaatgctcttggccaagcggaagggtccattcagatggttgaggtttcgaattgctgactgtatccttgtagaatcctttagtacagtcttgtcttccacatttccagtaattcactctagaagcttgttcacattcaggttaaattttttctggcaagactacttcatagtgttgtgtacttctgatatctaactgacctttttgcgatgttaattagcagtcattgatgacattgcctaggtccgttaattcatagggtgatgttttaatcctactgtttcttcttcatttattagcgggaaaacttctataatgagaaattcttctcatgcagtatttggttactctgctgtaaatttcataaaggcaggacaaatgcttgatgctttccttttattaaccaggccacaaactggggtgagcttaccagcatcctccaaaggtgaacagagttaaaaaatacattattatgaattacagactggagcatctgaggattttaaattcactcgaattcctgttcttattcatgctcaaatcttcttttttggcaatgagaaccgcttcagtttcgcttctatgttagcaagacgttcatagtccttggtaagttctttgctgtcggatacgtttccccgcacgtttctttttttcaagaaaactggcttctttagcaggaaccacccgcctcctcctgcggctccgcccggatcccggaaatccgctcggctccgccccatccaggaaatgcttgcggccccgccccaatcccgtaagcgcgcgcggccccgcccccaatcccggaagcgcgcgcggccccgcccccgaaagtcggctcggctccgctccaatcccggaagtgcgcgcggccccgcccccgccggttcgcgtctctctgctgcggcgcggggaccgctgtgctctcggtaggcggctgggctgggtgggctccgcacttccttcccgctccgtgccgcgcgtcccggcacccttagg

SEQ ID NO: 19373 - DNA, 2300 bp, Homo sapien
cactgcactccagcctgggtgacagagtgagaccctgtctcaaaaaaaaaagacagagaaatttcacacagttaattccgtcttcctttggacatccaagctgtccagttgttcctgggcataagccaagctaattttaggagctttgggaggaatttacagtttaaccttgaaacaaggatgataatagtcccttcctaaaactatcacctcccacttctggggctgaaattgcctttgtaaagctaatgaaaggccacaaggttaggattgtgggagtggcctgaactctgctaaaatgcaggcctagtttctacagtccctcactgctcaggactcatgtggccagaggtcacaaaatttgcaacttcccgaattgcacctatagataatatcagtattgcaggacctaagaatggctttttgagatgtttttcagagtgaacccaccccaacctgctactcaggactcaattggtttctgtggccccacccagaggcagactcagtgcttgaggaccgttttccacacacccttttgatttcattcccagtcaatcagcagcatccattccctagccccctgcccaccaaattgtccataaaaaccctaactgcggccaggcgtggtggctcatgcctgtaatcccagcactttgggaggccgaggcaggcggatcacaaggtcaggagttcaagaccagcctggccattatggtgaaaccccatctctactaaaaaatacaaaaattagccaggcgtggtggcgtgtgcctgtcgtcccagctacttaggaggctgaggtaggagaatcgcttgaacctgggaggtggaggttgtagtgagccgagattgtgccactgcactccaacctgggtgacagagtgagactccgtctcaaaaacaaaaacaaaaaaacaaaaaacaaactcctaactgctgagcctttggagagactgatttgagtagtaactgtctcctgtgtggcctgccaggtgtcaattaaactcttttcccggcctgctgcaatcttgatgaattgactttttgtctgtgcagtgggcaggaagaacccgatgggcaatggcaagctgaagaatgatgagattcataaatctggaaaggagagctttacttctcataaagggtttcagcctgcagggtggccattctgacagacagggaagcactgcctctggccagaagccagaaacagacacttccagggaggggcaaagggaacaggaatctatgaggtgcagtgtgtaaatatacatatttatcaagctacaggagaagtcatgaatatttttgaagagagaaacatacacaaacacaatgaagcttcaggccccttcacgagggtcatgtcatctcaccagaaccactccatggtcagtgtctcttatcagtaaggaatactggtcaattgggccgaaactgcaaatgagagagttgttatcagcggtggagtctttcgaaagcgctggtttccgttaagctcttagccaagaaaacctaatggtagttagccaagggttggccttaataacaggtgtctcacctcccatctgtcatggctgagaactgccttcaaggcaaccctgggatctccttagccagtagggggttcgtgtagtcagttgggggtctttggatttcattttcatttctcagaggacaggaaggaaggctctaacatggggaatcctgagaactgctgctgtctgttaaatacgcctacaagttatttttcttatgtcacactctcccagacatgttcttacttctcatttctgatttctgtaatacacacacactgatttcataaaacgtttatgagtccaacacttccattatagccctgtatcaatgttttgcttagctgaaatcaatttcttggaggagtaagtgttatctttactttgtaagctgtaagggcccaaatcaatgtacttggtaaaactatccatagtgaacacacgcaaatgtcaaatggccatcatttagcatctgccctcgggcttccgggtccatcacgtggttactgacaggcaggccgcgcatgcgcgctgctactccgccgagcctacgtgacacgacgtcaagtggcaatggcggcggacgagggctgtgcccccggcccgccccgttaggagccgcgagtaaggcgagtgtccaacgccgagctggctgacagagcccggccgcggcctccgcgggcccaggggcctccaggccccgtgaccaccggaccgagcaccctggaacggccccagcttggcctcgggacagtccgc

SEQ ID NO: 19374 - DNA, 2300 bp, Homo sapien
actcaattggtttctgtggccccacccagaggcagactcagtgcttgaggaccgttttccacacacccttttgatttcattcccagtcaatcagcagcatccattccctagccccctgcccaccaaattgtccataaaaaccctaactgcggccaggcgtggtggctcatgcctgtaatcccagcactttgggaggccgaggcaggcggatcacaaggtcaggagttcaagaccagcctggccattatggtgaaaccccatctctactaaaaaatacaaaaattagccaggcgtggtggcgtgtgcctgtcgtcccagctacttaggaggctgaggtaggagaatcgcttgaacctgggaggtggaggttgtagtgagccgagattgtgccactgcactccaacctgggtgacagagtgagactccgtctcaaaaacaaaaacaaaaaaacaaaaaacaaactcctaactgctgagcctttggagagactgatttgagtagtaactgtctcctgtgtggcctgccaggtgtcaattaaactcttttcccggcctgctgcaatcttgatgaattgactttttgtctgtgcagtgggcaggaagaacccgatgggcaatggcaagctgaagaatgatgagattcataaatctggaaaggagagctttacttctcataaagggtttcagcctgcagggtggccattctgacagacagggaagcactgcctctggccagaagccagaaacagacacttccagggaggggcaaagggaacaggaatctatgaggtgcagtgtgtaaatatacatatttatcaagctacaggagaagtcatgaatatttttgaagagagaaacatacacaaacacaatgaagcttcaggccccttcacgagggtcatgtcatctcaccagaaccactccatggtcagtgtctcttatcagtaaggaatactggtcaattgggccgaaactgcaaatgagagagttgttatcagcggtggagtctttcgaaagcgctggtttccgttaagctcttagccaagaaaacctaatggtagttagccaagggttggccttaataacaggtgtctcacctcccatctgtcatggctgagaactgccttcaaggcaaccctgggatctccttagccagtagggggttcgtgtagtcagttgggggtctttggatttcattttcatttctcagaggacaggaaggaaggctctaacatggggaatcctgagaactgctgctgtctgttaaatacgcctacaagttatttttcttatgtcacactctcccagacatgttcttacttctcatttctgatttctgtaatacacacacactgatttcataaaacgtttatgagtccaacacttccattatagccctgtatcaatgttttgcttagctgaaatcaatttcttggaggagtaagtgttatctttactttgtaagctgtaagggcccaaatcaatgtacttggtaaaactatccatagtgaacacacgcaaatgtcaaatggccatcatttagcatctgccctcgggcttccgggtccatcacgtggttactgacaggcaggccgcgcatgcgcgctgctactccgccgagcctacgtgacacgacgtcaagtggcaatggcggcggacgagggctgtgcccccggcccgccccgttaggagccgcgagtaaggcgagtgtccaacgccgagctggctgacagagcccggccgcggcctccgcgggcccaggggcctccaggccccgtgaccaccggaccgagcaccctggaacggccccagcttggcctcgggacagtccgcgcgctcaccgactccctggtgaacgccgcttggccgccgccgccgccgcaggacccacgagaagcggaaaccggcgcaaggacccggtccccccggcgccgtacgtggagtgagcctgcggtccgccccgcgcgctccgattggctctggggcctggcccgccccttcccgacactgtcattggcctaggcaaagccgtaagggtggggaatcctattggcccaggggtgcggcttgtcctctcccggtgctctcattggccgagcgcggccgttgggggtgaggccgcgtcgggggaggacaacaaagggccgcgggcggcgggcagtggtgtcccagtctcccggtgcttccctgaggctgaggcgcccggcctcccgcccgccgcgctccagatgaagtgtgagcactgcacgcgcaaggtgagcgccgcgggccggggaggcgcgcgcctggtgcttgtcctgt

SEQ ID NO: 19375 - DNA, 2300 bp, Homo sapien
cggtgagagaagttgggcaagcatgtggctgctctcccctgagcggtagctgcgtgtcctggctgtaaggacgctgtagctggccaggcgattttgcacggtgcagcctgggccgctgctcctgctgcctttcagtgcttgttccccttcacctttttgggggacctgttactccgactcttacttgtctgtcggccttgcagggatgctcccatttcccagtagcctccaggcctgcaggttcccatgacccacagccgggccaccgaggacgggttttgggtccagcacgagctcctggtaaggcctggggaaaaggtgttctggcttcaccctggggcggcagggactcgagctcagcattccctggtgcgttacaggaagaccagaggaagcagtaaggagctgaccgtggatcccttctctccccaggctgggtccgatacgccgagcgggtgctgggtcgccccatcactgcccacctctgcaccgccaagtccccccagcaggtcatgggctctttggtgaaggattatttcgccagacagcaggtaagctgacctctctggagggcaggaagggcaggtgagggaggaccatggcacaggggcccaggaaggggaggttccccatctgtccagcgtggtcacggccccccaggtgagcaaaaaggaagctgtggcttcaggaaacatcagcagtgctgtttctcaccaacgcccgtctctattcctcccttcctcttacaacctttttctttcttcttaaccttttctgtggcatctggtggttttcctgggcccattcggggtagagtagaaatgctgcccaccctgctgagaatgaggccccggaccttgcccagagatgctgcctgcctgctgttgggatgcctcacccaaggaggcctaaagtggcctgtgcctggaggctgagggcagctgtcatttagggagccaaacctggcctctgccctggcctttccctcagaccacgggcatcacatgacttccttagccacttctgtgagattccacagtggccatgatgctgtcctcctcttgatggagtgagtcccggcctgaggctcctgcgtgccccctgcctcggcccgtcgtgttctcccttcccacaaccctctgcggcccccaggtcctcccagaactccctgatgtctccaaggccaccctcaaagggaccctaatcccatggtttattctccagccgctggcatgccccacactgctcttctcaatcagactttacacctccctccggggaagcagccatgtccaggcactgtggtaactggagtagagggtaacatcaggatctttcagacatttgaagtcagcctaaaaaggcacgcacatttggcagccttgttattttagcaataggcagtgttttccttctatctagtttctttctacccataaagtcataatttggcaaattataaacatgatgtcagagtatacacgttcagtttaggcaggaccgaaaaatgagctatgggactttctgtcccttgccctgcccccacctgaagagagccatgtgtttctaggtcttccacgtgctgccctctcccctggatggagcccagagctatgtgtcctcctgtaggtgccatgaggggcagccgcagagacccggcctccagcagcctctcacctgaccacctggcacagctgcaaccaggggcgggtttcctcttttgctccgcccctgccctgagtgggtcctttccacccagacctcaccacagggtcacttggcaactgctggctcctggctttgccaccagttcaggcccagccacaggcacctgctctgtgtggacccaggagaggggtagcttgggtgggcatcgcttgggaagattcaggaaagtctgtgggtgaagtagccagcgcgcgcacacacacacacacacacacactcactcaggcctcctgcaatggctccatgctggaccagcaacagctccacgccggctggacttcctcttacttgttttgtccccatgtgcacaggttcaggaggaaatgggctcagccttcccggttcttccaggaggctccactggctggggggctttgcagatgtttgggaggaccacacccagtcctgagggaggcagcagacagacatggatggagtgctggtgctcggtagagttgaagaggggatgggagccagatgtggctacagcactttcatctgtggggcccggcctcagacccacaacagtcccagccccaagaaagtgctgcatgcagccaggctcgatggct

SEQ ID NO: 19376 - DNA, 2300 bp, Homo sapien
tatgtggattcaccatgttggccaggctggtctccaacttctaacctcaagtgatccacccacctcggcctcccaaagtgttgggattcagtcatgagccaccgtgccaggcctctgtacctaaattatatcatttctctcttctaattgttctttgctatttaacaagcagcaaatagaggaaccctggggtgtttgctataacctgtatatataggctataataggatcttctcctcacacaccctgcaggaaccaccatgctgaaagaagtgagacaattcagggggcagtccctccccagcagagactaaattggtaccatttgttgctatttcagttttgcgaagatgcgcgcttggagcccaagccatggtttctagggctgacactgacttcccacggaattcttcctgtttaagaggttgtagacttttcatgatcctgaaccttgaacgtctccacaactggttaagtacccgtgagatacatttacaggattttttctttcttttcccaatttttttttttttttttttttttgagacggagtctcctctgtcacccaggctggagggcagtggcgtgatgtctgctcaccacaacctccgcctcccaggttcgagcgattctactgcctcagcctcccaagtagctgggactgcaggcacgccccaccatgcctggctaatttttgtatttttagtagagacgggcttttactatgttgggcaggctggtcttgaactcctgaccttgtgatccacccgcctcggcttcccaaagcactgggattacaggtgtgagccaccgcgcccggccacaggattttttctttttaatgttaggagtttcattgattagtgaacatctggactattgatcatcttgatttagatgggatcttgtaattttttaaacggtggcgaaattctttttttaaaaacttagtatcagattggttaagatattaactattcgttcatgagagttcatatatatatagttcatatatatatagttcatatatgtatatagttcatatatatagttcatatatatatagttcatatatatatagttcatatatatatatatagttcacatatatatagttcatatatatacatatgagacgtagtttcactcttgttgcccagactgaagtgcagtgacgcgatctcggcttactgcaacctccacctcccaggttgaagcaattctcctgcctccgcctcccaggtttaagcaattctcctgcctcagcctcctgagtagctaggactacaggtgtgcaccaccacacccggctatttttttttttttttttgtatttttagtagagctgggatttcaccatgttggctaggctggtctcgaactcctgacctcaggtgatccgctcgcctcggcctcccaaagtgctgggcttacaggcgtgagccaccgcgcccggcctcgtgtatatttttaaactgtgtgctgacgacagttaagtaaatgtgattcagaacttctgcgtattttgcaggacagttttgacacaatgacatgactcgctagccaggaaagataacgacatccagtcctggagctgctggttaaaaacgaacgtgtcaccgggtcccctgggtctgaggccacgcggcacgcggcccctccgcgatattcccgcacctcgcggggaaaaggccgctcggcggccgggcctgggctcgcgggccgccgcctatccgcaccccggcgtccacgccgggttgggggccgctgcgtgcctggcgcccgctgtgaccttgggcctggtcccgcccgccgcgcctaaggcgctgccaggccgggctcagacccccgagctcccgcgcccgcgccaaccccgcgccagccccgatcccgcgcgggctgccgactgtccgccccgggttttccgcggcgcccggagtcgggactgcgtcgggcgtcgccgccggacgtgccggcagcttggtgcgacgtgtcttgccattggcctgcttcggtagccccactgccgtacgccgcccccattggccggcgtaaccgtccgtcagcgaggggcgggcccggcgtgccggctcggtggcgcggccgcgcgtgctcccgcccctcgccgccgctcgctcgctcgccggccggcggcctccgctcggccccctccctcagctccggtgcgcggcggccgacgacccgcgcggcctgggcctcggcccgcgccaccggcgcccgcgcggagcggcccgggggccctcacgcaggcccatggcggcggccgcggcggcgctctc

SEQ ID NO: 19377 - DNA, 2300 bp, Homo sapien
cccgtgaagtagctccatccacagggcccagatccctcccacacatggcctagccctcctctccatgtcacccatgaagtagctccatccacagggcccagatccctcccacacatggcctagccctcctctccatgtcacccgtgaagtagctccatccacagggcccagaggcattaggatggcacttggacaacccctgagatgggttgtaaagtgttattttatattttgtatgttggatttcttagtcacctttgacgatttgaaattcaggctgaggcttgcaattctaataaggttaattggggaatttagaaatgatttttggatagctccagattttgttttgagtgatcaccattttaacactttaatagcttaattttaaatctacacattaatgtaaattcacgaaatgtttctatgaacccatgacgttcgtccggctttggcctgagtcaggtcccagcgggggctttcttcagggtgtctgtcaactcttagctgggcttttttctgagatggagtcttgcttctattgcccaggctggagtgcagtggtgcgatctgggctcactgcaacctcctcctctcggcttcaagcaattcttcagcttcagcatccttagtagctgggactacaggtgtgggccactgtgcccggatgatttttgtgtgggtttttttttttttttgagatggagtcttactctgtcgcccaggctggagtgcagtggcgcaatctcggctcactgcaagctctgcctcccgggttcacaccattctcccgcctcagcctcccgagcaactgggactacaggtgcccgccactacgccccgctaatttttcgtatttttagtagagacagggtttcaccgtgtttgccaggatggtctcgatctcctgacctcgtgatccgcccgcctcggcctcccaaagtgctgggattacaggcgtgagccaccatgcctggccaatttttgtatgttcagtagagacggggtttcaccatgttggccaggctggcctcaaactcctgacctcaactgagccgctgcgcccgtctggctttttgtaatagaaagaatgatgcactgatgaggagctgggagggaaatttttcctgtgtacgttacgaaattatttcagagttcaaataaaaaaacaggtactttgccaagtcctctcttcctggaagatggtgtccatcctgattttcagcctcctgctcatttttcttttttgctggtttaccaaatactttatactggattaatttacttttaatggcatgacagattctgtaagctaattctgtgcgaaaaagtattttaacagaatggctcacatcagctctgtttgtctccaagcagggagaggttggcagctaagtcattgcctccacctggaatgctcagtgctgacagttgcagtcctgggtttcccaccttgaaaggagatggagtcagaaatggcctctgtctgcgctgtgtggattgctcatccctcctgttgccagctctccaccctgcctcccggggcccgttctgccacagagtgaggtgtcctttcctctttggaagcccatagcagccttgggctgaagggctcaaaccccaggctgctacttcccttgagaattgctcacccaggcgggagggctgctccttccacacagcacagcctgtaaacgtcactctctgtcatcgtttataagcatgatgactgggttttcacgcttccccataggatgggccttccttaaatcttgttatgttgtcagcacattacttgtgtgacgcaaaagaaaaaaaattcactcttgcagtctgccaggcccaacatgtaggtttctgctttttagggcactaaaacgaggacacatttttatttctcagcaaataaatatatgaattctacgtatttttttatgtttcatagaattcaattcgccacaatctctctctgaatcgttatttcatcaaagtgccgcgttcccaggaagaaccaggcaaaggctcgttctggaggatagacccagcctctgaaagcaaattaatagaacaggcttttaggaaacgacggcctaggggcgtgccctgctttagaacccctctgggaccgctctcttctaggtaaggaaaaagaagaacaaaaggcctcacttcgtgcttactaaacttaccttcagtgtattgggaaaatttccttttgaaaatgaaggaactactaaatgcattatgattaaatgttgggatggggatttgagcaaaagtgttgggtgctgcccaggtgt

SEQ ID NO: 19378 - DNA, 2300 bp, Homo sapien
gaatgtgagatggaaagaccaggccacagacaagggaggatctgggccgctcctgcctgtgtgtccacacgtgggcaagtggacatctcatgatgtctgtatttggagtccagtagtacactgaaaataatcccgtaaaagctttattttaaaacatcaatattttcaatagtgaaaaattaaaacacttgcttaaatttataatgaaaaattccagataacttaaatacataaaaaggataccgtttttctttttttgttgagacagagtctcgcacggtcgcccgggctggagtgcagtggcatgatctcatctcactggaacctccacactcgggttcaagcgattctcctgcctcagcctcccgagaagctacaactacaggcacccgccaccagacccggctaatttgtttttttttttttttttttagtagaaatggtgtttcaccatgttggccaggctggtcttgaactcctgacctcgtgatccacccacctcgacctcccaaagtgctgggattacaggcgtgaggcactataccaggcagggatacggtttttcaaactgcttctaagagaggtggacccagaaagcctctgacctgcaccggaggctcttggcagacctggactgtttcagaaatgcattcttgggccccacaccagacaggcctagtcgggaactctggggaacgcagcactctggcctctaacagccaagccttctgggtgattctgacacatatcgaatctgggaatcactaggcctctgccttgtcttcagactgggagtgactaagaccagaaagccaaccgcctgccctccaaccgcctgccctccaaccgccagccctccaaccgccagccctccaaccgcctgccctccaatagccagccctccaaccgcctgccctccaatcgccagccctcccggcttccatctcctcccagctacctgcagtgccaccaggtttatcaccttagagcatccacagccacagttacccagagagaagagaaggaggagacacagggcttggggacgaaggcattcaaacaggtaactgatgactgcaaactctgcgatctatctacaggcagcaagtgttgctattacttaaaaacaaaaaaaaccccaggtagtcagtcttccctagaaaaggttccagaccttgttcttccataaatttggggagaggcagggtggtgctgagtcagagtaggaggtacctgcaggtttcaaggtctctgttcgtagcgttcggtaaggattcaaacgtcgtgataaagccttctgacctgtaccctctttcaaagaaagcgtgtcgtgggcacagagacagttttagtcggtagcttcggatttgcctgcttgagatcccgcaagcgccaggatcagccacacagccggcaacagcccacatgtacccaacccagagcagcgggagcccacacctgagccaggccccaatgccagagttgactcggcagccagcagggactcccaccctttccacactccacagggcagggcgaaggtagataacccggtgtcggcgcggaggttctggtgtctccacttgtcaatgtcagaacatccgtgcggttttctgtgcaccggcctcggacggactctgagagcaaagcgcacagaaaagcagcctctctcccaccctcagcagcatagcaccgccacaggccacagggcgcgcgaggccaagggaaaagacacgcggcggctcccgccgtttcaggccgcttccaggccacacccaggaaatctacaagaggcgagagtatttttccctctcaatgtattagaaactctcatctcttttcaggcaggtcctcccacgggaatcccatgacggccgactccacgaccacttccccagcatgactagatttcctgcagcttcgaaatgcaaacattgcctcagacaaaagctaaaattgttacagtcagaaccgaaaccacgagtgagaaggggctctgctcccagtacccacagccacggggagccaccgaccagcatgtcttaccattgttcacctggccgtggaccgcagtggggactgatgccacgtgagtgccgttttgtgttacagtttttattggtagctggtgttgacctagaggtgcctgttgtactatggtcaccgtctggaccggggtggtctgtgccgtctgaatgatccggctggcagtgccgagcgtggcgtggccaatggcgggaataggctctactttcactgaaattaaaggaaaagaaacgacattaatattactggaaagc

SEQ ID NO: 19379 - DNA, 2300 bp, Homo sapien
gtcaggttcaccagggtggcccctggtcccgttgtcgccgttgtccacaccctgcccacctgccaatgctcctgtgtcccctgctctgctccagggccccaaaccctgtgcagagctggggtgcatcatgctgccgccccatggagaaggcctggaggagatggaagccgggaggcttcctcttacaggaagggaagccccagaaatgtgcctggcaccaagaaactgctccaagcttgttccagagtgtggggagggcttgaggcctcccctttttgagtacatggaaaggaaagcctggcattttctggaaacgctcccaagtctccctggcagggagatgtgggaagagtccaggcgcccaagctcttgcatattcacttcctcccatcacacgtgctgtgtacaagcaccctcagagctcgctttgggagacccctgcctcagggctgcgggtgccgccgtccacaccacaggcccttctgcttcctgtttccaaagctcatctcctgtctctgggctgcaggcgctgtttctggtttactggcacaactgtggttgtgtttttgtcaatgacttcatctttgctgctgttgttttgagatactgtcttgctctgtcacccaggctggagtgcagtgccgagatctcaactcactgcagccccgacctactggtctcaagccatcctcctgcctcagcctcccaagtagctgggactacaggtgtgcagcaccacatccagctaagtttttgtattttttgtagagacagggtctcactatgttgcccaggctggtttcaaactcctggactctggtgatcctctagccttggcctcccaaagtgctgggattacaggtacgagccagcatacccagccagtgttgtcgttttgatttgggagttcggggctgagctgtgtttggccagggcctcgcctgctcagtgtgctcctgggctgagctgcggtcctggagcatctcttggctcacatattgactcctccggcctctctactgtcctggtccttcatggggctcacatgtgtgtcctcttgttttctttctgtcaccttcttaagggttcacagatcactgtcagtggaaggtgttgccacagctcaagcctcacagtggaggaacctcatgaggcccttcacggggccactccctgtctggacaggcctgcctgaccagccctgctgggaagcctgggctttgctgctgcttcaccctgcgacattctcctcaggccctgcctttcgcttctttcgttaacattgttcctgccttgatcgtttgctccctcctgcctaactctgctcttcttccttgtgtagcagttacgtggtcctcaaatatcatttgttgactccagtgtttcctggggcatctcctcaagctggctggggttctctgcatctcagctgtggcgcctggtgtgagggcgcacgcttcgcagtgagagtgaaatgcccagttcgcgctggcagagggagaccctgtgaaggtctccctgtgccaggcacaggctcttattctgaaagcagaccccgtgaaggtctccctgtgccgggcacaggctcttattctgaaagtagaccctgtgaaggtctccctgcgccgggcacaggctcttattctgaaagcagacccagtgaaggtctccctgtaccgggcagaggctcttattctgaaagcagaccccgtgaaggtcttcctgtaccgggcacaggctcttattctgaaagacccagtgaaggtctccctgcgccgggcacaggctcttattctgaaagcagaccccgtgaaggtctccctgcaccgggcacaggctcttattctgaaagcagacccagtgaaggtctccctgtgccaggcagaggctcttattctgaaagcagacccagtgaaggtctccctgtgccaggcagaggctcttattctgaaagcagaccctgtgaaggtctccctgtaccgggcacaggctcttattctgaaagggtacgcagcagtttctggaaggaaggaaggagggagggagggagggagggaaagaggaaggaaggaaaggagagcgataggcacagaggaaggtagatgaagccccgcgcccccctggcggagcccagccctgttcaccgcgtgctgtgcgggtgcctgtgccaggatcagctggctggacggctatagccccacgcctgcaggccacatacctgggagagtgtgggccttccgagccttctggctcccggccccacagaggaattacggtcccatgtccctcacaaggaccct

SEQ ID NO: 19380 - DNA, 2300 bp, Homo sapien
cctgggctcaagccatcctccctcctcagccccccaggacacatctttagagggtcaccattcaacgcactgtggtgggcaaggctgctttgagtttcctggttaggatacaaccagcgctgtgtgtggatgtccacacatgcccccgcccccggctgtacagccaccgggagactgagtaaaatgtgaactgaaggaggccccaagggtggcaagcagagaaatgaagggaaatgtcccttacccacgcctctctccttcccccacgtgacacttctcacagcaggtaccggtacgtgtgcacagaggagaacccagtgcccttcagggaagagggtgctgagcccctggaccgcacttaggtctcgccccagctctgtgatttggacctgggcccccgagccctagtcacagccggggcggcccaactcgctccgccatcggaaggcttctggtcgctctcagggaggagcccctctcgtatgggaatcgaggtgttcaatgcccacgatgcggagaccgcctggcccgagtgggccagtgatctcagcttacagtccagctccttcctccccatggctaagaggtcagcaccagctcaggcaagtggcgagggtgggatgaggatgacagacggggtggaggcaggtggctgcgaggggacagtgtcaggacctcctaggagatcaggtgtgctgcagggaacagggagagcctaggaggggacaggaaagtgaggagggggagtggagaggactccctgggcaagagacacgagggccagcactcaggcctccacagccatccactgcatgagccaagcccagggacaaagctctgtgaccaggatgcccccagcagcctgaccctaagagttgagaactgtgccctgtgagcaatgtgacctgagggtcccggagtcctgcgggggctgtgctgtgtgagggccacctgtcctttaggtggggtactaaggggttgtgtcctctatgggctgtgtcgtgggggggctgtgtgtcctctggggggctatgtgtcctgggaaggtccctgtgtcctgggaaggtctctgtgacctggcggtctgtgtgtcctgggggggctgtgtgtcttagggggacctctgtgtcttctgggggaatatgtgccctggaaaggactctgtgtactgggggaggctgtgtgtcttaggggggctgtgtcctgggggggtttctgtgtcccgggggggctgtgtgtcctgggagtgctgtgtcctgggggacctctgtgtcctgggggcactgtgtgtcctggggggacctctgtgtcctggagactgcgtgtcttgggggtcctctgtgtcctggggggtctctgtcctggggactgtgtgtcttgggcaccctctgcgtcctgcaggagctgcgtgtcctgggggggctgagtgacttgggggccctctgtgtcctgggggtctctgtctcctgaagggggaccctagtattgtggcgcttctgggcttgcctctcatgagggatgatgcaccgggcctcagttttgggtcagcctcctttaccggctctccccccttcctccgaccgtcaggtatccgtgccaagccctcaacgggccatcctccttcccgcggcgaccccgcgcatgacaaggccagaccctcccgcgaacgtgctctgcgctcccgcctggcccctccccgccccgcccctccccctcctccccgccccgcctcgctccgcccctccccgcctccgccccgccccgcccgccctgcctctccccgcctttcctcgcctcgccccgccccgccccgccccctcctccccgccccgcctcgctccgcctctccccgcctcatcccgccccgcccgccctgcctctccccgcctcatcccgccccgcccgccctgcctctccccgcctttcctcgcctcgcctcgcctcgccccgccccgcccctccccgccctgcctcgcctcgtctcgcctcgcttcggttagatgcgctcggcgctccataggctccctggtggggcgcgggcgcgcgcacggacgtccagcacgcacgcacgcacgtccagcacacacgcacatccagcacgcacgcacgtacgtccggcacttccggccgcggcggcctcagcgccggcccgaagggaccaggccgccgtccccagcgagaggcatgcagcgctgaggagcggcgacccagcacggcggcgccatgaacctcctgccgtgtaaccctcacggcaacgggctgctctacgccggcttcaaccaggaccacggtgaggaggc

SEQ ID NO: 19381 - DNA, 2300 bp, Homo sapien
gtctggaggaggtgcgagcgtcccgcacccccagggagtaacccccctggctggcatagcaccccctgtcagcacagtgccccggggagcacccatcccccaccaccatcggcacagcgcccccgggaacaccctcccaccaccaccgtcggcacagcaccccggggagcaccaccagccccaccaccatcagcacagcaccccggggagcaccctccccccaccaccatcggcccagcaccccagggagcaagctccccccaccaccatctgcccagcaccccagggagcacccttcccccaccaccgtcggcacagcgcccccggggaacaccctcccaccaccaccatcggcacagcaccccagggagcaccctccccccaccaacatcggcacagcaccccggggagcaccctccccccaccaccgtcggcacagcacccccgggaacacccttcccccaccaccgttggcacagcgcccccgggaacaccctcccaccaccaccgtcggcacagcgccccggggagcacccccagccccagctgcaccagggcttctctgaaggaggtggtggtccggttgtctgggcccccgtcatccagagtaggggaccccagaacggacatagcgctgtggctgggaatcggcttttgggatcagaacctgtggcctggtgtctgtgggaagatgccaagaggggaccgatgcagcgtggttgaggcagcccggggctcctgggtcccccacgcctggctcagtgatgccactgagcacccggcagggagctcggagcgtcctggtgccagcggggctgtggtcgggcctgcgggtggaggacccagacgtggggaggtgaggacttgctggccagcctggggctgctggctctgctctctcagctgtgagaaccccagctcctcaccttggggcaagcccggggcacctctccctcccccagcacccccaccttggggccagcttggaacacctctccctccacccgctcttggcttgggatggggggagctcctgcggttccagctctggggcggtggggatggggggctcctgcggtgcctcatcctggggctgcctccctcttgggcatccctcctgcactgctgccactcctgggtgaccctcgcctgagcctcctggcccttcctgcctgctgggccacccccgagccacgtgtgcctccagcagctgggacccccttctcttacctgtccccttcctacgcctgccccgtctagtagtggccagtcctggggagcctgtctccacagtgtccccaagcgccccgacccttcctgctgcacagcttcaggcctcccgcccagtctgctctcaggtccccactcccccggggccatgccctcgctgggctggcgttggggttgccgtcagcccctgtcctgctccccaccctccgccagctgggcctttgctgcctcctcctggccctgagccctgcaggtccaggaccttgttctcaagtctctccctccctccccgagaccactccttcctgaggggccaaggccacccaaaggccgcactcggccccacgcctgcccctgagctcagtgccttcctaaagatctgcttgcatcagggctggcgcgtgccctctcccagctccaccccgggtctggctgctcaccttagcgaacgcctccctgaccccagctgcccagtgggccgaacagtcaccctcacacttttctccctctcacctcaggagtgagatcccagggggcttctgccaagctcagaatccccccaggccccagcaggaccctgaggctgctctcctgtggtgccggtgccagctctgtccacactgtcgtctgagcaaggtcacactcccaccgtggaccccggagtgtggaccccagagtgtggtccttcctggtgcccacaactgggtcttctgcctgcccccacctgccctcacctccctccccacacccactggggctggggttgggctctgctctgctccttcagggtggcagcggcccaggaggccggcacgttgtcccagctgaggagggagtgctcccacttcacgatggggcactctgacagcacgtgctggcccttcggcctccctgcgaagctggcagattgacctggcccgctgcctcctcgaccatagcttttgggcagctcccgctgtgtgcaaagcctgagcacctgaggtcctgctgaggcttgaattctagatcaatttgcttctcaggaaatgaggcactcactcctaggctttggcaatggccagtgtcgctgg

SEQ ID NO: 19382 - DNA, 2300 bp, Homo sapien
gaggaccttctgtggggcaggagaagagcagacaagggctcccccatcacctgtcctctgtaggaagtggtctggccacccctctccatgccccaccgtgaacactgctggactgctgggtgtgaccccgagggtgggctgggggcctcctgacccctattgtacagtgagtctggatgtgtaggtggggagcgagcaaaagaaggtaccctttcctcactaggtaatagccatgtgacccacagctgattggaacatggagactgagggttagggatgggaaggaaactcccctgaattctttttggcagagtggtggggctggggactaaatgccatctttctcatagttttctagcgtccaccttccatcctcttttcttcctctgaccttccttctaaaaaaaaacagtgctgcaatcccagcattttgggaggccgaggtcgatcacttgaggtcaggagtcaaagaccagcctggccaacatggcaaaatcccatctctactaaaaatgcaaaaattagctgggtgtggtggcacatgcctgtaatcctagctacttgggaggcttgaatccaggaggtggaagttgcagtgagccaagattacatcactgcactccagcctgggcaacagagcaagactctgtctcaaaaaaaaaaaaatgtggctgcattagtaactaaagcaactaatcaaccaatgaataacaggtgttgcaaactaaattggcattccaaagtaaacattttctaggtccaaatgaatgcaaatgacaaatataataatcttgacttcagtctcttttgtaattcttcttccgctccctcttctgttcctcccccacaaaaaacttctaatggggtctagagcagttccctacacaacgcagggtggaggggatgaagtagtgggggcattatccttcttcttggacggagctcgccctttgcctgctgcctgaattctgcaccaaataaaccaatgtgcacctggtgagaccctcagagcgaagggcagacctcggcctggcaacccttgctctctagagcagaggagaagccaaaaggctggagggtcccacccaatgctctcctccagcacgcacgcaaacacatgcatggatgcacaaacaagcgcacgcacacataggagcgcatgcatagaagcagcacacgcagacacacacatgcaaagatgcctgcaaaggcacacatgcacacgcacatacatgtgcagacacctgcagaggcacacatgcacacgcagacacacagatgtgcagacatctgcagagggacacatgcacacgcacatacatgtgcagacacctgcagagggacacatgcacacgcagacacatagatgtgcagacacctgcagagggacacatgcacacgcagacacatacatgtgcagatatctgcagaggcacacatgcacacgcagacatgcacacacacgaacacatgcacacgtacacaggcgcatgtgcacacacaggcattcaggcacgccgcgtaaatggggcaacgacgaggccctggatgaaccgtggggagagaccgcgagcctggattctacggcgacagggactcctccggcgaggcggcctgcgggggccttccggccgcgtccgccaactggaccgaccccgagccccacccggccaggcacccgaggtctccctggtgggcaggtggggaggccccacgctgggaccctgcaccgcccctcgcccctcccgactcggggcgtgcagacccgacgaccgtgggagcgagttcgtggcgctcacgggcgcacgcgagagtgtaaacacccggccccaccccctgatcgcccccaccccgccccgccattggctgcgggagcagagtccccgcctcctgcttgttctggctccgcccctgccccgtctccgggcctccattggctgtggtgacagcgacctttcaggaggggcgggtgggcgacagcccggaggcggtgacgagagtaagatggacggacaaccaagccagtgaaagcgcgcagctgccctagcaactgcggtccaccaatggcggggccgggcggggatgcgcgctgtcagcgctgggcggcggggcggggccggaggcgagcaaggactcggggcccgcgcggcgcctctcggggccgggccgccgcctctgcgctcagccccgcaggccgggcatgggtgggggcgccgggccgtcacgatgagcgccctgggcagcccggtccgggcctacgactttctgctcaagttcctgctggtgggcgacagcgacgt

SEQ ID NO: 19383 - DNA, 2300 bp, Homo sapien
tagaaacaggatttcaccgaataagccaagacggtctcgatctcctgaccttgtgacccacctgcctcggcctcccaaagtgctgggatttcaggcgtgagccaccgcacccggcccaaaagtcactcctaaaaatgctttctcggccgggcacagtggctcatgcctgtaatcccagcactttgggaggccaaggcaggcagatcgcctgaggtcaggagtttgagaccagcctggccaacatggcaaaaccccatctccacaaaaacacaaaaattagccagtcatggtggtgtgcgcctgtaatcccagctactcaggaggctaaggcaggagaatcgcttgaacctgggaggcagaggttgcagtgagctgagattgcaccactgcactcccgcctgggcgacagagcaagactccatctcaaaaaaaaaaaaaaaaaagtttctcaacaaaaacttaacggtggcatagttctgatgaaaatcttcatgttcatggcatggagttaaaatgtccaaacggtcaaggccacagattaaaacagggacatccgcaggccctggcccgaggggaggagcatacagggagtggttcacccactccaccgcctttggagcaccttttaattctctcactcttctctaatgtgttccttgatttatctattaccatctgcggattttcatctgttcttttttgccttttttttttttgagacggagttttgctcttgtcacccaggctggagtgcaatggcgggatctcagctcactgcaacctccgcctcccgggttcaagcgattctcctgcctcagcctcccgagtatctgggattacaagcgcccgccaccacgccccgctaatcttttttgctttttaaaattatgaaatgcggtatacacacagaaaagtgcgtgaacacacacatatgtaccatttaatagatagttataaaatgatccgcccgcctcagcctcccaaagtgctgggattacaggcgtgagccaccgcttccggcctcaggagaggattcgtgtttgcttctcccaacgtccagggaagcgacatttcctatttgctttagactaaaatctatacttgaattttttgtttactgtaggtaatattaactagggttgcagtccgtggagggccgactatgcgaacggtttctatgaaccatcctttgctgaaggctgaaacctcttcgtcccctgggagagttcctattcaggccttcttgtagttagttcatccttgtgttgacagctgtattagggttctccagagagacggatccagtaggatatagacgtagatccaggacaggagatggactgggggagctggcgtttgcaattacggaggccgagaagtctgtgagccggagaccccgggactcgggtagccgggctcagcccaggtcggaaggcctcagaagcggggaagcggatggtgtggccctcagcacgacccaccccaaatcatgccttgccaggtttctgggaattcctggtccagcccagctggcacctgacactggccgtaacggcagggccactgttagctgttagcctcagggccccaggtttaggggcggtgtctccgttgcacgtgcaccccgagcgcgcccgccactccccacatcaggagctctgttcctcgggttcagcaaacgcccgggcgaaagcaatcttaacattctgggctcccggcacccagaccttgggctgatgccccttgctagtgggtcagctctttagaaaatatattctaactatttccatcagcatttccacttattttgtgcaggagagttgaacccaaaccgtctgggtcggggtcggtcaggccccgccccctgacgtcatctcacccccacccaatcccccgcgcctacctgcctcccggcccctccccttcccgcccctcaatcccagcgctcatctctgcggccacgcccgccccttcccgccacccaatcctagcgcttgtctctgcggccgggccccgcccccacccgccccccgcccaatcctcgcgcggactcatgtttgcccgctcggccgccgtctctcgagtctccgccagatccggggcgggtccgcggccgcggcgggaacatggaggagctcctgaggcgcgagctgggctgcagctctgtcagggccacgggccactcggggggcgggtgcatcagccagggccggagctacgacacggatcaaggacgagtgttcgtgaaagtgaaccccaaggcggaggtcaggcagcgggtcgggcgggccgggggaccg

SEQ ID NO: 19384 - DNA, 2300 bp, Homo sapien
ccacagcaactcctcccttgggtccccctggctcaccacacagcagtgatccctagagtagaagtcagagccagcggcctttcctttcctcctgctacacacaccactgccctgcctgctctcccatcctcatctggggctccacccttacacacacagacacataacacacacacacaacatatacagacacacaacacacacacaacacatacagacacacaacacacacaacatacgacttacagacacaccatacacacacaacacacagacacacacacacaacatacacagcagtgatccccgcagaacaggtcagggccagcggcctttctttttctcctgagacacacaccactgccctgcccactctcccatcctcacctggggctccacccttacacacacacagacacacaatacatacacacaacatacaaacattacaaacatacacacatacaacgtacacacacacaacatacacatagacacacacactctcctcgtgctcctgacttccagctgtcttcatccttctttcagttcttcagagtccccacctcctcagcctcagagccccaccacagctgccatgtcaccgctgctaggaacactcttttttttttgagacggagtctcattcagtcacccagcaggctggagtgcagtggcgcgatctcgactcactgcaacctctgcctcctgggttcaagcgattcttctgcctcagcctcccgagtagctgggattacaggcgcccgccaccacgcccagctaatttttgtatttttaatagagacgggggtttcaccttgttggccaggctggtctcgaactcctgacttcgcgctccacccacctctgtctcccaaagtgctgggattacaggcgtgagccaccgcgcccggcccgagaatgagtctaacagaaggacagagcatgccagggtgtggtgaggcgcagcagctggcctgggggcagcaccttcgccccgtttcacaacgtactgaccgaggctcacgggggatggacacctccagagtcacttaagctgaggacttaagcagcttccccggctagaacgaccccacttaaccagcaccgcagggcaggaaccccgggagcaagactgcagcagccagtcccgccccatttcacgtagcgcccccgagagaaagttcacggagaacaggaggtgtggggcggccgcggttcctgctccggacagttccccgcaggtgcaaactcctccggacgccccggacgcttccgccgcccccgttcaccgctcgccccgcgcaaagggttccccgcaaggggcggcggcggcagtcccgggagagccacccacggcctccggcgggagaagcccaggccgcgccccgcgccgaggcccgcgaccctctccggaaagaaaccggtcccccggcccgcccgacccgctgcctgacctccgccttggggttcactttcacgaacactcgtccttgatccgtgtcgtagctccggccctggctgatgcacccgccccccgagtggcccgtggccctgacagagctgcagcccagctcgcgcctcaggagctcctccatgttcccgccgcggccgcggacccgccccggatctggcggagactcgagagacggcggccgagcgggcaaacatgagtccgcgcgaggattgggcggggggcgggtgggggcggggcccggccgcagagacaagcgctaggattgggtggcgggaaggggcgggcgtggccgcagagatgagcgctgggattgaggggcgggaaggggaggggccgggaggcaggtaggcgcgggggattgggtgggggtgagatgacgtcagggggcggggcctgaccgaccccgacccagacggtttgggttcaactctcctgcacaaaataagtggaaatgctgatggaaatagttagaatatattttctaaagagctgacccactagcaaggggcatcagcccaaggtctgggtgccgggagcccagaatgttaagattgctttcgcccgggcgtttgctgaacccgaggaacagagctcctgatgtggggagtggcgggcgcgctcggggtgcacgtgcaacggagacaccgcccctaaacctggggccctgaggctaacagctaacagtggccctgccgttacggccagtgtcaggtgccagctgggctggaccaggaattcccagaaacctggcaaggcatgatttggggtgggtcgtgctgagggccacaccatccgcttccccgcttctgaggccttccgacct

SEQ ID NO: 19385 - DNA, 2300 bp, Homo sapien
aattacagccatcatgtctgacctttccagagcataacgcgctgtcaggatcgagggaattttccggtattttaatctgctgacatttggaatccgtgtgcagcccacatggtaaatgtggggagatttgctgatgatcggaacagatcaccaggggcctgctgtaggagacggagacatgctgttagtctgttctgtgagggtccatgacggatccacccaggcggcctgtgtggtgaggatccactgagaggcctcccaggtcgcctgtcctgtctcttccagtcttaacggagtttagtccattgggattttccttgaattagggagactgcagaggagtgagattctttctttctttctttcttttttttgagacggagtttcactcttgtcccccaggctggagggcagtggtgcaatcttggctcaccgtgacctctgcctcctgggttcaagcgattttcctgcctcagcctcctgagtagctgggattacaggtgcatgccactgtgcccacctaatttttgtatttttagtagagacggggtttcaccatgtaggccaggctggtctcaatctcctgacctcaggtgatccacccacctcagcctcccaaagtgctgggattacaggcgtgagccactgcaccctgcctgagattatttcaaagcacaatagtttatctgacacacatggcaccaggtttgccactgagagccatcctttctgatggattgggggcagattctttttcctctttatttatttatttttattttatttttttgagaaggagtcttgctttgttccccaggctggagtgcagtggcatgatctctgctcactgcaagctccgcctcccgggtccacgccattctcctgcctcagcctcctaagtagctgggactacaggcgcctgccaccacgcctggctaattttttgtatttttagtagagacagggtttcaccgtgttagccgggatggtctcgacttcctgacctcgtgatccacctgcctcggcctcccaaagtgctgggattacaggcatgagctactgggcctggcctgttttttactttttatgttttttatgttttgttttgttttgttttttttgaaatggagttttgctcttgttgcccaggctggagtgcagtggcgcgatctcagctcaccgcaacctccgcctcctgggttcaagtgattctcctgcctcagccttctgagtagctgggattacaggcatgcgccaccatgcccagctaattttgtatttgtagtagagatggggtttctccatgttggtcaggctggtctcaaattcccgacctcaggtgatccacctgccttggcctcccaaagtgctgggattacaggcatgaaccactgtgcccggccatttttatggttttttttgagacggagtttcactctcgttgcccaggctggagtgcaatggagcgatctcggctcactgcaacctccgcctcccgggttcaagtgattctcctgcctcaacctcccgagtagctgggattataggcgcctgccaccatgcctagctaatttttatatgttcagtagagacagggtttcaccacgttgggcaggctggtctcgaactgctgacctccggtgatccgcccacctcagcctcccaaagtgcctttcctctttaagaacatcctcccctttgtttcctgacacagtgtggtcttcccccacacccccgcgtgttgggatgtgagacaggtcccctgagaggtgcccgcaggctgcctgtcctgtgtgtgtcctctggtgcccctgctcgggagcagctagtgtctttgatgctgacgtctgctggaggccacaggctcctagtgtttttgatgctgacatctgctggagcaggctctgttaggggtgttgtgtgagctggtggagacccaggccctgtttgtctctggcaggggcataagctggtaggagctcgctgaggtcgtgtctgaaggtgactcagtttcgagagtgggcgctgggatcccttggaactaatttcctttcttttacttttgcttgcaagggagaggaggtgggcaggaggaacggccctttgtggcccggtttggatttgacgtggtgacgtgctgtggatacctcccccaggtgagtgcacggcgtttgcttctatttcacaatcaggtcagctgttcagacacacgggttggggggacacacccccctcctttttttgtgagcttcagtaaaagtatttgcaccattttttctttgctgatgtttgagaggttg

SEQ ID NO: 19386 - DNA, 2300 bp, Homo sapien
gagaagaccctaaaagcctgcagagatagaacagtttccacacaaagaataagaactgaaatggccataagcttctcaacatcaaaactggagctggcagcttcttggttcctaaagaacatggtctgatctccaagctggaatttgatacccagccaaactgtcaactaggaagaaagaaatttacagacgtacgagagctcacactggcctgtcaggaaccttctgtcaagatgcgatagcagggtgggcttcagatgagaaaaagccagggactggcacatgccctttctgcagacaccacagtcatcctcctgtcctacctgctgttctgcggcagccctgccactcctgtcaagaggtggctgcttggccgggtgccatgtgtaatcccagcacattgggaggctgaggcaggcggatcacctgaggccaggagtttgagaccatcctggccaacatggtgaaaccccgtctctactaaaaatacaaaaattagcggggcgtggtgacgcgtgcctgtaatcccagctactcaggaagctgaggtaggagaatcgcttgaacccgggaggtggaggttgcagtgagccgagattgcacttcagcctgggtgacagagcaagaccctgtttcaaaaaaaaaaaagaggtggctgcggatccccttgccttgattgcggctttggagaccgatggaaggaggtggaaatgatggtgtgtggcttctgaggccaggtcagaaaaggcctttgcttctgccagctctctgggagctctggctctcccagtgctcactcttggaacctggcctccatgttcagggaagctcaggccacaccaggaggccacatggacatgtcctgcttgacagtgaccgctaagcccaggttccagtgatcctggccgaggtgccagatgtaggagttaaggagcctcccgatgaccccagcccagctgagcaagtgggcaggaccgcggggataggcagctcccaaaggctccctccccgcggcaggacccctgcatctctgtgggaaaagacaattgttggggccctaaaaaaaacagatttattgattaaaacctcatgcatggccgggcgtggtggttcacggctgtaatcccagcactttgggaggctgaggcacgcaggtcacctggccaacatggggaaaccccatgtctactaaaactacaaaatgtagctgggcaggccgggccggtggcttgacgcctgtaatcccagcactttgggaggccgagcgggtggatcacgaggttaggagattgagaccatcctggctcacagggtgaaaccctgtctccactaaaacatacaaaaatattagccgggcgtggtggcgggcgcctgtagtcccagctactcgggaggctgaggcaggagaatggcttgaacccgggaggcggagcttgcagtgagccgagatcgcgccactgcactgcagcctgggagacagagactccatctcttaaaaacacaaaaaacaaacaataaaaaaacctcacgtcaaatgacttcagcacggactgggctcaggtgcgcacctgctcgtgtgcacgcgtgtgtacccacgtgtatgcatgcatgggcgcgcgtgggcattcctgtgtctcaagtccctttcccaggacatcctggaatcagcagccccaccctgggccgggtcagcgcgtgccatcggagcccccacgtcagcctctctctccgatcggcacctggcgtcccagtgcgcaagccccacgtcatcacgggggccgctgggcccggcctggtctgcagtgtgggaagccggccaggcctgtgaccagcgcccgggccgagggccggacctgcgtccgctgcggggcagggataccgggtccctgcagggagctcaagccccagcgcgcccgcgaagagctgcgcggactcccggctgcttcccccgaatcccgggcgcaggaagcgcgaagccggacgaacgcggggagcgcgcggcgagcccgcctgaggccgcccctcccgccgcccggggtcacgcgccgcgcgctcccgccccgccccgccccgcagcgcctcagccgacaggggcttccgagcgagcagagtcccgcgccccgcactccatggagcagctgctgcgcgccgagctgcgcaccgcgaccctgcgggccttcggcggccccggcgccggctgcatcagcgagggccgagcctacgacacggacgcaggcccagtgttcgtcaaagtcaaccgcaggacgcaggtgctggcccgtgcgcaggcgggggctctg

SEQ ID NO: 19387 - DNA, 2300 bp, Homo sapien
tgaaaccccgtctctactaaaaatacaaaaattagcggggcgtggtgacgcgtgcctgtaatcccagctactcaggaagctgaggtaggagaatcgcttgaacccgggaggtggaggttgcagtgagccgagattgcacttcagcctgggtgacagagcaagaccctgtttcaaaaaaaaaaaagaggtggctgcggatccccttgccttgattgcggctttggagaccgatggaaggaggtggaaatgatggtgtgtggcttctgaggccaggtcagaaaaggcctttgcttctgccagctctctgggagctctggctctcccagtgctcactcttggaacctggcctccatgttcagggaagctcaggccacaccaggaggccacatggacatgtcctgcttgacagtgaccgctaagcccaggttccagtgatcctggccgaggtgccagatgtaggagttaaggagcctcccgatgaccccagcccagctgagcaagtgggcaggaccgcggggataggcagctcccaaaggctccctccccgcggcaggacccctgcatctctgtgggaaaagacaattgttggggccctaaaaaaaacagatttattgattaaaacctcatgcatggccgggcgtggtggttcacggctgtaatcccagcactttgggaggctgaggcacgcaggtcacctggccaacatggggaaaccccatgtctactaaaactacaaaatgtagctgggcaggccgggccggtggcttgacgcctgtaatcccagcactttgggaggccgagcgggtggatcacgaggttaggagattgagaccatcctggctcacagggtgaaaccctgtctccactaaaacatacaaaaatattagccgggcgtggtggcgggcgcctgtagtcccagctactcgggaggctgaggcaggagaatggcttgaacccgggaggcggagcttgcagtgagccgagatcgcgccactgcactgcagcctgggagacagagactccatctcttaaaaacacaaaaaacaaacaataaaaaaacctcacgtcaaatgacttcagcacggactgggctcaggtgcgcacctgctcgtgtgcacgcgtgtgtacccacgtgtatgcatgcatgggcgcgcgtgggcattcctgtgtctcaagtccctttcccaggacatcctggaatcagcagccccaccctgggccgggtcagcgcgtgccatcggagcccccacgtcagcctctctctccgatcggcacctggcgtcccagtgcgcaagccccacgtcatcacgggggccgctgggcccggcctggtctgcagtgtgggaagccggccaggcctgtgaccagcgcccgggccgagggccggacctgcgtccgctgcggggcagggataccgggtccctgcagggagctcaagccccagcgcgcccgcgaagagctgcgcggactcccggctgcttcccccgaatcccgggcgcaggaagcgcgaagccggacgaacgcggggagcgcgcggcgagcccgcctgaggccgcccctcccgccgcccggggtcacgcgccgcgcgctcccgccccgccccgccccgcagcgcctcagccgacaggggcttccgagcgagcagagtcccgcgccccgcactccatggagcagctgctgcgcgccgagctgcgcaccgcgaccctgcgggccttcggcggccccggcgccggctgcatcagcgagggccgagcctacgacacggacgcaggcccagtgttcgtcaaagtcaaccgcaggacgcaggtgctggcccgtgcgcaggcgggggctctgcgggtctctgcggggcctgggaaggcggaggggtcgggggcaggcgcatttcctggggctgggcctggggaggggtcagctttggcccttgggaggtggcacctgctgggtgagcccggctcaagcgttctgtgaaggtttgtgtctgcacgatccgtgaccttcctttggcctccatgcgcagcgcacaggcttctaggggtggttttaactttcctatccagcaagcgtcgggggatgtgaggcttggggtccttggctcagctctgggccgcccctctcagcccaccgtcctcctggcagtgggaaagaagcagagacatggctgggcccctggcagggaccccacgggccaggccagcgttctccttcccacaggccttgtctgtgtttagacctgatttctatctcctgctgaaaatagttctgtttaagaatgtatggaaggccgggcgcggtggttc

SEQ ID NO: 19388 - DNA, 2300 bp, Homo sapien
gcaggagaatcacttgaatccgggaggcggaggttgcagtgagccgagatggcgccactgcactccagcctgggtgacagagcaagattccctctcaaagaaaaaaacaacaaaaccaaacaaaacctgcagacatatatgtgtagcgaaataaaagtggccagagtttgctaaggtagcgcaacactggttcctattctgtgggtcgattaaaactataacctcagaggttctccactgtgtggggattctagacctaaattaggaggaaatcctaagttagacaaagctagactcccctgaagtcaggtggcccctatttctgggcttggcaggcagtgctggggctggacaccgaagcagatcgcgagtgggctttgccttatttccaagaacgaggtgatgagaccggggctcccagaggccagcgataactgcagccgttgctctcgtaggtgaagatcccggatctgttttgtggcctagagattgtccccgcgttgctccacggggatctctggtcgggaaacgtggctgaggacgacgtggggcccattatttacgacccggcttccttctatggccattccgagtttgaactggcaatcgccttgatgtttggggggttccccagatccttcttcaccgcctaccaccggaagatccccaaggctccgggcttcgaccagcggctgctgctctaccagctgtttaactacctgaaccactggaaccacttcgggcgggagtacaggagcccttccttgggcaccatgcgaaggctgctcaagtagcggcccctgccctcccttcccctgtccccgtccccgtctccgtctccccgtccctgtccccccgtcccccgtccctgtgcccccgtccctgtccccctgttcccgtctccccgtccctccgtctccatccccccgtccccccatcctcctgtccccgtccccccgtccccgtccctccatccctgtcccccgtccccctgtccccctgtccacataccaatccccctgtccccgaccccccatccccgtcccccatctccgtccccgtcccccctgccccgtccccgtctccgttcccccgtccccatcctccatccccgtctcccatcgccgtccccccgtccccgtcccccgtccccgtcccccctgtccctgtcccccttcccccgacccctcccagatcctggggaccaataaagcccgcagcgggtctcggctggcgtcctgcgcctcgttcctccgctcgtggggctgctttcagggccagacgcacggcgagctgtgcacggacgtttttgcggcgattcaggggaaacgcacgcggacccggtagccaaggccaaagtcggcgcagcgcccaccgcggcctccgggccccgctcccgctcccgctctggggcgcgccaccactcggcgcggggcccgtgtgatccgcgcgggtcccagcgtggcgcgaataagtgtcagggcggttggctctgaggggtgggtcccggggctcgcctcgcgcccccgactgcgtgctcaggccccgcccctccccgtccacgcatgctgaggctccgccccgctccgcggtcccccggtcccacccgcccccgccccgcccccgccccgccccccggcgtgttgtggctccgccccgctgtctccggccccaccgcaagccctgcccctcccacccacgcgtgcccgggccccgcccccgttgcgcgcagccccgccccctatcgcgtgctcaagccccgccctggcggcccccggccccatcccgaagccccgcccccccgcacaccgcctgctcaggctccgccccgctgtcctccggcggcggcctcaccccgcagcccggcccaccgcgtctcaggccccacctcctgtcctgccccgcccaccgcgtgctcaggccccgctgagcggtcccggctccgctcgcgccctgtggggtccacggcgcgctcttccagagcctttgggacccgtgcccgctcgcgtcctcaagtgcacgcgccgtcccgcgcgcggtattttggcggccgacgcgttccgtagcgaggccggcgagtggggtcggaggtcgcggggcggggccagcgtcggttgccgccttagcgggcgcctccttttcatccctcatccttcatccctggctttcgcgctctagcggagtgggatctgcgaacacgtgaggcgggggcgcggtccccaggctgccgagatggccctgagcgacgaaccggccgcgggcggccccgaggaggaggcggaggacgagacactggcctt

SEQ ID NO: 19389 - DNA, 2300 bp, Homo sapien
cctggcactcctgccgctgagaggtggagccctcggctcccgccttgcatctgggcagcacgaggctgcctcagcagagaaaggtgacagaagggacaccctgacaatctgcggcccagccttctggaggactggaaccttccgccttgctctcttgaagtcctgagccatcatacagctgaccaccctgctagggaggcctctgaagtgctactaagtgaggatgaggttccagctgatctcaggattccagctgcccctccaggacagaaggcaggtgagtaaagctgtcctggaccctccagaccagtcacctgccagctttctcccacggagccacctcagtcagtgtccatgaaacagaagcagcactcggccaggccctccacaaactcctgacacaatatatcctaagacgtaataaaacggtgcttgttttaagccactaagtttgggatagtttgctatccaggaataggtaagagggacagggaactgctgttttttgtcataagacttacataactctttttgacttcataaagtatatggatgtctcaatggacaaaagccaccaaaaaaaattttaaggtattaaaccatcctaggaaacatggcaaaaccctgtctctacaaaaaattctccaggcatagtgaccgtgcctgtagtcccagctactggggagactgaggcgggaggatcactcgagtccaggaggttgaggctacagtgaaccgtgatcgcaccactgcactccagcttgggtgacagggcaagaccctgtctcaaaagaaaaaaaaaaggaattaaatataaaagtaaacgcaaagccatgtaaaatcttaagtcttaaggaaaaaaataacaaaaacaaaaaaacagaccgggtgcagtggctcacacctgtaatccaagcactttgggaggccgacgtgggtggatcacaaggtcaggagatcaagaccatcctggctaacacggtgaaaccccatctctactaaaaatacaaaaaattagccgggcgtggtggcaggcgcctgtagtcccagctactcgggaggctgaggcaggagaaacgcagtgagccaagatcatgccattgcactccagcctgggcagcaacagtgaaactctgtctcaaaaaaaaaaaaaaaaaaaaaaaaaaaaaccagtttgtctgtcctggccagctcgtccctatgccacagccctgcagcctctgccctgcagcctcaggctcatccaagggcctgacaccagctcatcccacctcctttcccagtcctcaaaccgacaccacatgccagccttcgctacaactggggtgcggcctccgattaagcaagcaagcagttttggtgggggggtgtggaggtaaaaactggcccccaagttaagtgcctctgcaatttaaagtggggggagggtggtttgcgggagtgcacagctggccccctcccccgcacccacacaccctgctccgcagctcttgcggtgcctggtgtcgggcaagctccggcaggtccctgcagccaggctctgggataagctccctccctgccggctcagctcctgaggaggaccagggacagagactctcaggagcagggtagagggtggaaggtccacagatcctcaaaggcctcactggacctcatggcaaggacgccatgaatactgtgcctcccagggtatgcgcgcttgagaatcaatccaagtgtttgcctcctgcgtacacatgctcaagttctaaaggaaagtctcacatgtctttatcatgacgccaaatattcatcgggtgtgattctgatgaatatagtaatctctattctaactgcggacacatcgaaagccctctgacatatggccgtccaggcagcaccgacgccgcactcacagacagttgagtctggagacagcgctgggagtcggcgagataacttgcttgctgggtccagtgctggggaggctgcccgcagcagctcggtgggtgcaaacacatgaatcgtagctgcgggcaggaggaatatcaggtgcatctctacgccccgagggctcaactcctacacttaaatccctcccactggaacagcaggctccagtttcacccagcaagcgtgagaacaggtactgcttcctgagcaccgccagccaccggcaccaagaccggccacatcccagcactgcccacctctggtaagtactcactatttcttttcaaattcaagttttattttaaaactcttctcagacgtatctaaaatacccagctgaacgcagcgtttgctccgtgtctgct

SEQ ID NO: 19390 - DNA, 2300 bp, Homo sapien
tggtcacaaggcccgagtcacatgccccagcttctccgaggaagtgcagagtccagccgcagggaggactttctcaaccggccctggggccagctgtcctgctcctccttgtttgctgtgggctcacctctgtgggctgctcactcagacccactcgcacccatgggaccttcccacctgtttctcctgcctccttcagtctgtgcccagcaccccgctgtcaagcccattcccccccagcccctgacgttggacatgctggaggagactgtggccctgtggcgtgttctgggccatctccagggcctggagcgggcacctgtgcccagcactggaggctgggggacaagtgctctctctgataaatgcccccgagtttcagttctgtggctgtagtttgtaggtctcctagctcagcatccccgagcccatgccctggggactcatggggccgaggagagaggagcgcagagaacatgaggatacgtgagccccttgcctgagaggtgtgctgtgaacctggagagcaaggccagtgggtctggggtgacagacagtgcgagatgcaggaaaacaggctcgagatgctgtgaatctggagaacaagtgggcctgggtctggggcaacagacagcgtgagacacaggagaacaggcgggatgctgtgaaaccggagagcaaggccagtgggtctgggtctgggtctggggcgacagacagtgcgagacacaggagaacagacgggatgtcatgtgcattgtggctggcagggccggcgcctcacacacacgccccggaagtcaggatgtggtgctgacggtgtccgcgctgccaggctggagcgggtgacggtgcctgcgctgccaggctggagcgggtgacggtgcccgccctaccgggctggagcggagcttgctctctctgcagtgggacctgctcacttttccttagctggatgtatctttcacatttagcttaacagcagagctggtgagaggacgcacacctggcgtcaccattgtcccccgtgcatgtccccggcgtccttcatgttgacgcgggccccgccccacggctcaggtctgtcaacttccctggaacaaggcagagcacttggcccctggaagacctggaaaccaggaacctcggaggcgctggcggccttggaggccgcttatctccgcgtgtctgaaattctgttttccaccttttccctttaggctggtaggaggcgcaatctctcaagccttccttagaaaggatgattgtcctccaccctgccccaaaccccctgtgttctgtgcaacgcctgatgagagcgttctgggttattcacagtaactgagctgggtgatctcacaagaggacataatgaagcccaaggagcctggtgggggccgggagaggccttgctctgagtgtggctcgcatgggggcagcgccttggcgtctgtgtgtggtgcggtggttttcctgccactctgtggaaggggcctctgccagacgccttgtcttcagggcctcaggtccctctgggcacggtgggtgttcatgtgtttctgcagggttaggctctgtgcatggcgtggtctgcaggacctggacagcccctgccccggggcatttgtgtcggccaccttggtttgcccccctgtccaaacgctgccagttctcgtcctccagggcactccgtttctgtcttttcattcactggacctccccacctcctgcgccgccccaccacagcaggccaggtgcgttctgcccccaggccctgtcctcgtggctctttgatcctgtgccctcggtgtgcaccgtctcgtggctctcgttagaaccagggtcggccacccccagctcccacatggcgtctggtgtcttgggggtcacatgtgtctgtctgcagtccctgggtgcctcaagctgtgtgttgcctgtggggcatgtctgaacctcaagtgggcctgagtcgtgagagaaaggctttctcatcgatactgtgtggtctgtactgttttgcagaatttctttttaattaatcctttctctttttcacagtgcactggtgattgctgcggtgtttgaccgagacataaactgcagaagagcagcctctgtaagttttctcattttgatatttcctttcctgaaggtggggggtgggcctggtctccctgatgctcctctgtgcactgctgcctggccagctcacccatccacagcaggagccgcgagggagctgctgagagtgccagctgcgggcaggccactggttcttactgtctctgggcgtcttcagc

SEQ ID NO: 19391 - DNA, 2300 bp, Homo sapien
gcccccactggagaggggcgtgctgaggccagagcccggggtgacgaccgtgctgggtgggccctggggcgcactccgccatcactctgtgttccgggttcccagatgctgcttcctgggaggagcagcccagtcgcatagggagccacggggccctgcagctgagctgaccagcctccctgtgtgtgtggctggatttgagccacgttacctttatcggggcagctcaggttggggattgattgacagggaaaggaaaggcctttacacttggtctaaatttaggcaagcagccagaaaatgggatattcccgtgggtgcgggagtcttgcacctcagtcctgagcctgagcagtgtgagtctcagagcatcctgcacagtgaccagcatgcggacggcagcgggagcctcgtggaagaagcggcacagattttgaagagacacagactttgaaagaaatgcaagacgcgcaggtgcggagcgtctcccagccccgcacggccatgtcctgctgaggttggatagaaacatttgagaagaaggtcgagaacttggcaaggcaaagcaaacgggagtggacgtgtcgcatagcacacagggaagcagcctaaaaaccctcggatttggaggaggctgtttctaatacacagatttggaatgaagttgtaagaaatgcgttacagtggaggccgctgggtaacagcagcagggatggggggtggttggggagcggcctgggggacacagagggggctgggggcagagacgagggaccagcttctctgtccaggttcgtcttggctggagttggagactctggtcctgagtggtctctgccttctccctactgagcccaggggctcttgagcaggttgtgactaacccatgggcagcttccacgttcagggcctgtccgacattccagccctatgaccctgctcctaggcgagtgctgtccaggcccccgacaccatcaggcccttgtggtggcctgtccacacccaggccccccacttcccccctgcacaggtgaggaagttgaggctcagggcagctgagcccgcttttgtctgctcggagcctgttgttccagccctagcctggccagacagagccttggcccctgtgttggtcttgctttgttctcaccgtggggggatgctggacacagagtccccttgttcttgttctcggtgagacctggtcctgggccaccccggatgtttccctgggctcctgcctgctgtgatgtggggcatggagttgtaccccagtgggcgacatcccaggttgtggcacctgctgtctttctgcagagtgagccgcaacagctccacctgggtgcaggtttctcccctgttcacggttcagtgaaggatgctcatgctgtcactgattgcagcagcctcaggcagaagtttatggtatctccatcagcccaagctcccagtgtaacccttgggagagatttgctggaagaaagccgcatggtacctgctcattccggcctctcctggtgggaaggagggatgtggccccgggtgttctcaggagtgctggctgttcagttacgttgacttgcgaagctattacatgaaggtgtgaggttttaatggtcaagtgcagggtggtgatgaatgggttaaagacgtcaaggaaggatctgaatcccggcctcggaggtgggcaggcttgggagacctttgaaaaaccctgctgtggtttatagctgtaaggctttctatgtggggtttaaagtttgtcatttgtattttcttaggaaattatttatgttgtttccagaatttcacatcctggaacctgagagtggtatcagtaacaccatgtaggctgcggggctggagctggggctccactgggaggctgtcgtggcggggtgggaggaggtgccgcctctcccatgtcagagcctcggcggctgctggtcctcgatgcttctggggtcagctgtcaccacccccaagaaccggctgggccagctgcccccagtcaacgtcttgcctgcccgggactgctgagtgaggcctgggctctggtccaggctttgtagaccgtgcaggcggctgcatccccgacctgacccaggcctgctcgctctggtgtgcaccgacctgccagctttgtggcactttgtggcatggggctcaggccgatggaggtcagtggctgtaacactgttgagacctgaagaccgtttacggtgtatgttttcgggaaaggtctcttaccacgtaccgaagtggaaatgtttgagttgtttgaaaaagatgaaatactt

SEQ ID NO: 19392 - DNA, 2300 bp, Homo sapien
taatgtccactcaatggaatgtagtttttgtgtgaaaaattaaaaatggaattgggaacagtgactgaaacttgtgtttcatgttgattggacacacctcatgctttactacgctagataggggacatttactcacgtgttaaagaggggctcagcttcaggagtgcggccttgccgtgagtgctgtctctgcttatgatttttctcctggtcgccccgttttacccgtgctggttctgtgtggggcttggagtttgagaggaagcagctgcaagcacggccacacctcctcctgatgcttccctactggatgtcctaaatgctttcccaccgtgaaatcttggattagaagggactgtttctttctgtttcggtaataggaagtgttttgaagttgaagttatctgtagattgtctatgaaatgagtaagaggtattttagaaatcaggttagaaacaaatgtttagcacctctaattgcagtttacagaattatatcaaactgttttagttgtgtaattaggtactggggaggttacttcagttatcttagttgatccattgcagcagaaatgtgaaaaagggtgtgactttatttatttatttttggagacagaatctagctctgttgcccaggctggagtgcagtggggtgtgactttatgaagtgatttatttgccttaaattaggaccagaagcatgcccgatgcatttttaacattaaccattaaataccctaaagatcgattccccaacagccctgctgtgtagaccgtgcagaaaggacgtttctccgtcaccagcctgggcagaattttgaaaatgtagcatttggcctctttcccaggaaggatctttgaacacacttatctgtatttttataccctttcaggtttcctcaacatttaatgtccttttttgccttatcagttctttcctattaatacttggccatatattttatgtggaaaatctactggcccgatgcagtggctcatgcctgtaatcccagcactctgggaggccaagacgggcagatcacctgaggtcaggagttggagaccagcctggtgaaaccccgtgaatactaaaaatacaaaaattagccaggcgtggtggcgggtgcctgtaatcccagctactcaggaggctgaggcaggagaatcacttgagcccgggaagcggaggctgcagtgagccgagatcgtgccactgcactccagcctgggtgacagagtgagactccatctaaagaaaaagacaatctaccaccttttcccgagtttcctgagtaacacacctgacagctatgggaagcttcagcatatttcccttgttgctgaggtttctaagccagcctaaaactcgcatgtaattagctgtgtgcgttttataaaaacatttgccaacccaagacctgggtccaggcatgtcttcccccagtgtgtttggcttcctcacgatgccaggccctgcgtgcagaccagatgccacttgtgaggacgcaccggcaggcaggcccctccaatcctgagggcggcatcacggggacctgcagtcatggctgcaccctagtaccgcggggcccccctgcacccgaggcagggtcctgctgtcagcctggaccttggggtgagggaggcagtggtcctgttcagcagagggcatgggactgagcacagcccatcagggaggagagttagcagggccctgggccctggcggggagctgctgggggcctttgagccatagtgaagagtgtggattgtcctgaggtcatggcactttgatggtcaggtctttgttttgaacatatccctgtggctgtatttggtgactggaaataaggagagggcttgagggctcttgggagacgggagagggctgggggcctggaggtgtgcccgctggaggaaggtgggagttgccagggcattacagagggtctcagagctgtgttggcatcactccgcaggtggagggcacagctgagggcgacagtgtcgttgagtgcgaggaggttggggcctcagcttgcacgtgctggcctgcgaggaagcatcagccgtgctgacatggagatgtttcctctgcaaattggagtttcggacacacagactggaattgaactaacgggcaccccaggaagactgtggggcgagacgaggaggatggggggaccagccgtcgccccactctcctgttcatcatcacagcctcgttggggtgtaaacgacccccagtaagctggtgcatgttcaataggtacatttttgtaaatgttaacatctgtaaattc

SEQ ID NO: 19393 - DNA, 2300 bp, Homo sapien
gagcacacggtgcaggggtgtcacctttccgacgtacccatgggtgcccggagttgcctccttagtgggatcaagaccatcccccacatgtcatggacagctggtgacctgtaagccgtttctggatctaggagtttggcttgggatggagtggggtgtcgagtgctctcagaagggttcaatgtcccccacttcccacccacgacacgggtcgtgccctggagatggcagttggaggcagtcctacgaccttcacacgaccttcacgtgctccccgtgtgctgcggggtctgcttttagggtcgctcttggtgtttgagcagtaagtctgcacaggagccactgcccaccatgaaaggggggagttaaaggcgttccgaatccctttggccaacgacggagttgaaggtgttccgagtccccgtggccggcggcgacagagttgaaggcgtttggagtccccgtggctggcggtgatggagttgaaggcgttccgaatccccgtggccggtggtgacggagttgaaggcgttccgagtccctgtagctggcggcgatggagttgaatgcgttccgagtccccaggacgccattttggctgaatttcctttaccctcctgctccgtgaagcggggcccattggggaggtgctgctctgtaatctgctcttcttcttgaatgtgtggttagggcagccacattgatgtcccccaggctccagagtgaccgccccttaggggtcctgctgggcgttggccgctgttggccgcagggcaccgttggcctgtgcattgctgccacctacccatgatgggcagaattgtcacgagctcaggaggaaaccatggaaaaaccgcaggtcctggagcctccgtgtggttgtcgtgggcagctttccacgcgacgtgccctccctgggcgtgaggctgcatttgcacttagcggggagagggggaatgttgtgggttctagttgggctttttgatgatgatatttggaaagacttgagacaaagtagccaccctgtcctgtcccttcctcacccaccacacccactgctccccgctggcaggcactgcaggctgcacaagtaaccgtggaacctaaacactgatgtgcttcgtccgggttttaaaaaggcgcccttaccgcggtttcggtgtttggcgtcttcacgccatccgggttctcggtgctctgctctgaaggatggtggagggctgtggtctgttgttgggggtgctgggtgcagggtggtttctgtctgcctctctctacccccaactccagctttcccaccctgccctctgctctggggcacgtgtgctgttgggatgcatccctcagggttcacggcagggtgtggattgctggggggcatcgtggagaagggcatctttatgggaggcatccctgctctgggccccctgccggcctccagctgtgtctgcaccatgagtgtgtttgctggagtgcggtgtttgcactccctcacaccgctgagtgcaaacgcggcactcctgcacatgtcgcctcgcaccgtggcgggcgtgtcccgtggaaagctgcccatgctgcccacgccctccctgggggccccttggctgcctgcactccccagccgtgacctcagctcccggcgccggccctccttgtgcagctccttcccctccatggcctttgctggccccaggagactctggcctgcaggctctgaagccggctgtgtccctggtgatcctgactgagccttggtgtcaactcaggtttttttctcctcctcgttcatttttacacttcgtaggaaattattttccctttcagctttcaagtaggaatagttcagaaggggaaatagttctgcatagcgtctgtggtcttggccccgcatctcccagtcccacatttttatttttccaaaggcaaccctttcagttttttagctgtctgttttccttgcttctgtatttctgagttctgtatgtacgcagctgtttcctgatatccttagttttagatgtgttctttcaagtgagacaagactccaagctcttgtcggggtgagaaatctgcgggttcacgggctacatgtgggagacggggaggggctgctggtcactttctcacccaggccagaggatggcgcccttacccccgaggacgccggcatgtcggtgacatgccgcccgcaggagcatcaggtgcgccctggccgcaggtgccccggaggtgtcgaaccgcagatttcttcagacgttttttgcacattttgtgggaaaagtggctcaacccttgggagt

SEQ ID NO: 19394 - DNA, 2300 bp, Homo sapien
cttctttatgaaagtagcattaggctggctttacgccgtgtcccgtgcgtagctgctgtgccgcctcactgtacatcctgcacccccgtgctgaagttcaggcttgcttctcgcacatcatgttcgagggatctgcttcatgaatcgtacttttatttttaaagtgtcacatgcacatatgttggcccacagtgttcctttatgtcatatgatagaacatgcattattaatcacgtcaaaagtgtgtgaatcaccacttaaaattattataagtatataaaaatcatgcattagcttggcatggtggcacacacctgtaatcccagctacttgggaggctgagtgtggggttgaggctgcagcgagctaagcttgcaccacggcactccagcctgggtgacagaatgagactctctcaaaaaaaaaattctctttctgattcctattttgaggtaggccactttggaaacgtgtctgctttgggaacctcaggcggctcctcctttgttcactgtggctttgctcctgtttggggcacacgtcgggtgtggctgtacacgatgggcagcagagggcctctcttcacactcgttgcttcctttcagaggagctgatcacgcagtacctggctgagcttcggaaccccgaggagatgactcgctgtggcttctcgttggccttgggcgcccttccaggcttccttctgaaaggccggctccagcaggtgaggctggccacgcgcagtggacggggcctagggcgagggtgtgggagcctcgtgtgttggggcatgaggtaggcccagccgttaataaacccatcagtgcttgtagctgggagggggttcctggaaaccggcacctgtggccaggaggaagggggcagagggcacccaaggtctgtggccccttagggccctggcgaaccctttgctgtcagaggacagacttgaaaaagctgaattctgggagggaggagaaggtgttgtttgtagaagcagctgccgagagtgaggagaacacagttgcctttgtgcgttgtggagccgggtcctgttttggttgcggccgtgcatcctgcatccaggtcggggcagaggtggttccacgtcctcccagaggtcagccccacgctggcctcagtgacctgctctctcacgctttcctgtggtgctggtcccactgaccaacctgccgggaactcctgcttgtctcccctccggccacctggcgtctgaagctggaataggccctggccactgggttccccacgcccttccctccccatgggatccagccttggcacttcaggatctgcagctccagacggactcctgcctgtgtggcgggtgggcctcgcagccgccatgccatctaaaactcgcatgtgggggtttatccagttgaaacacagataaatgtgaaacaggatcacttggagatatgacagatgaggttgtcgggacccagcagcttcctttgtcaataccccaggtctcagcgtaggacaaaagggggggacctcaggtagggtgtggccagacccccagtgacaccctggggtgggggctggccgtggagaggctggaggtgacctctccccgggtgtccttcctgggttgtactgggggccgtggagaggctggaggtgacctctccccgggtgtccttcctgggttgtactgggggccgtggagaggctggaggtgacctctccccgggtgtccttcctgggttgtactgggggccgtggagaggctggaggtgacctctccccgggtgtccttcctgggttgtaccgggggccgtggagaggctggaggtgactcctccccgggtgtccttcctgggttgtactgggggccgtggagaggctggaggtgacctctccccgggtgtccttcctgggttgtaccaggggccatggatggccgtgaggaaggtggtgccaggagctgcctatctcatggtgtggggtctgtggctccgggccaacattgccacctccctaaagagtgcactttgttatagcttatggttcttctgtgattctttattgctttccaggttctcacaggtttaagagcagttacccacacttcccccgaggacgtaagttttgctgagtccaggagagacggcttgaaggccattgcgaggtgagtcccaacagttcctccctaaagtcgtaagtctctgaaaggccagcagatgaacgctaagggggatgtttttgctcagaggcaggacttatgattcttcacttcctaggtttcctctcttccagaggatcgtcagtcc

SEQ ID NO: 19395 - DNA, 2300 bp, Homo sapien
ctgtaagaaagaaatcaagaattcaaaagatatccagaagctcctgtcaggcatcgcagtgtgagtttcaagtgctgctggccttagacggaatggcagggcgcagcctcccttggctgagggcaggagtccacggctccaggcgggagaggagcagttagtgttactcctcaagctaacctaagatcgtgcattccaatgttcaaagcagtcgcaatgggaggtgaggcagcccaggtgctggtggagggagttcccgcgggaacaggcgagctctgcctctgctgccctcgcgctctgccctggcgggaggggaggctccggaaaggagctgcgtggtcaggggctgcctccccgattctcctgtgtgccctgggggtcgctgttgagtgccttgctctgcggcgctcaggtggacactgggcaggtgcgccagccagcgataggcaccttggctgctctgtggctccttgaggtgggggtcctcatggcagggcgagcggccctgcaggagatcctctgtgaggcgtcctcacttcccacagtgactttccaagtgcgacactcgtgtgtgtaggcacagtgcagatgtacgcacacacacacctccggcttggggccccaggcccgcactgtgctcacggatctgctctgcccaggtctctgcatgggcctttgggtccggggtttgctggggttggcctgcgcggggtggggctcacctggagccatgtgctgctcccggcaggttctgcgagatggtgcagttccccggcgacgtgaggaggcaggccctcctgcagctgtgtctgctcctctgccaccgtttcccgctggtgagtgcctgcccctgctcacgtgtgtttgccgtgtggacacaagcccctcagtgacaagaaggccttcgctggcactgttgtgttggtgtgctttccagccgagcccctctcgttaacgcgcctgggtgacgacgcgtcacaggcacgcggctgccaaggggctctggacgccactgttctggctttaaggacgggctgtccggctggcgtttctatggacatacattgaggggtgacctggcggtgggatctggctcaggagcttccagaaggacccaggctgaagtggttcagccacacctaggggcagtgcccttcatccccagcactccccggctattagatttctaggatttcttttctcctggctgcaaaaaaaacctcagatgatacaaaggtgacattttcctaaaaggcaaaagtaacttcatgttgtatggtggttctcgaagtggggtgccggaccctcaggcttggcacctctggggcttcagcagtgcagctcttgggccctgtgctgccgactcagcacctccagggtgggcccggggctcagaccaccagcgcagtgagacatgatgaccagggcaccactcaaaaagagagcaggcgagattgcttccctgatgaaaagagagcaggcgagattgcttccctgatgaaaagagagcaggcgagattgcttccctggtgaaaagagagcaggtgagattgcttctctggtgagggagcaggttggttaatagatagcgggcgagattgcttctctggtgaggtagcaggttggttaatagagagcaggtgagagtgcttctctgatgaaaagagagcaggcgagattgcttctctggtgagggagcaggttggttaatagcaggcgagattgcttctctggtgagggagcaggttagttaatagagagcaggcgagattgcttctctggtgagggagcaggttggttaataaagcatttaaacaagaatgatgtcatcttcactgctgggatcctgcagctagctgtgtgtctgtggagggaggaggtggttaatgggcctggaaggcacctcctcttggttgcagccctgctgtggctgggatgggatgcagggtcagcgtcctcctcctgacgccttccactgacggggctccctggcctgggtcctgtcgtctctccggggtggggcggtggcgcttccctccggcaaatgcactgcatccctgtcccagatccggaagaccacggccagccaggtgtacgagacattgctcacctacagtgacgtcgtgggcgcggatgtgctggacgaggtggtgactgtgctcagtgacactgcgtggtgagtgaaggcccttcctgcacggccacctgggcctggcaccgcccctcttcctgtccccaccgtgtctactcgtctctcccaaaaccctctgataggaggaggaaagagggttcccaggtct

SEQ ID NO: 19396 - DNA, 2300 bp, Homo sapien
ttattttcattagcccatttttctattggtcagtatttttcataaggaaaactctccgacatgctgcaaattttcctgccatttgatatttttgtatttttgccattgtgatataatcaaattaagtgactttcatttatggagtctgattcattctaagacaatcactcctggttgtgaaatttaaaaaacaacattgtcccattttgcttctgggatttctagtttttaattacatctttgatacaactggaatttcttttgattacagatgccaatttttctatttggataattgtcccaacatcgtttacatcactgcttttccaggaacgaaatgccgtctatgttggttgtgaacgtgcatttggcacctggcagggccaaccctcatggcgtgtgcgtgaacacatccctaaaccatagtctaatttatcctatttttgtagttcatgtgagcagaatccagtgtctgtgttctcgcatctggttttcactccacgtgtttggggtgtgtgcgtatcgctgtgcatggtgtggactttctccacgtcccgtgtgcaaacgccaccccacccagaggccacgccaggacccaggcctgtgggcagtggttcccggtttgcccttgcaaggacgctgtgtcctcctgcgtgagcatccctgcctcgggtctaatcctgggagtggaaggcaggtcgtgggtgtggctgcatcctcagcttctctggatgatgcccaggaacatgcccagagccagagggcccagctgctcggctccctcacactgggctgggcacttggtcgccagccgtttggggagtgtgttctcatggtggtttcaggtgtgagtctgaccaacaaccccccgtgcccgctggacactggagttccttcctctctggcggtgtttctcatcagggttccccaccggcctactgcacgctgcgtctctcctgacctgtaggagtcccctacacctctggctgctcgactttgttggtttaatgttttgcaaatgtcttcctccattttgtggtttgccttttcattctcctaatggaacatgttgctttacagaagcatctagttttaacagagtcttgtttaagacggtgtcaacacgcactgggctggcctggtccctgaactcaggtgtgtttcctttgcaaactctagagcagagagacaagggaggaaggacagatagcggcagagtgtgtggaaatgttttccaggaaggatggctttgagtgacagcatcatttgagtgacagcagtggtaggtggtgtaatggattctgatgtggtgggggtaaggggcgcagccaagctccgattcctcctgctgggcccaaggaccaaggactgtgacaggaatgcatagtccctcctctgtcctgccagaggccagagacttgtgtccaccactctgccgggctgtcttcaggaacttgttcaggaggtgctggggtgcagggcacgtctgaaaggcatttctggacacctgctgtggcctcatacaggagagtaggtgacctggccaaggccagcacacaggacaagattaagcatccagggacccggggtcacagccctcactccattgcaggggtggggatgacagaggccagaggagatcagacaggggcagctgttgatggttctgagatgcagtttctgtctgaggggcctcctcccactcctggcctgtgcagaggggtgggtgtgtggagggaaggtgggtctgccctggtcaaacagcagaggcattgcctgttagtctcattccattccgagtgcccccagggagagtcagccaccttatgtagagaggcaaggccagaaggcagggggggcctcccctctggtgaccaacagggcctgtggtacaagcagtgccggctgctgccctctctggcctttgtctccttccagcctctccgctattagcagaggagcagaacacttgacaggtggacacaggccacccccaacccctggccctggaggaggctccacagtggcctcctagagccaggagaccggactgagctgaatctgctgctcctgacaggacctcacagggggcgcctttgaggacaacctgaggtcactgcacttgcaggagggccaggacttccttcacttcagctgacggacccatggcagctgctcccaggtgggtcttttcaccgaagaaccatctgggtttgtttctttattatgtttcatttccttttcattctgctcttattctaattttctttacagttagtcctctgcttatgttcagctca

SEQ ID NO: 19397 - DNA, 2300 bp, Homo sapien
cgtgtggcagccccacgagagcaaccccatcagtgcccctcttccagcagcacgcccactccacgtctccacgtctccccatctccacgtgttaattctcgcaatatgtcaaactgttactgtatgtgttacggtgacctgtggtgtcactactatctcggggcgcccatatgaatcagtgaacttgattgataaaatgcgaatgttctgacagcagctgtcgcctccccgctcccccccaccccacccctcctcaggcctccctattccctgaggcacaacattgaaattaggttaactaataaccccacagtggactctaagtgttcaagtgaaaggaagagtcgcacgtctctcgctttaaatcaaaagctagaaatgtttaagcttagtgaggaaggcatgtcgaaagccacgactggcaggagaggcccagctttcagcctaacggttagccaagttgtgaatgcaaaggaaaagttattgaaggaaattaaaagtggtcctccagtgaacacacaaatgatagtgcggatagggagaaagtgttagtggtctgacagatcaaaccagccacaacattcccttaagccaaagcctaatacagagcgaggtcccaactctcttcaattctgtgaaggctgaatgatgtgaggaagctgtgaacataagtttgaagctagcagaggttggcccacaaggcttaaggaaagaagccgtctccgtaatatgagtgtgaggtgaggcagcaggctctccagaagatcatgctacggtcacaatggaggtggccgcactcaaccacagatcttcagtgtagaggaagcaaccttgaactggaagaagacaccatgcaggcctttcataggtagggagaagtcaatgcctggcttcagagcttcaaaagacagtctgactctttgccgtgactttaaaacccatctatgcctagtgttccattattggaacgctaagcatgtgcaagtttatattctgcttaaggtcactgccaagatctgattgcaaaaattcgaaaaattgcaacctcagccataaatgggttaagttgaaggcagtggtcgccattctgagaatcctaggattcttaggaatgaggctaaatctgctctgcctgtggctctagaaatggaacggcaaggcccaggtggcagcacatctgtgcacagcacggttgatggaatagtgtaagcccaccgttaggcccagtgctcagaaaaggagattcctttcaaaatacgactgctcattgacggtgcacctggtcacccaggagctctgaggctgatgtacgaggggttcgtgtttttgtgctgacacagcatccgttctgcagaccgtgggtccaggagtcattccaactttccagtcttattggagaaagacgttttctaaggccgtagccgccaaagatagtgattgctctgatggatctgagcaaagtaatgaaaacctttgaataaccgttgtccaagttaccggggacatttaggtgagtaaacgggaggctccgagaagcagttataaaatgcaaattctacacgaatctggtttagtttttcagaaacagcctcttcaggatctacttctcagggaccccctctccaaccccgtcagtgccgctcttccagcagcatgcccactccacgtctccttgtggtaattctcgcaatatgtcaaactgttatcgtatgtgttatggtgacctgtggtgtcactactatcttggggcactcatatgaaccccaaggcacttggtgaaaacccttcccagggagccggctgagcatgggaaaagaggttcctccttgtcctgcacacgctgtgtccttggagggcccagagcccccacggtcacctgtctcttgcttgttcttccaggggcagctggcagtgtggcctcacagcacatgcttgttccatctcttgctcttttcacgtgtgtagattggaggttattccgtgtgaagccgctggagcccccgggctctactgttgctgtgacttttctattcagggaaatttccagcttatttgagccatattagcaaagtgacaggaaaccagccctatgtacccatccctggagcaagcgtgtccatcttatgtgtcctccacacctccaaatccccacgctggtgttgtggcactcattctagcctaatttcatccattattatttccctatctcaaggagataaaaactgttaaaaggaccataaaaccaccatcccaccacagaattccaaatatcccatcgatgttcaaatcttcctaattgc

SEQ ID NO: 19398 - DNA, 2300 bp, Homo sapien
gggtgtgagtttccttctgtgtgatgggttcacttgggagtgtgagtttccttctgtgtgatgggttcacctgggggtgtgagtttccttctgtgtgatgggttcaccttgcaagtctgagtttccgtctttgtgggtcaggaagggccgcttgtctccattcgcaggcatcctcacctctggactgccgggctgggatcatctcgagcccgcacactcgttcggcggcagggatccgggctgggatcatctggagcctgcgcactcgctcggcggcagggatcctggctgggatcatctggagcccgcgcactcgctcaatggcagggatccgggctgggcgctttctctccacgaagctgctcaggcttcctcgcagcatggtggctgcaagaacaagtgtccaggagagcctgccagaagctgcgttgcctttgacaatgtagccccagagcaccgtgtcacgtggtgtcatgctgaccccagatttgaggggagggagcgcagacctcacctctcagtgcttgagggtcgatggccatgtgaggagggcaggcagggagggactgtggcaggcaacttagggagcacagccccccgtgtcccctcacacctcccttctgtcagtatcctattcctttcaacgttctgactctttttttcggtggaattgccagatcctggtggtccccgtataaattcagaaagagttccaagattgcttgttgggatcaactccagcggcctgcgctttctgctccgcctgttggcacagaggctttcaaatgaattagctcacaacacttctcgaaagccttgaaagtggcttcttctaggaacctggagaaagttagccagcctctcaggccagcgcacaggcctctcattcacatctgctcactgggtccaggccctgtgctaggtgcggtgcccacaaaagctcctgccctgagaatctgacgtctcggtgcaggattaagcgcatagcgcacctcttccctgcgcctcctcctcctcttgagagcgtgcctcttccctgcgcctcctcttgagagcgcgaggtctcctgcagaggaaggtgccggcagcatcgcggctgggcgctgttggtctgtctggaatccacgccttcctactgctgtttagatgcagttgcacgggagagagcttgctgccttcttccaaggttaaaaaatgttgaggccaaaaaagatcctctcacctcctccgtttatagaccaatgctcgtggctcgtggttaattaaagccacaggaattgccagcctcgggcctctagtttcacaggattcccccaccccgtcctcactcttggtgagagacccggtgtggctttacctttccagggaagcatgaagctgggggagtcatggggaggggtcgggcatgcgcagtggaagcaggcgtcaatcagcccccgtccgagaggcgcctctcatgccccagcgggatccaggctctcaggagtgggctggcgtgtactcacctgtcgcccacagctgcctcccaggacccggcagtgctggcctcagggtctcggtgtttgtgtgtagatgctgagcctctctgtcttcacgttttggaacaaaggacttctacctccagcttttgatcagcttccctcaaaatcttttctgttcagcagtcaaacgtgagacagtatagacaagaccaggaaacagatgcaattgtacgtaggtagatgctatgcaggatgcacagaaacagacacaccaaacagtttagaaatgcatctcggtcagattgggtgtggggaaaactcgctgggcagggcggcggctccagagctgtcctaattcacaactatttttagcatgtgctttaggagagagacatgaaaggttcacagatagaattcagcagcatatgaaaagaattacacagccatggccgagcacgtttgttccaattagaaaatgagcaaaatacatgaaaagacatttcactaaggagggtgtacagacggcaaagaaccaggcgaaaagatgctcctcgccagccttcagggagcctgtgttaaagcacggtgccatcagaacggaatgaaaaccgagacacccagtgctggcgagaggcagagaagctggatcctcatgcatcactgagggtgagagacggcgcaaccactctggagactgtttggaagttcctgtaaaaactaaacatgtaactgttctgtgacccggcagttgctctcctgggcatttatcccagtggattgaagacgctgttcacagacaaacctgaacttgaatgttcg

SEQ ID NO: 19399 - DNA, 2300 bp, Homo sapien
agggaacaaccacagggatgtaggattagcagtcgcccaaaggctcagcatgttttctgttttttgtttttttgtttgttttttttccagccttttttcttttttattccagtcttactaaaattggtaacaggtgaatcaaggtctatctttgatagaaacattatattttgtagatcttgagaaaaattatttccttcttttcctctaagtaaatccaaactaaggtaaatttgtaaataaattagggaactcgttttattttttttttaatttttattttttgaaatggagtttcacactcgttgcccaggctggagtacaatggcgcgagctcggctcaccgcaacctctgcctcccgggttcaagcgtttctcctgcctcagcctcccgagtagctgggattacaggcatgcaccaccacaccagggtaattttgtatttttagtagggacggggtttctccatgttggtcaggctggtcttgaactcccgacatcagatgatctgcccgcctcggcctcccaaactgctgtgattacaggcgtgagctaccgcgcccggccagaactcgttttattcttattaacctaagtccaggaagagacagagtgaggtttcatttgtaaagaacttgactaaattgtgttttcaacacaatttcaacttttcttttttggatataaattaagggtgaggacagactaatctcttaagtatcgctccgtatcacttaatattataatgtatgaaattaagacttaactcctgtaatcagttgttttgttggcattgaatttcctggttttactccatcccactttataaatttttgttttgggcttcatgagaaaaggacaatgagaaaaggacactagctacactagcccgaaacgaagtgtaggacaaaggaatcgagagatggacgtcaggcctcccatttgctcagctgggttctttgaacacctcctgcccgatactttgttaaaacattgttttttgtgggctgaggggttacttaaaggggttactttgttgcaggttttctaacatggtttgccgaaatgcttattccacctagaacatgaccagccagcacctgtaatcccagctactcgggaggctgaggcaggagaatggcgtgaacccgggaggcagagcttgcagtgagccgagatcgagccactgcactccagcctgggtgacagagcgagactccatctcagaaaaaaaaaaaaaaaaccaaccagttattttcatgagtgagttggaagatacccagatacttgtttcaaccaaaatgatgtttctgatcagtgattggaaaactcatgatttaccattgagttgggaacaatttgatgcctttcagtttttttgttttgttttgttttgtttttttgagacagagtcttgctctgtcacccaggctggagtgcagtggtgcaatctcagctcactgcaagctccgcctcccgggttcacgccattctcccgcctcagcttcccgagtagctgggactacaggagcctgccaccacgcctggctaattttttgtatttttagtagagatggggtttcaccatgttagccaggatggtctcaatctcctgaccttgtaatccacccacctcggcctcccaaagtcctttcagtttttttttcactttcaaaaacatgtagaaggcagttcagggaaagctaagacgtaaagaatcttacaagcatgttaagagcctggagaaaaggagtggacaccttttgtttgtcacggcatatgtgcgggtggtgaaggggaggtaaattagagccatggaaagggaactaagttttcacacttctgttaatccatttcttttgaattccagtctattatcctcccagtccacaacgctgaaccgtggctggacgaatgtttgaggtctgttttgcaacaggactttgaaggtaccatggagctgtctgttttcaatgatgccagtaaggtttgtaggaacttcctgtcgggtgactcagccccagtgtaagcaacggttgactgttcggagggaagtttcctgacctgccagtgttctgctttcaggacaagtctggggctatcattgaaaaatggagagtgaagctggaagattctggtgtccacgtgatcattggggggcacgattctccctctcctagaggcggtaagtaaacatgcttagtttattaaactataattcgtggtttcttatcaacttacgtaccgaaacagtttcatgttgttcaaatactgacaaaaagtatcctggtggtaattgg

SEQ ID NO: 19400 - DNA, 2300 bp, Homo sapien
ctcacacacctggtccgcgcacctgcgcatctgcctcgctcttacgcacctgccttgcccctgcacgcctgccctgcacacctgccccgcccccgcacacctgccccacaccccacacacgtgccccgcgctcctgactcgcccccgcgcacctgccgcgcgcacctgcctcgctcccgcaccccacacacctggtctgcacacctccccgtgccccacacctgcctgcacacctgtccgtgtgcccccacacaacctcgcaccccacacgtctgccgtcacacattcccggcacacttgcccatgccccacacacacgtcttgtgcctgcacacctgcttcacacacctgctctgcgtcctgcatacatgcccgtgccccatacctgcccgtgcacctgccgtgcacacctgcctgcgcatcccacacacctacctgcacacctcctccgtgcccacacacctgcctgtgtgcccagcacacttaccccaaacacgtgccctaaaaacctgcccttaagccccgaacaccttccccgtgctccggcagaggctggagcaaaggccctcagggttcagacccagccaataggccgatgcagggaacaaccacagggatgtaggattagcagtcgcccaaaggctcagcatgttttctgttttttgtttttttgtttgttttttttccagccttttttcttttttattccagtcttactaaaattggtaacaggtgaatcaaggtctatctttgatagaaacattatattttgtagatcttgagaaaaattatttccttcttttcctctaagtaaatccaaactaaggtaaatttgtaaataaattagggaactcgttttattttttttttaatttttattttttgaaatggagtttcacactcgttgcccaggctggagtacaatggcgcgagctcggctcaccgcaacctctgcctcccgggttcaagcgtttctcctgcctcagcctcccgagtagctgggattacaggcatgcaccaccacaccagggtaattttgtatttttagtagggacggggtttctccatgttggtcaggctggtcttgaactcccgacatcagatgatctgcccgcctcggcctcccaaactgctgtgattacaggcgtgagctaccgcgcccggccagaactcgttttattcttattaacctaagtccaggaagagacagagtgaggtttcatttgtaaagaacttgactaaattgtgttttcaacacaatttcaacttttcttttttggatataaattaagggtgaggacagactaatctcttaagtatcgctccgtatcacttaatattataatgtatgaaattaagacttaactcctgtaatcagttgttttgttggcattgaatttcctggttttactccatcccactttataaatttttgttttgggcttcatgagaaaaggacaatgagaaaaggacactagctacactagcccgaaacgaagtgtaggacaaaggaatcgagagatggacgtcaggcctcccatttgctcagctgggttctttgaacacctcctgcccgatactttgttaaaacattgttttttgtgggctgaggggttacttaaaggggttactttgttgcaggttttctaacatggtttgccgaaatgcttattccacctagaacatgaccagccagcacctgtaatcccagctactcgggaggctgaggcaggagaatggcgtgaacccgggaggcagagcttgcagtgagccgagatcgagccactgcactccagcctgggtgacagagcgagactccatctcagaaaaaaaaaaaaaaaaccaaccagttattttcatgagtgagttggaagatacccagatacttgtttcaaccaaaatgatgtttctgatcagtgattggaaaactcatgatttaccattgagttgggaacaatttgatgcctttcagtttttttgttttgttttgttttgtttttttgagacagagtcttgctctgtcacccaggctggagtgcagtggtgcaatctcagctcactgcaagctccgcctcccgggttcacgccattctcccgcctcagcttcccgagtagctgggactacaggagcctgccaccacgcctggctaattttttgtatttttagtagagatggggtttcaccatgttagccaggatggtctcaatctcctgaccttgtaatccacccacctcggcctcccaaagtcctttcagtttttttttcactttcaaaaacatgtagaaggcagttcagggaa

SEQ ID NO: 19401 - DNA, 2300 bp, Homo sapien
tctgtgacccctgacctctggcccttaccacctaccttatcatgagcctacggcgcattctggcagctacagggctactttttactgagtcctttacaatgaaatgattcctagtaccccaacctctggagaacatgaagtccctggaagcaaattctcagatagcttttgctgaacggtaaataaggctgcattttcactcatgtgacttaagcagtccacttgtaaaacaggctttgcaaacaaggaggcaatttaagggaaaaaaaaccatctatgaagtgatgcttaacagaagtttggctttgttgtaacggttaattgacagaatgatttgcatttaatcttagttttggacagccaaggatttgtccaggaagggctgcttacagccatgctcattaattgtgaattactcattacttcagatcagctggaacaaatcccaagcgggcttaatctctgtgtgcaggcagcccagggctaatggcagcagtcctttttattgacccccacggccctgtccccagtcaacctcctccaagcagggagtttccagaggcctcacagccgcctgggagacccctcatggcaggctgctcccttgacaagttcagaactgctggggttcccggccgcgcgttcaggactcaaatctggagatatccgctctgtgctcctcaagtataaggttagatagggatggggcctggcctgtgttcctggcagggaaggccacctctgagctcccccagagcccggccgccttctccgggttcccagccctgcagttcccaaggctgcatgcggaggcggaaatgagggcaaaggtggagggtacccggagctactgaggtcatgtctttccccaggcaccccttctcctgggggacctcacggtggggtcagggcctcactcccgggcacccctcctcctggaggacctcacggtggggtcagggcctcactcccgggcacccctcctcctgggggacctcgcggtggggtcagggcctcactcccgggcacccctcctcctgggggacctcctggtggggtcagggtctcactcctgggcacccctcctcctgggggacctcgcggtggggtcagggcctcactcccgggcacccctcctcctgggggacctcctggtggggtcagggcctcactcctgggcacccctcctcctgggggacctcgcggtggggtcagggcctcactcccgggcacccctcctcctgggggacctcctggtggggtcagggtctcactcctgggcacccctccttctgggggacctcacggtggggtgagggcctcactcctgggcacccctcctcctggaggacctcctggtggggtcagggcctcactcctgggcacccctcctcctgggggacctcgcggtggggtcagggcctcactcccgggtacccctcctcctaggggagctaaccccgggcacccctcctcctggggggacatctcagtggggtcaaggcctcaggcctgggcacttctcctgggggacctcgccccgggcacccttcctcctggatgacaccccggtggggtcagggcctcacccctctcctggggccgtcaagtgtcctgcacgccctgctctccctaccgcgtctgtctgaaaggacgccctgcagtcccctcgtcctccccggtcaagtagcacagcccacagcccgggtgaaatgcaacgaccttttacatatcagccttgcttgaggctttacagcaactccaggccgcctggcttgggtttgcagcgcggcgccctcgcacagccccgccttccccgcggcggcgtctacgggggaccagagattgtgacgcgcgccctaggggagagcaggaggcttccacgggccaaggaggcggctccgagaggtgacccgggaccggggcgtggcccagggcggaagactgaggcggcgacctcccggccccgccccgcgccgagcagccccgccccttccacgcccctccgggaggcccacccctatggacgccgctctgcaccaatcggagattgcctggcctcagacccgcctcctggtgccgcccgcgcaggcgccgtaggccgaagcggcgggatgagcggagccggcgtgggcggggcgtccgaggagagccaggccatgcaggcccacgtggtaggtgccagcggggagggtgccccgccgtgcaggctgggtcctcgcgtcccctcaccccgccctccagtcctctctcgctccggggttcgcagccccgcaccgcctctcgggctcacctacggg

SEQ ID NO: 19402 - DNA, 2300 bp, Homo sapien
gatcccagtcttaggacagcccgctgggcacaggaggctgggcatcctgccaggtggcagatctctgccccagcctaggctggaaccagctgcctgctgaccagaggcggcctctccccttcggtctagcagccaccaggggctctgagaccctgagcaggtcacggcaggtcctgagttccccatgtccgcatctataactcaagagatcccagcactgccctgcctcttccgtggtgtgatgatctggaccctgataggccatgtggcccttcaagggtggaccgggcctgggggggctgctatcttatgcttggtgggcatggaaagcagttgctgcgcacaggtgtgaagccgcaggtccctttccacagcaggtccctttccacagcaggtccctttccactgggcaccctggtacctgcagtgatgggggtggggggaggtgcactcctagagcagacgggggtgggtggggcagtctccaagctccgaaatgcacctccaccagaccttgagcctcagggtgatgtcacttgatgtgctgggcaaggtcctggctccaggctttcgatggggtgggtgctctgaacagatccttacaatgaaactaccttcagtggtcactgtcatcgccttccagttcttcagaccctcacccttgtcccagctttcctgggctgggggctgggctccacctgcctttgccggtgacttccgtccctgcagactcacaattttcaaagccctctccccgcctcctctggtagtcacaacccagttattcagacttgtacaggtcgttcgcaagtcctcctggaaggtatcttggctggaaaaggggacaaggccaagcttccccaccgctggatgctgcgctcggctctggaactgacaccaggcgtctcgggcagggccactgacccgcagcacacagaagccagctttgccatcgcagcggggaccgccgggcgggccagctccgccctctcctgcctggggggccctcggcaccctctggctccccttctctggcctgagtctctagggcctccccagtccgggcgggggtctccgctgtcccccccactgggtcaggcacgtggtggccgcggtgaccacctggggaaggcgccgactccgaggaacacactcgagcaggacgctccgcaggtgattctgccccgcgggcacggggtgggggcgggatttggccaaatctgcagagagtttaggttgtcaaagctggggcgggggttgctactgatacccagagtgcgggggccagggtgctgccaacatcccaccatgcgcaggacgtccccaccccaagaaccacccggccccgcgtatccggagcgaggagtgggcagcgctcggcagaggccccggcgcggcggctgcacgtcctccgggaggagggagggaagccgggctcaccgccgggcctcccccccggtcaggagggagccgggaactcccgaggcaccaactctgcggaacgcggggcgcccggatcgcccctgatcaccgcccgctggcgaggcgcgggggacccagaaccggcggggccgggagcctcctttaccgctccgcgccggggctgcccgcaggatggggcgcaggatggggcgcaggatgcggccccggcaccgcctcgcgggggtctgcggggggcgaccgcggctcgcgtcggccactacttgggggtctcgggtttccgccccgccctcgccttgcaacccctccggccccggactccgctttccaggccgggctcttccctccggaccccgctcgccgcccggcgcggccccctcctcctgcagcgccccccgccccggcgcccgcgcccccgattcgctgctgactcggtgtctgcgcgtccggccgggcgccccgggaggagtttccggcgcggggcggggtcgggggcggggtcgggggcggggcggggcggcgggtgggccccaccccccagctgagcccggccgggcggactcggactcgccaacttcagaggctcggcggcggcggcgggcgcggagctctgcgcgcggctccagcgggccgggatgggcgggcggccgcgcggaggacgcggggggcgcgcgacgtgaccacccggactcgaagcccgccccgcccccgcccggctcgccggctccggggtctgctccgggggtcgcggacgcggggccgggcggcggagccggcgccagagcatgcggggcgcggcgcgggcggcctgggggcgcgcggggcagccgtggccgcgaccccccgccccgggcccgccc

SEQ ID NO: 19403 - DNA, 2300 bp, Homo sapien
tgctgggtggattctcatcccccgatagctggaaagttgcccctcatgacactggccactgcatcgacggcctctgttgctgggtgtttcttctaagcagttaagtaggagatgatgaaacctcccttccgtggggggaggcgggaccagcgccccgtctttatcagccagtgctcataaatgtggaccatgaactttcccacttgctgtcagcccgggcatcgcaggtgcggtcacacctggttcgtctctcctgcaaggtggggaaaggaaagttaacctgccagtgggttcgaagcccttcctgactttcatacaggagccgggcattttgtcctggtgacccagagttgtggtgtgtgggctggtgcctcaacaaccctccagtgcacctgcgccccccttcagtgagtccctttatccacttgggatttgccctcctttccatgaaggtgccccacaagcatgtccacctgggtggtaacccttgctgacttttaaaagtgtatctgttcagtctgttgatccaacatcagatcagccttgtcagtttcctaaagttgaacgaaccacggttttgtctgcacgcttcagttttatcacagcagaactgtgtcacctgcatctcacgtgaaaatcacaaaatgccctcatccatgaccattaaagataggtcacatttttgcaatgccagcaattttgcataaacagactctgttttcaggtttgctgaggtgctggatatttggaggtgagagatttgaggcactcgattttctggtaggaaccagcacagaccatgagtctcggacttcgtgccgaggtctgctgggtcccaggctgaaggatgcatcgtttaactttttttgtctacacgggtcttgcgcatcatgtgctactgattttaatgtgaaaatccctacgtcagcgggtctggttggagtcccgttggtctggatgtttcgggagaatgtgagaggagaggggagcaggccctgtgctgggtgcagacccgtctgagtgcgctgagaagacgtcaggtgaaggccggggtagccgggtgtcttctttcttctgtgtccaccttcattttgtcctcttcctctttttgcccagtgtcttctgagtgggtggagccaggcgtgcccaccagatgcgggtagcatgtgctaggccaggacggcccccaggctcaagtcggcctcctcctgggcagaggtgggttggccgcctgtccccagctgagttgtggctgttcccctcgcctgctcagatgaaggcagtgctgtcagaggtgaccagagcccgctccctcgaccttcaggactccccgagagggaggcaacgtgtcaggacggtgtatgtggagagagggtcgaggctcggtgcctgagcacgggcaggaggacagtggcctcgatgccagagacgggagggagagacgtgacgatgaggctgcataagaagagagctgactgtagctgagtgtatcagccactcaccgagtccagtttccacacagcacgatcatcgtgcccttgcccacacacgtgttagatgagcttgtgtgagctttatgggctgtaatttgtgagtctgttctgggtgtgtgatcctggcagccggctaggcctggccactcgtgacctggggccttgtcggggtggggagagggtgaggaggggtgcaccctcgacaccaccctctgatgtggcctgcagcctatgaagagtgaggtttgggggcccagagtgtgagtcaccagcggtaaatgcaaaccatatgtgatgcattttctctgctgcagaaagggtttctggtgactcgctcaggccagggctctggaaacagcattgcttatttcacataaaaatcctaagaatgtgggtgaacctgtctgagatctgcgtaataaaacacttagttgaagtcaccgggttagttccaggcccacttggttatgacgtggctgttagccacgagctggcatttacgttaaagtgttgagaagcgtgagggttttgatgtttcagtttcttgaaaatataactgtttctactcaggacctgcctctccaagagtgtagcacacttcatttttttctgtttagcatgtatgagggtgaacttagcttgctactcacacactactcaccctgtggaggaagttcgcctcgcttttgtggtgagtcttgctgtaatgatagcttatatttacaaataccgtcggcagtgcagggtcttcaggcttgcagaaaacggtcaagtcattactttgagaaatgtacaaacatctatgct

SEQ ID NO: 19404 - DNA, 2300 bp, Homo sapien
tcgtttaactttttttgtctacacgggtcttgcgcatcatgtgctactgattttaatgtgaaaatccctacgtcagcgggtctggttggagtcccgttggtctggatgtttcgggagaatgtgagaggagaggggagcaggccctgtgctgggtgcagacccgtctgagtgcgctgagaagacgtcaggtgaaggccggggtagccgggtgtcttctttcttctgtgtccaccttcattttgtcctcttcctctttttgcccagtgtcttctgagtgggtggagccaggcgtgcccaccagatgcgggtagcatgtgctaggccaggacggcccccaggctcaagtcggcctcctcctgggcagaggtgggttggccgcctgtccccagctgagttgtggctgttcccctcgcctgctcagatgaaggcagtgctgtcagaggtgaccagagcccgctccctcgaccttcaggactccccgagagggaggcaacgtgtcaggacggtgtatgtggagagagggtcgaggctcggtgcctgagcacgggcaggaggacagtggcctcgatgccagagacgggagggagagacgtgacgatgaggctgcataagaagagagctgactgtagctgagtgtatcagccactcaccgagtccagtttccacacagcacgatcatcgtgcccttgcccacacacgtgttagatgagcttgtgtgagctttatgggctgtaatttgtgagtctgttctgggtgtgtgatcctggcagccggctaggcctggccactcgtgacctggggccttgtcggggtggggagagggtgaggaggggtgcaccctcgacaccaccctctgatgtggcctgcagcctatgaagagtgaggtttgggggcccagagtgtgagtcaccagcggtaaatgcaaaccatatgtgatgcattttctctgctgcagaaagggtttctggtgactcgctcaggccagggctctggaaacagcattgcttatttcacataaaaatcctaagaatgtgggtgaacctgtctgagatctgcgtaataaaacacttagttgaagtcaccgggttagttccaggcccacttggttatgacgtggctgttagccacgagctggcatttacgttaaagtgttgagaagcgtgagggttttgatgtttcagtttcttgaaaatataactgtttctactcaggacctgcctctccaagagtgtagcacacttcatttttttctgtttagcatgtatgagggtgaacttagcttgctactcacacactactcaccctgtggaggaagttcgcctcgcttttgtggtgagtcttgctgtaatgatagcttatatttacaaataccgtcggcagtgcagggtcttcaggcttgcagaaaacggtcaagtcattactttgagaaatgtacaaacatctatgcttaatgaggtgctaaaagacaaaactcatctacaacctccttccccccaaactgccaacactctggattaacttaaaagctgctctctgggcaggttgcatcccagggctcctccttcacacgtggtggggccccaccttcgctttacctctagcgtcccagccctcgtggtcatctggaaccagggttggtacacagggcctgctggcattcctgtgatactccgtgatattctggaggaatccatcccttccctggggctccatcccactgccccagcacctccagccaccctgattcagggacatcgcagagattggtgtttgacgctacggcagcagaggcgcagactcttgagtgttggagggtgtctggagggcctggggacaagcaccgcctgcactcccgggagctcggccccgccccaccatggctcttggtgcaggtgcactggaaggaactgggtggggcccttgtgccgaagggcggagatggcgccggcctgcctcacgggcaggggtccgtgtggcacctgtggccggcagcgggtgggtccaggagccgccatcatttggagcgggtatcgtcctcactgactctctgtgggtgcgggtggggtgtgtgacgggagctccgggcctggctgacagtgtctctcctctgcagcgggctgacgcacgaggcacacaggaaggaggtggagcaggtgtatctgcgctgtgcggcgggtgccgtggagtggatgtacccaacaggtgctctcatcgttaacctgcggcccaacaccttctcgcctgcccggcacctgaccgtgtgcatcaggtccttcacggactcctcgggggccaatatt

SEQ ID NO: 19405 - DNA, 2300 bp, Homo sapien
cggccctaagaggtgggccttattattagccacggccagggttagggtgaggccactcctccagggcagaatttcagggggtgcccacccccccgccctaaatcattcagcaatcaacataaattatagttcaacgcaatgtatcttatcttgtgggccgcaagccacccaggtgcccaggcaagagcctgaaggcacaagctgttccagtacagcgaagaaaataattagaataagaaaagttttactagagataggaaacggataggattatatctgactattattaatcattagtttgtagcatcactctttgttctattaccataatgatctctgttctattatgattaccttgggggaaaccaggccacacagagttaggagctgaagggccacagtgagaggtgaccagaagacgagagtgtgagccctcattcacgcccagagaagggccgctggagggctccttggcctagcggtaatgccagtgcctgggaaggccctggttacttagcaggccttggtctagcggtggccccagtgcctgggaaggcacccgttacttagcagacccggaaagggaatctccctctctccaggagagacagagtgtgagccactgtgcccggctgggagcaagactggagcaagactccatctcaaaaaaataaaataaaataaataagtgaattaattaattaaaggccaggcatggtggttcacacttgtcaacattttgggagacttaggtgggaggattgcttgagtccaggagttccagaccagccagggcaacatagtgagaccctgtctgtattacaataataaaatcaaataaagtttttaatttttttttgagacaagagtctcactctatcactcaggtcagagtgcagtggcactatcttggctcactgcaacctccacctcactgattcaagtgattctcatgcctcagtctccccaggtagctggaattccaggcaagcgccaccatgcctagctactttttgtacttttagtagagaccaggtttcgccatgttggccaggctggtcttgaactcctgacctcaactgatccacccaccttggcctcccaaagtgctggattacaggtgtgagccaccatgcccggccaaaataacatttttaaaaactaaattaaatttatataacactgaccgggcatcatggctcatgcctgcaatcccagcactttgggaggctgagttgggtggatcacctgaggtcgggagtttgagaccagcctcaccaacatggagaaaccgtgtctctactaaaaatacaaaattatctgggcgtggtggcgcatgcctgtaataccagctactcgggaggctgaggcaggagaatcacttgaacccgggaggcagaggttgtggtgagccaagattgcaccattgcactccagcctgggcaacaagagcaaaactccatctcaaaaaaaaaaaaaaaaatttggttcctcagtcacactccaaggctcaatatagcatacaggctgggggttaccctattggacagaacatctttaaacctcccaggcctagtacccttgccttcccctagactattacaagagggaaattgagtcagctgatagtggtccccccaacacagacacagtctatctgagagaacgccaaatgaccttgctttcctcctacccccagcaaacagcattcaccaaatagtaggcagcttcctagggatctctctccattctccattcccttcctgctccagagaggaccctgaagaacccagcctatcccatgcacctgttctttctgctgcagctcctgctgctgctgggccatcagccatctccttcggtccaaagccatctgccggcgccgggcctcccagtggtaggcactacccatgatagtgggatggtatgaggccccaggtgggggtggggacaggcagagcccactgctcccaccacctctgtctcttcccactcagacccctctgcctataactggaaccacctcacaatgtggttactgccagggcaactgggcaggccccgcctgctttgttgagagagggaggcatttttcccaaggctcccagggaacatctgcaaagtacctttctctcctgggtcctgatcagatagaagaccttcccaccttagctttgagtctcaatgggccccatggacaattcagcagtaaagtcttttctctctggcttctttcccccattcttcctcagagggttccagcatcatcatctgacccttcctctgctcatctctcccca

SEQ ID NO: 19406 - DNA, 711 bp, Homo sapien
agcagcattagatgctcataggagaacgcaccctgttgtgaaccgtgcatgtgagggatcgaggttgcgctgtccttatgagaatctaatacctattgatctgtcactttctcccatcacgctcaggtgggaccatccagttgcaggaaaacaagcttaacacgcccactgattctacattatggtgagttctataattattttattatatattacagtgtaataatggaaataaagtgcctaataaatacaaatgtgcttacatcttttggcccagctcctacctcccggcagcctctccaggcccagaactttctccagtcagcctctacagaccaagctcatgactctcaatggcctatttaggcccataccctacgtcacggcagcctccgcagatgaggctactgcctcacaacagcctccacaggcacagctccatcgttacaatggcctctttagacccagctcctgcctcccagccttctctccaggccctgaactttctcaagtcaacctcaccaggcccagctcatgcttctttgcagcctctccaggcccagctcctgcatcttggtggcccctccaggcccagcctctgcctcccgtcagcctctacagtccgaacgtctgcctcacagcagattctttacgcccagcatctacctcactgtggatcccccaagccaagctcccaacctttcagcagct

SEQ ID NO: 19407 - DNA, 1929 bp, Homo sapien
gacaagaacaaactctgcacatgttcaatagaaacataaccgtccaatttattttctgaatattttccatctgctgttgctgaatctacagatgcagagctcctggatacgagagccaagtgtgctttgagagtagggtgggtgaggttgctaatgagtacaggggagcaggtgttgatcaggaggaccctgcactggggcatctggacgtcctgcctcaggacttgagactccagttggatggcacaggcagactcagcccaggtcaaagccgtccccttgaagtttctttttatcccaagctctttctggcccctggaatttggcatcccctaggccctgtgtggaaggacagatgaaccaggttttagataacatgtctagaagagtgagcccctactgtgtgcccggcactttccccacaggatcctctagctagaatatccaagggtcatggagagaaatacccagttaaaatatcagaaatgaaaaagcgataccattagagacactaaaaagaccattaggtaatagtactagcttttgtattctgagatccaacagcagcagtcacttccctccaccgctatgtgtatcccaggaccaccctgggcagggagggctgaggttagggagcagccatggatgctctgatgctggccctgggcctcgggggtgacagtgatgaggaactgggtgcacacatgagtggggcagccgggcctggccagagaagcagcacacacgtgcacagatgtgtttacccacatacacatgtgcacgcacgtgcacaaacacattgcaggcaggcatgttgacacctcaggcagcggaggaccctgactctgggtgctgctgacccgggcaaggccccactgtgattcgtgccatgacctcagaatgtcactggtgcttagcacctatctgctctctggtctgcctcagtggtctacagcagttacacacaggcagtggtatctgtgagcagctctgtggactcaaaggttttctccctgagaggcatgacccaggccagctgattcatcagaatcaggtgagcgtgacctgctctcttccctccaggcggacttgggggcagtggctacggtgcgggcggtgttggcctctgtggggcagctaccgaggagggtcatccctgagcactcaccaggcgcccgttctacactgcccgtgtagacgattggctctttcgtctccatggtggcttcgtagagtgggtgctgttcccaaatgtccccattcgacagatgagacgtctggggtcagagaggcagtaaccggcctgggaatccggacatgaccctgagttttgctctcagccctgccgtgtgctgtgctggaattcaggcctgaaccctgtgacctccctgccctagatcccaaatctgcccaggtttcccatcccgatggggcagagcctggtcctggcagagccactggtatagagccactggtacagatccactgacggtcctcagaacacctctgtgccctaagctgggtcctgatggtcgctgtgggccccactgaacacacatggtcccttgtccgggggagcctgctgcccttgggcagctgtggaaaatgaaggagccctggagggctggctgaggggagactatcttcccttgtgttcaaaggggtccgggcactagggttctccccaggtatttcttgctctgcgtggtcctcttgaggcctcgccctccttttgcctcgagtattcccaggagggacggtccatccagctgttctccaggaccaaggacccactgttcttcctcagtgacccaggaaaatgaagcctcctcctgttgggacggctcagaatggtggactccacagtccctccgcgagagacgtggtttccatgcgtacaatagatcttcctcatcccccaaacccaac

SEQ ID NO: 19408 - DNA, 1109 bp, Homo sapien
gacaagaacaaactctgcacatgttcaatagaaacataaccgtccaatttattttctgaatattttccatctgctgttgctgaatctacagatgcagagctcctggatacgagagccaagtgtgctttgagagtagggtgggtgaggttgctaatgagtacaggggagcaggtgttgatcaggaggaccctgcactggggcatctggacgtcctgcctcaggacttgagactccagttggatggcacaggcagactcagcccaggtcaaagccgtccccttgaagtttctttttatcccaagctctttctggcccctggaatttggcatcccctaggccctgtgtggaaggacagatgaaccaggttttagataacatgtctagaagagtgagcccctactgtgtgcccggcactttccccacaggatcctctagctagaatatccaagggtcatggagagaaatacccagttaaaatatcagaaatgaaaaagcgataccattagagacactaaaaagaccattaggtaatagtactagcttttgtattctgagatccaacagcagcagtcacttccctccaccgctatgtgtatcccaggaccaccctgggcagggagggctgaggttagggagcagccatggatgctctgatgctggccctgggcctcgggggtgacagtgatgaggaactgggtgcacacatgagtggggcagccgggcctggccagagaagcagcacacacgtgcacagatgtgtttacccacatacacatgtgcacgcacgtgcacaaacacattgcaggcaggcatgttgacacctcaggcagcggaggaccctgactctgggtgctgctgacccgggcaaggccccactgtgattcgtgccatgacctcagaatgtcactggtgcttagcacctatctgctctctggtctgcctcagtggtctacagcagttacacacaggcagtggtatctgtgagcagctctgtggactcaaaggttttctccctgagaggcatgacccaggccagctgattcatcagaatcaggtgagcgtgacctgctctcttccctccaggcggacttgggggcagtggctacggt

SEQ ID NO: 19409 - DNA, 2300 bp, Homo sapien
gaacttggaaaaacctgctgcacctgaaaataactcttttatgtatttactgggggagagcatcccataaatagaatgtcattctcttcacacatattcttagaagaggaggctaatacattaagcagaaatattcattcacactttagtatgagtgaatttatcagtgtgttcttgaataagtcttccttggaaggaagaatagagagagcttgaggaaatggagcctgaataggaaaaagagggagaacaccaaaggaaattagggactccaaaggtaaagttgaaatttcttcacaaataagcttagagccaactttggtagagaatgccctcgatctagaagtttgtatcctttgaaatgggagattctacaattatattatattttttttatttatttttgagaaggagtctcgctgtgtcgcccaggctggagtgcagtggtgtgatcccagctcactgcaagctccgcctccctggttcacgccattctcctgcctcagcctcccaagtagctgggattacaggcaccccccaccatgcctggctaatgttttgtatttttagtagagacggggtttcaccatgttagccaggatggtcttgatctcctgaccttgtgattcgcccgcctaagcctcccaaagtgctgggattacaggcgtgagccaccgcgcctggcccctattttatttttattaatagtcattttctcctaaacttatgtcagttgaaaagtatgaagcccttacttaaatcatcccaatgcctggcttataataagtattcgagaaaagtccattcctcttttctctcacaggtccttggtagttttaacacttcagcctccagcttcttagtatgagtgttttatcagaccactttccttcttaaagacagcataaaagcactggatgaattggggtagagaaataagccatgctagaatagaaagggggaaagagatgcaataaagcctacagtttttggctggtatttgctctatggtattaatgtaaacctatttaaatttttcttttttttctttcttaaagaatgtaattgaccggaaaccataccctgatgatgaaaatttagtggaagtgaagtttgcccgcacacctgttacatctacatatctggtggcatttgttgtgggtgaatatgactttgtagaaacaaggtcaaaagatggtgtgtgtgtctgtgtttacactcctgttggcaaagcagaacaaggaaaatttgcattagaggtaaatgtacttgaagaggattgttccagcagtccataactccaggttggggaatttacatttctggtcaattattagtacagttatttataatttaatctgaaagttgtgctacttggtttatttttaatagaatttaggaaatgccaaccttggtgtttcgttattttacaaaataataattaagagaatataagagtggaatttctctagggaatgggttggaaaatatgtagttatatttttcatatcaagttataaatggattaaagtttggccattgtattcaaagtttggagctaaggcagtcttcggaggtagggctccctgggattcatttctagtaatttaagatacattggcttgcaacaggattcctttgtgggtttcaatatgaattataataacatatttattagatggttattttgtttatacttttataggttgctgctaaaaccttgcctttttataaggactacttcaatgttccttatcctctacctaaaattgatctcattgctattgcagactttgcagctggtaaagtaaatttcattttattgctgaattgtaataactttttaaaattttgtgacttttgatgcaagagtatatatatatatatatatatatatatatatatatatatctcaataaatgtttatatttattttgtgaaggtgccatggagaactgggaccttgttacttataggtatgttaatgatgtattaccctgccttatcttttcaaatcactgatttcaaaagggcttccctcctaatcacagttgagtagcttctgctttacgatatggtgtaaatttttctaccttcccccacttccatgcacatttcaagaatgcagatggacacctctccctttggtgctactgtctgagggtgtaagattttaaagtgagcatctggcggtagtagcatttttagatatattcttggctaagtttctcattgcagtgcctttctttcctgccagtagtttcacagctatttatccagcttggagaaccttccctaat

SEQ ID NO: 19410 - DNA, 2300 bp, Homo sapien
cccccacttccatgcacatttcaagaatgcagatggacacctctccctttggtgctactgtctgagggtgtaagattttaaagtgagcatctggcggtagtagcatttttagatatattcttggctaagtttctcattgcagtgcctttctttcctgccagtagtttcacagctatttatccagcttggagaaccttccctaatttcatatcttctagccaagtttttacatgtctgtcaccacaacataaacatgtgagttgaataacttttaaaagcagagtctgtctgtaaacaagtttttgccttctactttcaattgccttcttagatgagctaagtgttgaacggccggctcagtgctgtttttgggactatggaatgcatcttcctccaccactcccctcatttaatgaaaggactttcttctctctccatctagcacagtaatcgctaatcccttagacaatgttttcccaaaatttcaggcagctattctatcaacaaactgataattaaacttgtgtcacatctttgatattctgttgtattaattctgttggggtagtctttaatcttcgtgaaactttttctttccatattaggaaatattttcctaatatctctaaagcctaacttgtccatctgacttactgtctgaatcttcccaacttatgcatgcccacttttattgtttaaatttgtttctttttttttttttttaaacatagggagactgcattgcttattgatccaaaaaattcctgttcttcatcccgccagtgggttgctctggttgtgggacatgaacttgcccatcaatggtttggaaatcttgttactatggtatttaatatttttaagtgctcaaatatatttatcttcatcctactccacattattttggctacatagtatttcaagtttggctgcaacactgtgccaaaaaataattgagtgatagaaaagtattattttaaaaggtccactttgaaagggcttatcagaatctctgcattgaacaagggcatatggacagtctttattcaacagacacttcctaaactgttctaaaatttgtctgcaaatgggaaaagtcaagatactaatttgggtgagaggaaaagattcctcttaggtgtagatgaatgaatcatgcagtgagattccaggctaactgtagtttcttgaatcttatttgttaatctgactcacagctgaaaagtaacctgatgaataacagactgatctttaattagagagaaatgtttttaggagtcagttttttcattgcctaaaatgttaagttgaaatttaatgaaataaaagtaaacaaactgcagagtgactgcagaataaagctgtattaaaattccagctgttctgttgaaatccttataatgtttgcagtaatgatctctgtccttcagtcctgatttttcactcttactctaagtaaatactatttatgaatgccaactgtgttagagcttgggagcacaggatttaataagtgaactagatgtacctctgcaattaaataactggatattctggagccagctagattccctgacattttaggctgccaaagagcagaacctgatttgaatgtagattgagtccatacgttatataaataagaatgtaagacatttatcaactgttacgtgtctcagagagtttctacagaaagtcaacccttgaaaataaatcttttccttttattttggatgtttaaaattttacaggtgaaaaaaattctttgaaatataatttcaggccgggcacggtagctcacgccagtaatcccagcactttgggaggccgaggcgggtggatcacttgaggtcacgtgtttgagaccaccctgaccaatgttgcgaaactccatctccactaaaaaaaaaatagaaaattagctgggcgtggtggtgtgcacctgtaatcctagctactctggaggttgaggcagaagaatcgcttgaacctgggaggcagaggttgcagtgagccgagatcacgccactgcactccagcctgggcaacaagagcgaaactccatctcaaaaaaaaaaaaaaaaagaaatataatttcatgtggaactatgtgttggtgcctgtattcaaatatgtgaagaaatggccttttcttctaatgcagcgagtttgctactttgtaccaaataatttttttgcttggctttgagataactttatgattttattttgaaactacaagcaataaattttagtaggggaaatgtgtacattcttattaaacaactttttactggttt

SEQ ID NO: 19411 - DNA, 2300 bp, Homo sapien
acctttatcatccatattcacccccactgctctgcagctccactgaagcaccccctctttcctctgagccacaatgtcacacccaggactctgcctcagctgggcctccactgcccacccatctatagatgcctaaatcccgggcagttatccagacacaactaaagttccatcccttccatgaagccttccccaaccctctggtggaaggtcacttcttcctcatggggttctgagctttcatttctttttctactaagagttttacaattacctgttcatacactctacctgcccccatgagaccaggggcatctcagaaacaaagatcattaaaaccaactaaatctatttctcattataaaatgagatatgctgattgattgcaaaataataaaataacaaagtatggaaaagaaaaaaaaaagcatataatctggctgagaaggtagagacccttccacaccactgaaattatgtgttgaaaagaataaggaaaaaactgcttcagtttggcattatttatgtaagtatagtacaggatccttaaaatggttcaaagaaatgggaaatcaagacttcattttggcaaagcccattgaacagaaactgtagcatatttatcagtaatttctttcagattaaacaactgacaacaacccacttttcaaccagtgatgttggaaatgttttaaaacaaaattagttcataaatttgtgggctgaccaagaaggtaatacagtctcactaaataaaatgaggaaaattcagaaaaagaaaaaaataagaaaataaatcacccatggatctaagcactattcattctttaaggcatgtatttccaagccttttaattttttccatgcctagagttggcatggcatatatatatctttatacaattcttcaaattttatagaatttgtataatgttttatcttgctttttttttaaccactgatgttataagcatatttatgccacttcattcacgttagagacttaataataaaggatcttgtggataatttatcattccctgatagagaaaaatttagctttgcttattttagagttataaatgatgctgggtcaggtatctttatgtttgaagatggctccatatttgggttgtttccacagaactctttcccagaaatgctttttctaggttaatggctacacatatttctaggcacctgacatactgacacccacctctaaagtatttttatgatccacaactagcgtttaacacagcgccccagtcactccgagactaataaatagacaaatgactgaaacgtgacctcatgctttctattcctccagctttcattgagttcctttcctctgggaggactgggggttgtctagccctccacagcatcagcccattgaccctatccttgtggttatagcagctgaggaagcagaattacagctctgtgggaaggaatggggctggagagttcatgcatagaccaattctttttttttttttttttttgagatggagttttacttttgttgcccaggctggagtgcaatggcatgatctcagctcaccacagcccccacctcctgggttcaagcgattctcctgccctcagcctcccgagtagctgggattacaggcatgtgccaccatgcctgactacttttgtatttttagtagagatggagtttctctttcttggtcaggttggtctcaaactgacctcaggtgatccgcagcctcggcctcccaaagtgttgggattacaggtgtgagcgaccatgcctggctgcatagaccagttcttatgagaagggatcaactaagaatagccttgggttgacacacacccctcttcacactcacaggagaaaccccatgaagctagaaccagtcatgagttgagagctgagagttagagagtagctcagagatgctattcttggatatcctgagcccctgtggtcaccagggaccctgagttgtgcaacactcagcatgacagcatcactacacttaaaaatttccctcctcacccccagattccatttccccatccgccagggctgcctataaagaggagagatggcttcagacatcagaaggacgcaggcagcaaagagtagtcagtcccttcttggctctgctgacactcgagcccacattccatcacctgctcccaatcatgcaggtctccactgctgcccttgccgtcctcctctgcaccatggctctctgcaaccaggtcctctctgcaccacgtgagtccatgttgttgttgtgggtatcaccactctctgg

SEQ ID NO: 19412 - DNA, 2300 bp, Homo sapien
aaaagagaagaaactcaacttgacaatacaaaagaaatgtgtatcggatctcctaactgcaaaccttcagagatagagcaggtcagacctctcaaggtttccctacagttttcttattcagatttctaggactcacatcccttagttcagaagaacagaggctgctttcctacctccaaccagtaaacaaaaggcagaggctgtccaactggatgaatttaggtcatgtgcctgcccctgaaccattctcagtagctgagagaatgccacacagtgattggtttaggggtgaattccttccacattcttgcatttagggggatgggattatgctgattaagagtaggtccaaccctttatgaactctggctttacgatgaatgaggctggcattaatgcctgcaaaaatggacaaacttgctgtttgaatttatttatagtaagaaataaaccatgaaaacttttctaaaatgtaatcttttagaacacaaaaaaattgcagaaacaaaaatggcccagaatcctgatgctctgttgaccatctttgttttgtttgttcgtttgagcatatggcaaaaaatgcaaaattcagaaatgtgtaatgagcatagaatgttactataacaattgaaaaaacttgaacacacactacatactaaacaacagcatgaaatttcagtttttctgaatttgatgactgcagtgtggttatataagagaatgtcttttcttaggagagacaccgtgaaacagaggaaaaaggacatgattctgaaactttctcttaaagtaacatattaaaatcacacatatgtacacgcgtgcatatgtatacatatatatgtatagagaaagcaatagcaaatgtggcaaaatgttaagatttggcaaatctggataaagatttgcaattctgctgcatttgaaattatttaaaaataaaaaacttgagtttttggagaaacaggcataagaaaccttttgtttccatatttgcggcttctatacagtcttttatgatgcaattaaaaaaaaactaaactaaaaaatataacacaaatcttccctcccatagtagccagaaacccccgccgagtactttgggtgtcataataggaaaaaaatgcaaagcaatatgtttttctataaagattacttatttactaattagaatttttttattttcatgaagatcaacaacaaagtttttaaaataatgacttagagaatcattttgtggtatttgtttaaggctgtcgcccaggaaaacgcccaaggaccatgcacgcttcaaccctatggaaacacgaacggcccagggaaccgccccttcgcgctgcttgacgggatctggagtcctcccgctccgccccgccaggcgctcagggaccgcccggccgctccctcaccgcccggccgctccctcatctcgcgatgccatcctcttttttttttttttctttcccccctcccactcgcccccaagccctgtgactccctcccctcccaacgtgtttttcaaatccaccaatgggcacacagcttaggctcgaaccagccaatcggaatgcggagtcaccgggaaatttaaatcgcgccggccggctgcacgagccacacggtctttgagctgagtcgaggtggaccctttgaacgcagtcgccctacagccgctgattccccccgcatcgcctcccgtggaagcccaggcccgcttcgcaggtacagactcaggcggcggcccggcccgagcgctaacggcttgcccgtgggcggcgttcgccttttgggttgggggagggaggccccgggtccacgccgagcctggctctgcctcccgcgttgactaggcctcgggggcgacgttcattgaccaggcggctgagtttcgcggggtctgcgggtttagggcgccgacgctctgcaaacggcagcggaggccttaacgcgtcgcggccgggagaatcggagcgagccaggcttgagggcgaatgtcccgggaggacttgtggcggccctggtttcgcctcctcctttctcgttgcatcttccccggcgtgggggcaggggctgggggtggcagttgggagcaccgtctctgacacctaggccccgggggtggctctgccaccaagtcgtaggcgagcgtaatgaaagcaaagatagcaaattgtaaggagggctttgacttttgtcatcttctgaatgacgcacagctgatgtcatcctaattaagcgcattcactcctagtctctggaaatgcaaatcaaatatgcgagatgcggcactgcatttttaa

SEQ ID NO: 19413 - DNA, 2300 bp, Homo sapien
ctgtgtgaccctggaacaagttacataaacacttgtgattcagtgctctcttttgtgaaatagagcaaataacagtactacctcacagttgtgaagatcaagtgtattaatatatggtaaacactcagaacacttctgggcacatagtagtcagtattttcaagcaaaagaaactcaacttggcttggtatggtggtcaggcctataattccagcactttgggaggctgaggtgggtggattgcttgagctcaggacttcgagaccagcttgggcaaaatagtgaaaccctgtctttacaaaaaatgcaaaaattagctggacgtggtggtgtgtacctatagtcccagctatttgggaggctgaggtgggaggatggcttcagcccaggaggcagaggtcacagtgagctgagatcgtgccactccactccagcctgggcgacagagctagaccctgtctcaaagaaaagaaaaaaaagaaaaaaaaaaagagaagaaactcaacttgacaatacaaaagaaatgtgtatcggatctcctaactgcaaaccttcagagatagagcaggtcagacctctcaaggtttccctacagttttcttattcagatttctaggactcacatcccttagttcagaagaacagaggctgctttcctacctccaaccagtaaacaaaaggcagaggctgtccaactggatgaatttaggtcatgtgcctgcccctgaaccattctcagtagctgagagaatgccacacagtgattggtttaggggtgaattccttccacattcttgcatttagggggatgggattatgctgattaagagtaggtccaaccctttatgaactctggctttacgatgaatgaggctggcattaatgcctgcaaaaatggacaaacttgctgtttgaatttatttatagtaagaaataaaccatgaaaacttttctaaaatgtaatcttttagaacacaaaaaaattgcagaaacaaaaatggcccagaatcctgatgctctgttgaccatctttgttttgtttgttcgtttgagcatatggcaaaaaatgcaaaattcagaaatgtgtaatgagcatagaatgttactataacaattgaaaaaacttgaacacacactacatactaaacaacagcatgaaatttcagtttttctgaatttgatgactgcagtgtggttatataagagaatgtcttttcttaggagagacaccgtgaaacagaggaaaaaggacatgattctgaaactttctcttaaagtaacatattaaaatcacacatatgtacacgcgtgcatatgtatacatatatatgtatagagaaagcaatagcaaatgtggcaaaatgttaagatttggcaaatctggataaagatttgcaattctgctgcatttgaaattatttaaaaataaaaaacttgagtttttggagaaacaggcataagaaaccttttgtttccatatttgcggcttctatacagtcttttatgatgcaattaaaaaaaaactaaactaaaaaatataacacaaatcttccctcccatagtagccagaaacccccgccgagtactttgggtgtcataataggaaaaaaatgcaaagcaatatgtttttctataaagattacttatttactaattagaatttttttattttcatgaagatcaacaacaaagtttttaaaataatgacttagagaatcattttgtggtatttgtttaaggctgtcgcccaggaaaacgcccaaggaccatgcacgcttcaaccctatggaaacacgaacggcccagggaaccgccccttcgcgctgcttgacgggatctggagtcctcccgctccgccccgccaggcgctcagggaccgcccggccgctccctcaccgcccggccgctccctcatctcgcgatgccatcctcttttttttttttttctttcccccctcccactcgcccccaagccctgtgactccctcccctcccaacgtgtttttcaaatccaccaatgggcacacagcttaggctcgaaccagccaatcggaatgcggagtcaccgggaaatttaaatcgcgccggccggctgcacgagccacacggtctttgagctgagtcgaggtggaccctttgaacgcagtcgccctacagccgctgattccccccgcatcgcctcccgtggaagcccaggcccgcttcgcaggtacagactcaggcggcggcccggcccgagcgctaacggcttgcccgtgggcggcgttcgccttttgggttgggggagggaggccccgggt

SEQ ID NO: 19414 - DNA, 111 bp, Homo sapien
cctcagtttaccctgctgagaagcagggactgctgcgtggatcaggcgatctatgtaaagccgctgatgtggtgagtgggacccttccctggggctatccacctagtagag

SEQ ID NO: 19415 - DNA, 2300 bp, Homo sapien
gctcccagcctttctggcatacaggttgtattagtctgctctcatgctgctaataaagacatatctgaggctgggtaatttataaaaaaagaggtttaattgactcacagttgcacatggtcggagaggcctcacactcatggcagaaggcaggtgaggaacaaagtcacatctcttacatggcagcaggcaaaagagcttgtgtagggaaactcccctttataaaaccatcagctgtaatcccagcactttgggagtccaaggcagtggatgacctgaggtgaggaaatcgaggccagcctggccaacatggtgaaactccgtctatactaaaagtacaaaaattagacaggcatggtggtgggtgcctgtaatcccagctactcgggaggctgagacaggagaatcgcttgaacccgggaatcagaggttgcagtgagccaagatcatgataatgcactccagcctgagcaacagagcaagactctgtctcaaaaataaattaataaataaaccatcagatctcatgaggcttattcactgtcacgagagcagcatgggaaagacccatcccctgattcaattacctcccactgggcccctcccacgatatataggaattataggagctataattcaagataagatttgactggggacacagccaaagcatgtcacaggttatgaaacaaattgattctagcaggccagacttaagagagatgagccccttgaccatcccaaggcagagtggttaacagatgcaagttgttttatgcatcaggaaaacaggagggctagatatgctattattagcacaagataatcaaggcacaagccttgctggcctcgacctcagctcaaaaagctgagttaattgaacttactaggcccctgcagttggaaaggatttaaaagttaacatttacactgattccaagtatgattttttagtgcttcatgcttatgctgcaatttggaatgggtggggactcctgaccccaaagggcttttccatacatcattcagattttgagcttgttagaatgctgctttgctgccaaaaagtgactataattaattgcagaggacatcaaaagagagactgaccatgtaaaaggaaatgcccttgtagatgccacagccaaggcccctgcactgaaagggccaatgaagcttgtgggcgtgctggtcagcatacatagaactgggccggaataccctgaagaagaacaaaaatgggccagggattgcatttcagtccagggcccctcaggctgaatgatggtaataaattactaatgccaagtaccaatcacaggagtataactcagcactttcatgattcttttcaccctagaagggattctttgtttctgttaatgtctcatttgtttataggggtaaatcttttcaagacactaaaacaggtgactcagccctgtgagctctgtgcctgacatgacccaaacggccagcaattttctccttctccagttaaacctgtccaaaattgaggaacctatccaggtgagaactggcaactctaatgtactccgatacctttctgcaggagattcaaatatttgctaatgcttactgataccttcactggttagatcgaggcattccccaccccatctgaaaaatgtttaccagaagaaataactcctcagtttcggtaatctaaaagcctgcaaagtgacaatggcccatctttcacagcaggcgtaacccaacacctatcctcagctttaagaatccaatattaccttcactctgtgtggagaccgcagtcctctggaaaggtgaaagggctaatcctactctacagaagactccagctaaatcagacgcctgactatctccaacacccatagcttactgcgggtttgaactgctccaaagtaaaacgtataattaagtcctgttgagttaacatatggaaggcctttcctaaccacagatctcctaatagatgaaatgaatctccattacaaaaatatcaatctaggacaggtgcaaaggcactccgtgcatatggaaacaagcgtcttcccctcccacatgggaggaaaattcagtttcagctcagctagggatctagtcttactaaagacgtgggaagaagttctccagctgagcagctttccccaacgtggaagggaccatagcaaggacacctgagttctccaacagacgttcaacgccaagggattcacaggtgggtgcacctgtgtggaagtaaagctgttgcttattctgggagcccaatcggaggctgagggaggtggacgcgg

SEQ ID NO: 19416 - DNA, 2300 bp, Homo sapien
tggggcatagtgacatatcactgcattgatcactcaggtgatgtaactattgtctaggctctgcttaaaggggccttgtcacatatctctgcactgatcacccaggtgatggaacacttgtctaggctctgcctacatgggcattgtgacacatctctgaactgatcaacaaagtgatgtaactcttgtctaggctctgcctacaggggctttgtgacatatctctgcactgatcacccaggtgatgggacttttgtctaggctctgtctacgggggcattgtgacatatctctacactgatcacccaggtgatgtaactcttgtgttggatctgcctatgggggcattgagacatatttctgcactgatcacccaggtgatgtaacacttgtgttggatctgcctataggggcattgtgacatatttctgcactgatcacccaggtgatgggactcttgtctaggctctgtgtatgggggctttctgacatatctctgcactgatcacccaggtgatgtaacgcttgactaggctctgcctacggggcacagtgacatatcactgcattgatcaccgaggtgatgtaactcttgtccaggctctgcctatagggggccttgtgacgtatctctgcactgatcatctaggtgatgtaactcttgcttacgctctgcctgcaggggcattgagaaatatctctttactgatcaaccagatgatgtaactcttgtctaggctctgcctacagggggcattgtggcataactctgcactgatcacccaggtgaagggactcttctctaggttctgcctactgggggcattgtcacatatttctgcagtgatcacccaggtgactgactcttgtcttggatttgcctatgggggcaatgtgacatacctctgcactgatcacccaggtgatgtaactctggtctaagctctgcctaaaggggcattgtgacagatctctgcactgatcactcaggtgatgtaactattgtctaggctctgcttaaaggggccttgtcacatatgtctgcactgatcacccaggtgatgtaactcttgtctaggctctgcttacagggggtattgtgacatatctctgcactgatcacctaagtgatgtaatacttgtgtaggctctgcctacaggggcattttgacatatctctgcactgttaaccgaggtgatgtaactcttgtctaggctgtgcccacagggggattgagacatatctctgcactgatcccgaggtgatccaactcttgcctggtctctgcctactggggacattgtgacatatctctgcactgatctcccaggtgctgtaacttttgtctaggctctggctacacagcattgtgacatatgactgcactgatcacccaggtgatataactcttgtctaggctctgcctacagggggcttgtgacatatctctgcactgatcacccaggtgatataactcttctctaggatctgcctacagggtgctttgtgacatatccctgcaatgatcacccaggtgatgtaccacttgtcaaggctctgcctacaggggcattgcgatgtatctctgcactgatcacctaggtcatgtaactcttgtctaggctctgcctacagtggcattgtgacatatctctgcactgatcacccaagtaatgggactcttgtctaggatctgcctaaagggactttgtgacataactctgcactaatcatccaggtgatggggcttttgtctaggctctgcctaagggggcattgtgacgtatttctgcactgatcacccaggagacggactcttgtcttggatctgcctatgggggcattgtgacatatatctgcactgatcacccaggtgatgtaactgttgtataagctctgcctacaggggaattgtgagagatctcgccactgatcacccaagtgatgtaactattgtctaggctttggcctacagggggctttgtgacatacctttgctctgatcacccaggtgatgtaactcatctaagctctgcctacaggagctttgtgacatatctctgcactgatcacttaggtgatgtaacacttttataagcactgcctacagggaatttcgacaaatctctgcactgatcacctaggtgatgtaactcttgtctaccctctgcctacagggggcgttgtgaaatatctctgcactgatcacccaggtgatgcaactcttgactaggatctgcctacaggaggtattgtgaaatatctctgcactgatcaactaggtgatgtaactcttgtc

SEQ ID NO: 19417 - DNA, 2300 bp, Homo sapien
ttactgaacataaaaaaaatagaaaataaagctatccatagcctgctattctaacataccctgcaaaatccctttgaagttttactgtgtaatataaaataggtatcatagcacatgtgcaatgcactgtgctaagaatcttctatacataatcttatttagtccttataacaatcctgagatgtatctccattttacatgcacagcttgaacacattgctagtttagttccagaccactgcaatattgctgatattgtaataaaatgagtcacacaaagtttttgttttcccagtgcatataaaagttatgtttctactatactgtagtctatttagtgtcaaggctgggtgcagtggcttatgcctgtaatcccagcactttgggaggcctaggtgggcagattgcttgagaccaggagttcaacaccagccagggcaacatggcgaaatcccgtctttacaaaacatacaaaaaaaattagccgtgtgtggtcccagttactcaggaggctgaggtgagaggatagcttgagctgggaggttgaggctgcagtgagccgtaattgcgtcactgcactccagcctgggtgacagagtgagaccctgtctcaaaacaaacaaacaaaactttactgctaaaaaatgctaaggatcatctgagctatcagtgaatcatcatctttttgctggcagagggcttgccttaatgttgatggctgctgactgatcagagcggtggatgctaaagtttggggtagctgtggcaatttcttaaaataagacaataatgaaatctgccacgtcgattgactcttcctttcatgaaagttttccctgtgacatgcagtgctgttcagcattttacccacagaagaactttcaaatttgaatttctttcaaaattagagtcaatcctgtcaaattctgctgctgttttatcaacagttccatagtttatgatattctaaatcctttgttgtcattcaacagtgttcacagcgtcttcaccaggagtagtttccatctcaagaaaccactttctttgcttatccataagaagcgactccttgcccattaaagctttgtcttgagattgcagcaattcagtcacatctgtgggctccacttctaattctagttctcttgctattgccaccacacctgcagttgtgtcctgaactcaagccttgaacccttgtgggaaaagacttgttgccagagcagtcagaatacacaaaacattggagttagctgttttacacgggggtggttagtggcaccccaaaacaactaaaatagtaatcatagatcactggaacagatataatagtatttaaaaagttcaaaatattgtgagaattaccaaaatgtgacacagagacacgaagtgagcacatgctgttagaaaaacagaactgatggacttactaacccagggttgccacaaaccttcaatttatatatatatatatataaatatatataaatatataaatatatataaatatataaaaatatataaatatataaaaatatataaatatatatatatagaacgcaataaaatgaggtgtgggtgaaaagaaaactgaggtttgcagacatcatacagctagctagtaacagctgggtttcaaaacacctctgactttacaaccactaattttatttattttattttgaggcagggtctcgctctgtcgcccaggctggagtgcggtggcacgatcacagctcactgcagcctcgacctcctgggctcaagcgattctcccgcctcagcctcagacagcaggtgggataccaagttcccacttcatctgccgcagggctgggccgcgccaggaccacgtggccagtgcgcgcagggcgatgggcggcagtgcgcaggcgcgcacctgctgcggtggatggggccccgcgcccgtccctcacttgctccctccttccttcccgccacccctccaccgccttccccctcctccctcctctcgccacctctaggccccgccccggtcctgccgcccagtctcctcgctgcagtcgctccggagctgcacgggtgttttgcgtgttgctgcgtcatcgccagtggccggtttgaatgagactcgtcgcaccgaagccgccgccaccaccgcgcctccgcctcggccgccgccgcagctgctcctggtccccgtccctttgccgccctcgtcaggcccagctctcctgcgccgccgcctcccgccgcgccccgccatgccgctctactccggtgagccctgtcctggcctcgcgcgcagcacaccggac

SEQ ID NO: 19418 - DNA, 2300 bp, Homo sapien
tacctacataatatccataatatgtctcttagcccacataacctattaataaaaatacttactatttgacacttcaggaaaaagtttgctgaccccttatctagactaaaataggattataataaaatgggatgggactaacaggcagagaatagacgggtcaagggccttaaagtctcggtaagatccaaatattaggtatattggaagcaactgagcgagagacctgggaaggatagaggttgtggtgagataggattgtgagttgaagacttcagatctggggcagctgtgagtgaccccaggtctagctgtggccacagtagtgggtagctggagcagagatgggcctgtccgtggagttaagggcaaggaactaacagcctgagtggagacagtcaagttgcccaggggctggaggaagggaaggctgatggccggccattcacatttccaatttgggataggagagttaatataaataacaatcaaatatattcaatccttaaacgtgagggaaacctgactggaaggctgatcattaatttttttttttaagacctggagccacagtgtggaaggggttgctagtgaatagggaggcttgtgcgtgttaggtagcattagtaaatggtaccaaccacgtaaagcagagccaccagcacttgggacattgaaccaaaaccaatcttcgacgcttccagctgccttactggcgattcatttagaagaacgtggctttcctttgttactgtagtttttgaaggcagaactagcatgagtttgtggatacagacttcagccttccttcagtgttccatgcacataatcagaatgaccttccttcatcgccgcaggttattcttacagctggatggcagggtcgttgaagaacttcctcatgagtgaccttcaagtcctttctaatccagattctgtgataatacaagtatgatgcaattttcactaaaagctaaaaaaaaaagcccatctaatcagagatgatcttcacctctaatttcttgtttattgtcaagtaatacctctgttgcaggcactttatagggctacaaaaatgagtggtccccgttgatattgtgctgttatccgtatcttctttagccattatttcttcatatgtgagaaagtagtagcctcagttttactttaaaaaaaaattttttttttaaatttagagtcttgctatgttgctcagactgatctcgaactcctgagctcaagtgatcctccttctcagcttcctgagtagctgggactataataggctttgtgccaccatgcccagcttacttttttctatttctgctttattttatcctcatgtctggaccatagatagatcattgttatccaccagcaagaatgtgtcatggcataaaacagtcaagaaatctaagtgaaaccttgactgggctgtctttgggcttgtgcggtaatgcctcacatgcagtgaactctcaacaaatggcttttaaattgaattggaatcttccatttctatattagcacattttgtacctttaggaaaaacttgattttaatgtgttgttttcgtatgtgtttgcttgtttcttgagtagctgatggatttacaactgagtgacagtaactttcgtcgacacatcctgttgcagtatctcattttattccaatatctcaaggggcaggtcaaattcaaaaggtaagataatatgggtagtaaacaatttgtaaacagtagccaagaaaaaaaaggacttgcttacgatttttcttatgtatgtgtccatttcatgttaaggctgtatccctaaaacacatgtattgcagctgatacattgaaggcttttcgatattaggatatttaaggaaaagatgttaaatatatctgtcagtgtgagtttttcctgcccaactccagggcttgccaggagttgtcgtctttattagcaggtggaggtctctgctccaaaattccgtcattcccttctcacctccctcagacctcctccaaagctgatttgcagactaagccagtaatacatatctcacaaggtgtggagctctgcaggacattcaagctaaaagatgcaaagaaaatttttaagcaaaaaggagttcatttatttggggtttcacaaaacctcattaggctctctactgtctatctaaatacttccatccatttcctcctatcctgtccataactgaaggtggagcccactgttacttaacggtatttgtgttaaggacactgagcaatgccgtattagttgtataatgacttcactacctgctgg

SEQ ID NO: 19419 - DNA, 2300 bp, Homo sapien
acagactatcagaagcccagtattttatagacagtgatagagctaaaacttaatcttgtctaacatacttttcactatgtaattctgcctcttacatttttataccaatttcataacaagtgaaattataaattaatatttaaaccactaatattgtgaagtagtatataagaatcggatatttaaaagttcgtcattacagccttgctttttttgaatataatgagtgttgttaacataaattgatattttgcagaatatattctatctttgtacaaaattattttagctatcttgttgaaacagaagtcctcaagtcatggctctgggccagatctaacctactgcttataaacaaaggtttattggaatagtaccatgaccatccacttacctgtggctgtttttgcactataatggcacagctgagtagttgcaactgagattataaaggccacaaagcctgaaatacttactctctggtcctttacagaaaaagtttgccaatcctgttttagaagaatttgttatatttttcttggctacttaaagatcagttgtccttttttgtcataattaaaatctaagataaataggtagttctcagaatagcatggtgtgtgttatgttatttttaatagtttttgttttatatgcaattttttgtgggggcagcaccatccaaattcagattaagtggttagtgagaaataatctggaattgtcttctaactggacagaatttggtggaatttatttgctcagtttttagcacaagaaatgcgtaagagtttccacaggtggttaaacaatttcactggtaaatttctgtacactcttaaaaatgttccctaatctatttgtcccttacacagacttcttaaatcatatttcttcgttttttttttttttttttttgagacggagcctcccaggttcaagggattcttcagcctcagtctcctgagtagctgggactacaggtgcccgccaccacacctggctaatttttgtatttttagtcgagacggggtttcaccatgttggccaggctggtctcaaactcctgatctcaagttacccgcccccctccgcctcccgaagtgctgggattacaggcgtgagccaccaccactggccaagaaattatatttctttaggagtagggagcttgtacctacttttgcaacaagtgaaatatcatacaaaatagttttaactcccattctgctatcataatttgtattgttagtgtgccttgcaatatacagtctacatacatgattgactgggagtaaattctaggcattttgatgcagaaaagcactaaacaaatttgggtaacaatgtcgaataaaactaatatttttattttgcagtattctgaagaagttttagctgtttttaagagttataaattagatgatactcaggcctcaagaaaaaagatggaagaattgaaaacaggaggagaacatgtatattttgcaaaatttttaacaagtgaaaaggtataagtttttctttttcattaagcataataagaaatggtcttgttttatttccgtttagctgacagcctttctaagttaaactgaatagaaatgtttcttattttactttgggttaaagctgattgattaatgttagtttgaaagtcccatttcttcctttcagaagtaggactaatttggtttcaaaggtgaaagtagttctacattaagtctgttttgtaaactaattttggaataaatgcagtttaattactttcatgtctatatattttaaatgtcaagttaggatttaatttgtatatgaaaatatttcataattattatttaggtgcaagtaaggggtttaaaagttccttgttaatcttatttatacattttaaaaagtaaattttattcaaatataatgctacaagattatgtaaagtttctagtcaagatggcacattgagtttatgtttcgactcactccctttgctccaaacacatagcaatgacgggtaaaatataaacgagaaaacaaaagagacaaggctgggcttccagaaacaagataaatatcttcatggaccagaaatgccaagtagtgagcaaaactgcagcctgggcctgctggactctctatccaaggcaggtggtggtgtccaggaatttggctacaagtaacagagactaaatgtgcaccatgtgggacaaggggccagagccagattcacttcttgaagccaaggactagggtggaacttttatccagttttgggaagaaactaagaaaaaatattgccagtc

SEQ ID NO: 19420 - DNA, 2300 bp, Homo sapien
tgttgggtgaccaggtgcattgtgaataagcaataatattgtgaaaggaaatctttttttctgagcagttaagtctcaacagtggccttaaaattgtcagtaaaccatgctataaacagatgtgctgtcatcagggtttgtctttttatggatggagccaaggcagagtagatttagcataattctcaggagccccaggattttcagaatggtaaatgaacattggcttcaacttaaagtcaccagctgcattagctcctaacaagagagtcagcctgtcccttgaaggcaagcagtgacttctctctagctatgaaagtcctaaacagcatcttccaatatcagaatgtttcatctgcattgaaaaatctgttgagtgtagccaccttcatcaatattcttagctagatcttctgataacttactgcaacttctccattggtagttgctgcttcaccttgcactattatgttacggagagggcttttttctttaaacctcgtaaaccaacttctgctagcttcgtacttgtcttctgtggtgtcctcacctgtctcagccttcacagaattaataagagagttaaagcctttctctggctggtttgcttgtctatccagaccactcagactttctctgtatcagcagtaaggctgttttgctttcttatcattcatgtattcactggagtggcacttttaacttccctcaagaactttatctttgcattcacaacttggctaactgttaagcgcaagagaactttcagcctgtcgtggcttttgacatgccttaattactaagcttaatcatgtataggtttttatttaaagtgagaaatgtgagactcatccttttacttgacacttagaatccattgcaggattattagttggcctaaattcaatattgtctcgtctcagggaataaggaggcccaaggagagagagagagtcatgggaacggttggtcggtgaagcagtcagaacacacacagcatttattgattgaatttgctatcttactagcttaggcaacatggcaaaagcccgtctctactaaaaatacaaaaaaatttagccaggcatggtggtgcttgcctgtagtcccagctactcaggaggctgaggtgggaggatcatctgagcttgggaagctgaacttgcagtgagccatgatcatgccactgcactgcagcctgggtgacaggagtgagtcgctgtctcaaaaaaaaaaaaaaatagtttactgtcttagatcttagatgggcacagtttgtggcaaaaacaaatctgtggcaaaacaatgacaatgttaacctcaaagatcactgatcacagatcatcataacagatataataataatgaaaaagtttgaaatattgtgagaattaccaaaatgtgacagaggaagtgagcatatgctgttggaaaaatggtgctgatagacttgcacgatgcagggttgccattcaatttatttaaaaaaacaagaaactgtgaagaacaacaaaacaaggtatgcccatactccaaaggtacttttaagaaatgaatttttgaaaggatttgaaaatcaaatgtgttaattttgactgctctttatggatttggcattttgtagttttgattatgacacaagttatacataagtttaggtgtcactggacttgctttgcatcttttttttgtttttttactaggtcttaacttgcagagtcagtttaatctggaaaatgtcactgttttcaatacaaatgagcaggaaagcaccctgggtcagaaggtgaggctgatttgaaatcttctcagataacatatttgcaagtttgttattaagatagtgggtccaggcacagtggctcacacttgtaatcctagcactttgggaggctgaggtgggcagatcgcttgagcctaggagttcaagaccagcctggacaacatggcaaatcctcattcctacaaaaaagtacaaaaattagcagggcatggtggtgcacgcctgtggtcccagctactcgagaggctgaggtgggagaatcgcctcagcccagggaggtcaagctgcagtgagccttgatcatgccactgtactccagcctgggcgacagagtgagaacctgtctcatttaaaaaaaaaaaaaaaaaaaaaatttcatgtaaatgggcctacaagtcatcaaaaatttaaaaacttttaactttatttccaacttacagaaataatgttttgtatgtaaaaaattcaaccagtgtttaagatagaatgtacagttattctgtaatccaaggtagac

SEQ ID NO: 19421 - DNA, 2300 bp, Homo sapien
tcttttccttagcttcctgtattcttattgtgcatgttaactaaaaaatcataagatctatagatttagaaaaggagagactttgtttcttataaggagttacagcctgcaaggtggccattctgcaggctgggaagcatgcctccagccaagaccacatacagacacttcagaggaggagttggagtaggaactttatgcttaactggttggctaaacatacatattcaacaagttagaggagcggctatgaatattcatgaaagtggtcttgacacatgcatattaaacaaatatgcatgtttaacagacaatccatgttcactttggggtggagacttaacatttaaatgtatttacagtttggtcctatacatcaaaatatcttttcaggaagttacgtaagcatgcaatcactacaaattggccagaacaagtccatggtcagtgaccttcttatcaggagaaagtaactgaaatcaataaaagctgtagttacggctggtgggagagggttgttagtgtctggtggtcgatgaactgcaaattgttttaatactgtgaggccagcgcttgtttagctgctaaagaaaaaccttgaagcatagtgagaacatagtttatttttcaagcgtagggatgcatgacttttaacccttgcttggcatgggcttaggtcctgtttatactttggtatcttattgccatggagtcaattccgtcagtcctatcatctccgtttttttttttgaaacagagtttcactcttgtcgcccaggctggagtgcaatggcacgatctccgctcactgcaacctccgcctgccgggttcaaaccattctcctgcctcggcctcctgagtagctgggattacaggtgcgtgccaccacgcccggctaatttttgtatttttagtagagacagcgtttcaccatgtttgccatacctcaggtgatccactcctgacctcaggtgacccacctgcttcggcgtcccaaagtgctgggattacaggcgtaagccaccgcgcctggcctctattttaactttatggccagtcagctatctcctctaaatcacaaaagggagagggtataaccaggtccgtctgacctcccatcccgttatgactgggaactcagttgttaagattttgctggtgtccccttggcctcacgggggtctgttcagttgttggggggcttaggattttaaatttacagacttcgaagaagggaacaagatacacgtgtgagggaataagaggaagttacccgagtctgagtcagtgcttccttctccaccgtgtaactccaacttagagttactgccactcggcttctatcggccacgtctctcctgggaaggcaggcaagggacgaaatggagggagacaaggttttcgctagggaagcctcggcccaggacgcagcgccacccgttttccaatcagcgccgggcactgcattcctcctaggtctctttctttcagtagagaccttttaataataaatactacttacattgctttacagttcacacttgcggtcattatttcagtggagcttttcaacagctctgtgagacaggtattatttctatttcggagcagagagaacagcgcccttgagccacagggctcatacatccggagcctatcaccactccgcatcttaagctcccgggatgaccgcggactggcggcccaggaccactgctccagctgtttccccaggtaatccacctgccttgggttaccttttagcgcggcccagttagccgcaaccagccaccatttacccgctttccccaaaccaggaaaaccacagaaacgcatgtgcgcggccagtctcttccacgcccgggaacgcagagcttacagaccaaggccgcccaagtcccctcaccccaaaggctacccaagaaccccgagtaggctgtttggctgactcaggcgcccaacgcccacccgaactgagtcgctagggaaactcccaactgccagctcgcccgaccggtgttcacaggccactctagccgggctcagagagaccgcagtctcgttgctcctggcttgacgtcatcggcaggcgccgcagcgcagtggcgggcacgcgcagccgagaagatgtctccgacgccgccgctcttcagtttgcccgaagcgcggacgcggtttacggtgagctgtagaggggagggtgcaggcctgacccggcgctatgctttgtcctcttctccctgaaattactcgaattttgccctggggtaaagtgagacagaggtgtgtccgcctcagc

SEQ ID NO: 19422 - DNA, 2300 bp, Homo sapien
atatatcctggatattaatcctgtatcagatatagggcttttgcacatattttctcctattctgtgggttggctttccactctgtttatactggcctttgaggcacaaaagtctgatgaagtacaatttatctatattttttcttttgctgcctgtacttttggtgtcatattcataatttgggttttaaaaacgatttttttttttcggcagggcgtggtggctcacgcctgtaatcccagctctttgtgaggctgatgcctgcggatcgcttgaggtacggtttgcgagcagcctggccaccatggtgaaaccccgtctctactaaaaatacaaaaattagctgggcttggtggcccacccctgtagtcccagctacttgggaggctgaggtgggagaattgcttgaattcaggaggcagaggttgtagtgagccaagattgtgcctgggcgacagagtgagattccgtctcaaaaaaaaaaaaaaaaaaaaagaaagaaagaaaaaaaagaaagccgggcgcggtggctcacgcctgtaaccccaacactttgggaggcagaggtgggcggatcacgaggtcaggagttcgagaccagcctggccaacatagtgaaaccccgtctctactaaaaacacaaaaaaattagctgggcctggtggcacacgcatgtaatcccagctactcgggaggccgaggcaggagaatcgcttgaacccgggaggtggaggttgcagtgagccgaggtcacgccattggttagtaaactccgggctgaaaattcatatcctaagctcccttcagggatccccatttgccctgaaagacaaggctggtgccccagtgagatctgaaacatgctccaggaccaggaccctgtagtttcatcaactgcagacagtgcgggggaaaaagcatttcggtcttttcatttgttcgtcatgttcaaggtgcccccttatgttaaaaaattaaaaaaaaaaaaaaagaaagaaaaaagaaatctcctggaacggagaatctatgaaatgtttcaatatgtattcattttggggcactaccttttactagagcaaagaatcccctacttagagggaaccaatggattggttacaccgtgttaccaagtcctcaggagggcaaactgaaaagctgcaagcactgcccggccagtgttcgattgcttttggtggactagtgcgtctgagtagccatctgtaatgtcaacatgtggcagaaagtttctccgcacctccctcgccccagctccactcaccacttagtgtatgttttaaagcaataaagcgatgggtctgcttagagggggttctaaagagaaagataaacacgggctttattaagtatacagcagggcaatgtgacgggcgaccacgaagggaactcagggagcctctcagcagcccggcctcctttcgtaacaaaactggagtcaacccgatcattttaggggcgctgggtggaaggctggcttttccagccaaggcaggatgtgctggctttttctctggaggtgtccaagagcgcagagagagtgtctaatggtgacttcggattctggccactcgggctctccctgggtgacagagagagtgttccctgctgcttggtctccttcaggcgtcaaccagcgcacgcacttggaaactctgaacccggaggacgttctgtacctctccatgccccagagccgtttggggaagggcccaccttaccccccgccacccccggggcacagcagctccccatcctctcgcccaacacttgctaggtagtttggggtgtagaagcgaccccagcagcagcggcaccttaggtgctcgccgaaggtgaacgctggaccgccccgggaagggctttgctcccgacttcatcccgacgctggtgcaacgggaaaaagagagagcccgcgcgagtggggccagggcgcgcaggagagggcgggcgagaaagtgcccggcgagggcaggcgcgggccgagggcggggcgggcgcgggagggcgcgagaggggcgtgggcgcggccgctcgctcggccgggtcgggccagggggaggggcgctgggagagcgagagcggcgcgcgcggcagccccgaggcagcagagcgcggagccgggagcgcggggagcgcgggccggcggcggcgagggaggacgggggcgcagacggccggcgcgcggcgcggctaccatgggcgtgcggtgagcagccgctcgggacgacttcctcggctgcgcggcgctcgcgcggagctccccggccggcggtgcgtcccca

SEQ ID NO: 19423 - DNA, 2300 bp, Homo sapien
aacaagtactggaaggcaggagaggggaggtcctatgtaagtttccttggcctttagaagaaaccctgtgtccaggctctctgtcaactaagtcacatatcgaactggggcaggtagtgatatatggctaattaaatgtgccatgtaaacaatatctgaccactaattttaaaaaacagtttgtaaaacattcctggcatcatttaatcttttggggttttcacttgttgtattcagaaggtattttaggaccaaccttaattgtcatgcattcattcaacgaatatttattaacctacctactgtgttgtatccagcactgttttgttttgttgttgtttgtttttttggggacagaatctcactctgttgcctagggtggagtgcaggggcacaatatctgctcactgcaacctccgcctcctgggttcaagcgattcccgtgcctcatactcccaagtagctgggattacagttgtgcgcagcaactctcagctaattttcgtatttttcatagagacagggtttcaccttgttggccaggctggtcttgaactcctgacctcaggtgatcctcccgccttggcctcccaaattactgggattacaggtgtgacccactgcacccagccataaaactctttaacacaaactcttcaaagtgacatcttttgtaaccttcataggttacaaaaggtattgatatattaatagattgagatttgattgcgggggggcggggcagggggagaatgctaaaaaaataagtcagctttcttttctgtaactatttaaaagaatgcaaagtaattctacaggcaattccttggtgggcttatttggtaattttttttttcttttccattttcctcttgctctttggtttgtaggagaaccgctttattcccaggaggcaattttgagtcccaacatgtcctgcatcatctcctgtgcccattgccaaaggaaggcgaccagagcgtgggtttcagcacagctctgattggatgataagcaaggagagtaatgtgctgctaggaggttagagaaaagaaaatactagaatataccagaatgtagtatttccacttccctccctccaaatcaaaagcctcatgaatgaaattatgaccattattcaagtgcaattatactgagtatgtaaaatggaaacactgaaagtaaatcatacatttggatattacatttcatatttgagaacatgccagaaacattgtattattgttgagtgtaatgtcaggagacaaacttctacgcattttatacataaatttttccattttctctgtttcccatttatgtcaagttgaacacatggtatgacttttaatattctctcttccttctccttccccacattgaatgtcaagtgatcacactcaatcttgattatcctaaatttacccttaggacctgtcacctcattgggtgttgccgctagaacaagagggttttttaaatggtataaaaaggagaggcccggcttggtagctcatgcctgtaattctagcactttgggaggctggggcgggaaatcccttgatcccaggagtttcagaccagcctgggcaacatggtgagactctgtctctataaaaaaaaaaatttttttttttaatttagctgggtgtggtggcatgccctgtagtctcagctactatggaggctgaggtgggaggatcacttgatcctggaaggtggaggctgcagtaagctgagtggcaccagtgcactcctgtcaaaagagagagaggagagagagagagagagagaggaagagtccctaaagaaacctataaaactggggtcttatggatgctagcacatatcttggaaagaactgccagcgccagtggattacagaagacaactgtggctacaggctgttcttgccagctcaggcgtcaactcgtggaaaccggttaatgacccgaggggacagcggattctcgcctaagcaagatcccgcagatgggagggcgtaggaagaggttccccgggccggctccaggccccagcgggcgtgggcgttggcagtgagcgaggggtggtcccgcgccgcgccggcggggggcgcccgaatgagagcgcggggcggtgccgttgggaccacggcggccagagcggcaggatggcttccggcttcaagaagcccagcgctgcctccaccggccaaaagagaaaggtggcacctaagcccgagctcactgaggatcagaagcaagaagttcgggaagcatttgacctcttcgacgtggacggaagtgggaccatcgacg

SEQ ID NO: 19424 - DNA, 2300 bp, Homo sapien
tgcacttaaaataacacttattctgtaccatgcactgtctaggagcttctacatattccattattatctttattttacaagacagggaactaaggcatggagagattgagtaatttgtgcaatattacctacctagtaagtggtaaaggaaagattggaacccattctggctccaggatccaggctcaaagccaatatactatccaccaccccaactctttagtttgatcaatttgtcaaattattttacagttatttatctgtaaattaaggggataattgcccagtcaataaatgtgtccccttcaaaggttacatacttaaccaatggtgctactgggctcagaacatttttggaactacgattttggtggcaaccaaaaaacctccagtacattcctctgaacattctccagaggcaagtctttctccatggagactgggcttcattttttgaattagcctgaagttgtttgaggtcaaatctgatgaaaagagcggctggggaagctggatattttcgttcgtgatttaaaacagtaaatgccacctaaatgagaaggctactttctttgaatgttttgtaaactggctttgaaggtacttctttaaaaaagaagcacaagaaagacggtgactggcaacagcctcactggaatacgtctctaatcatcaaggcaacccacactcatttggatgtgtgcatctggtgatgttattatttttaaagttatgtgccacaaagatgcattctttgctatacaaaagagctgttgttaaatttataaagatataaaaaggggaaaggggaaggcaccaaatggaagattcttaggcattaagtgctcagacagcatagatcttcattagatgacgtcagggagaagagacacagactttgccatctcaggtagaagtatcaaagtcatcagcctcctagtaagacagacctgggtttgaagctctgcacagccatttcctagctggtctggggaaaaattacttcttgaagcctcagtgtctttatttgtaaagtaagtggaattatattaccttgtcaggatgttgtcagaattagaaataatttaaagaggtccagcacgagcaggtcaatcaagggaagatgttaaaaataacaacaggtgaaatgtactcccaaaagataaagtggatacatagatgaatcttcctcacacacagagtataataacctcagaaaaatattgcctagagtaaacatgcctcccaagccaacgttcatcatccaggaatacggagaggatgtttgggatatggggggcatgaaattttacaattgtagggccctttaacaagggtagacttgcaagttgcactgcctttcctgccctctctggctacctgttccagcatccagagtttgtgaacctggggcccaaggacagcacctggcatgggcaggcccacttggcgactctctcagggctgctgcagctgtgtcagtgtccccacagggaggctgacatccagccatgaccatcgcattaagcccagcagtcgggcaggggagcaactgctcagaggcacctttgacccactacttttttcccctcctgctttatctgcccagagcgaggctctctttctaatgtgtacaaggcgttctacctatgactcgtggtcctgccatagaaatgcttttttttttttaactgaattaagttgccaagtttgaaaaatcaggaatttcacataagcatccctatttctgtcttcttttgaaaaactgaatgttctttccacagtgagcccacattccttcctgacgaccatcaccgttcagctggagtagagagggctctgctcgcttcagatccggacgcgcaggtcctctgcaggccccgcccacccggcgtcacctgcaggtcccgcccacccggcgtctgcaggccccgcccacccggcgtcacctgcaggccccgcccacccggcgtctgcaggccccgcccacccggcgtcacctgcaggccccgcccacccggcgtctgcaggccccgcccacccggcgtcacctgcaggccccgcccacccggcgtctgcaggccccgcccaccctgcgtcacctgcaggcccgggccgcggggttggtttccaccctggaggttgctgacaccctgtgccctcggctgacttccagccggtggcacagacgcctccagggggcagcactcaagcgcatcttaggaatgacaggtgagaacatcctccgggccccagatttctctcctcgccgctcttgcccatttctccggagagccaga

SEQ ID NO: 19425 - DNA, 2300 bp, Homo sapien
ggcaacccacactcatttggatgtgtgcatctggtgatgttattatttttaaagttatgtgccacaaagatgcattctttgctatacaaaagagctgttgttaaatttataaagatataaaaaggggaaaggggaaggcaccaaatggaagattcttaggcattaagtgctcagacagcatagatcttcattagatgacgtcagggagaagagacacagactttgccatctcaggtagaagtatcaaagtcatcagcctcctagtaagacagacctgggtttgaagctctgcacagccatttcctagctggtctggggaaaaattacttcttgaagcctcagtgtctttatttgtaaagtaagtggaattatattaccttgtcaggatgttgtcagaattagaaataatttaaagaggtccagcacgagcaggtcaatcaagggaagatgttaaaaataacaacaggtgaaatgtactcccaaaagataaagtggatacatagatgaatcttcctcacacacagagtataataacctcagaaaaatattgcctagagtaaacatgcctcccaagccaacgttcatcatccaggaatacggagaggatgtttgggatatggggggcatgaaattttacaattgtagggccctttaacaagggtagacttgcaagttgcactgcctttcctgccctctctggctacctgttccagcatccagagtttgtgaacctggggcccaaggacagcacctggcatgggcaggcccacttggcgactctctcagggctgctgcagctgtgtcagtgtccccacagggaggctgacatccagccatgaccatcgcattaagcccagcagtcgggcaggggagcaactgctcagaggcacctttgacccactacttttttcccctcctgctttatctgcccagagcgaggctctctttctaatgtgtacaaggcgttctacctatgactcgtggtcctgccatagaaatgcttttttttttttaactgaattaagttgccaagtttgaaaaatcaggaatttcacataagcatccctatttctgtcttcttttgaaaaactgaatgttctttccacagtgagcccacattccttcctgacgaccatcaccgttcagctggagtagagagggctctgctcgcttcagatccggacgcgcaggtcctctgcaggccccgcccacccggcgtcacctgcaggtcccgcccacccggcgtctgcaggccccgcccacccggcgtcacctgcaggccccgcccacccggcgtctgcaggccccgcccacccggcgtcacctgcaggccccgcccacccggcgtctgcaggccccgcccacccggcgtcacctgcaggccccgcccacccggcgtctgcaggccccgcccaccctgcgtcacctgcaggcccgggccgcggggttggtttccaccctggaggttgctgacaccctgtgccctcggctgacttccagccggtggcacagacgcctccagggggcagcactcaagcgcatcttaggaatgacaggtgagaacatcctccgggccccagatttctctcctcgccgctcttgcccatttctccggagagccagagaaagccgctcccaagtccaaggccgagctccgcagacgcccggcccctccggcgcggacagaacaaagccactgttcttgccggggaaggtagaaatactgtgggctgcttcagaggctgccagcaaaactcaggcaatctcctgggctgttccaatacgtttattctctttttcaaaacaggaggaggaggtagaggcggggagacacaccatccctgcaaaactactggcaaaaactaagcggagccgggtgtggtggctcacgcctgtaatctcaacactttgggaggccgaggggggccgatcacttgaggtcaggagttggaggccagcctggccggcatggtgaaacacaaaaattagtcgattgtggtggtgcatgcttgtaatcccatctacttgggaggctgaggcaggagaatcgcttgaacccgggaggcggaggttgcagtgagccgagattgcgccactgcactccagcctggacaacacagtgagattctgtctcaaaataaataaataaataaacccaagcagaaaaagaatcactctgaaaacgatcacatctaactatcaatgctcatacagtttatggaattatcagcccaacttgataaaatcagtatttgaggaaactgtggataagccccctgatttcaatccccattgtgcca

SEQ ID NO: 19426 - DNA, 2300 bp, Homo sapien
gcaaagcagagtgctatttgattcatgttcttagtctgtggatctcagttgaggagaactcgttagagatttgccctctttctgtctttttgagaccttactggtgcaggacagcaaatcctagctggtgtctacaggacacatgcactcttaggttacataactgcagggaccactgtcattgtatcctggagctggttctatataagacacagcctgagcagtatataggcttcctagtctgctcctggccaaatgtcccagttggaagcccagaggttgtctggctatgccagtggcaggatgggcaagtctaactcaagggtgacatattagcaagacctttatggccatgcatctaagatgctctgtccaagcctgaacttagcaacaataaacctgacattttgaaatccatctgattcctctattttccagttgatgccacatgcatcctcttgccatctttcttaattaagatgactttgcttctaaatctccttaattatcaagcagctatctacaatattttgtaatccccttaaatcttgagcataatgatgtcataattatgaaagtgaccggattcacatgaagtattgcttaatcttaagaacaaaatggcagctgtgaaaacagatgaagtaattagaggaagagcctttttggaagcttcgagatattttcaaagtaattagtactagttagcaataaagttctgttctgagaaattgctcttaaaggaggaacatggattaaagaaaaaaatctgctactaggaagtaagccatctttctatgtgtgtgattggttttgcttcctgaaaactggttccgttttcaacaaaatttgggtctgttgaaaaagaacacgcagatgccagccttgatgtcaaacgggcccaaacttggacagtggtaaactaatgagcaatggtgcacagagtcagggtaaaagctggacaatttcctatgaccaacttttccaggactctgctctgctcttcctgagaaaaatacccaaagtgctgcctcttccattggccaaccatgcatctttcaggataggacacatctgtttataggtgtggattgtagttgctcataagtgacattaggctgtttaaaataataatagttcgagttttgctatgagctgatctgttttccaagagagctaagagttttccagctaaaagagggaattagtgggtaatcaaggcagctgacatggggtgtggctgggccttgaatgtgtgtcactctctgtgcccaggcagagcaaagataaactccagactgcatgttgctcagagaccaggaccaacgtcatagggcgcctaaaaggcaggtggcccagttcagaattgtcaaggtctgacctgcttggacaagtgctgagtacatagtaaggatggattggctagtctctcaaaacttgcaaacagggcgcaggtgatcttgagatttcagttgccagagagacccatcgtgtagattccagagttggctatcatgactaacagctgtctaagttgtttttaaatgaatcattaagggctacattttcagttcagctaatcaagtagcaaattacggtgggtctaaaatacttatctattgcattatgtatatgctagactttatcactttagttggttatatcgcttcatatactaacagtcaaaaaatgccaaacgagaaaacaaacaaacaaagatgccacatgactgtgtaaatacacttttcgaactgttttatctaagagtttactcactttcacattgtggcttatagtattttcaatctaagagactaattttgcttacataggaaactacatattttaaattgaaaattaaaaaaatatttttaaggttttaatgagtcctatcaaaacacatttgtatataggaaggtagcccaaggtcactgttgccaattgtgtacacagcctgccctctagtgttttcttctgaacagtaccaaattttagatcatagttgtaaatctcaaaatgttgggttaataggattaaacactgtgtcatcaaactgataggacacagctaaatccctgacacggatgaaaattaaagcagagaaaaacgaaggtccttccagaagctggtggcaacttcactggggagatattgcaaagttagtggtaaatacactatattaataagttttgttttgtaaatagagtaatgatagaagaagagttagttgaaatgatgtatgtaaaatgtgataactgcataattactagtacagttgctagtttacgactgtattaaaa

SEQ ID NO: 19427 - DNA, 2300 bp, Homo sapien
ttcactctacagcgctggtgagacacgataggttttagagaaaggaagcctcatgctggtgccccagtgggtactgactatgcatttgtagccaaatcaaagtatttcccataaagtcatctatctcttcccagttgttgggacttccaatggcaatgggaattaagatactgagtaattgggagatcaagcaaattatttactaacaaggcacacgaagtgatttttcacaggcaatgttaatgtttttcttttttatgtagttttaaaattctaaaagtaacaaaatcacaactaccaaacatttagacgacaaaaattatccataatcccaccatcttaacacaaccactattatcatttgttttccttattcacattttctacctattttcttagattccaagaaatagaattacttgtttagaggttattaacatcttattgttctggatatatatatatatatagctatatatagctaaatttaataacagcaatgtctgcagtaccactttctcaaatgctaactggcatttcaattttttgagacagtctctctctgttgcccaggcaggattgcagtggcatgatctcggctcacggcaacctccacctcccaggttcaagcgactctcatgcctcagcctcccaagtagctgggattacaggtgtgcaccaccacacttggctaatttttgtattttttagtagagatgtgtttttaccatgttggccgggctggtctcaaactcctggcctcaagtgatccttccacctcagcctccccaagggctggtattacaggcatgagccactgcctggcctggcatttcaatttttaaaatcttcagtaataaatgaaaatttttatcttattgttataatttttatggttttttattattcatgagaataaacattttccaagtttgtttactgactgaatttcttttttgtgcaccttacttggtatcatggataaaattttgtcaattttctgattatatcaatgcattcagggtcccaaacctgccaaagtttaaagagaaagatactaagggaaaaaccaggaaaagatggtagaaaagaatcaccctggcattttcaatcacgtaaacatttgctaggtgccctagctgcaggtatacagctcactgaaacatgaattccaattttataaggtgaaatatatatttagaaccctcttctggaactttcttctagttatctagcatcctaagtgcctggacgttcctgattggtttgcaatgtgttttatttcccatccccaagtttcatagctgccggccctgggatctacagtcacaggctgtaacacaatatcttgcacatcctgagtctttaataagcttttgtagatgggctcttaccatcatcatcatcgtgaaaggcaaatatacaaaatttgttgactaatgtaatgagtcatgagtaacagaagtttactgaccaaacactacgtgcatgtagagttcagaataaacactttattatcacatcagaggaaaagaccatcttagaggctcaacaacccaggaaagctgtgacgatttcttcaaattgttaagaatatccatgcatatgggtttcacattattttgctacatacagtaccaatttttccaaaagccaacagcaggtattctattacccatcctggacttttactccaagaaaaaatacactgagtctgtgagtaatttattagtattttgatcattgctgcctttttttttttttttaaggtaagaagatctaatgcatcctatatccagtaagtagaattatctcttcatctgggacctggaaatcctgaaataaaaaaggataatgcaataaacacagttgcaggaaagtatgttagctatatactatgaagtactcttagtttacttatgttgaatggcttagctattaatactcaaattgagttaaaatgaaaattcctccttaaaaaatcaaacgtaatatgtattacatttcatggtacattagtagttctttgtatattgaataaatactaaatcacctaggtgtctatgttctatcacatctacaaacatgtcacttcctaattaacaaaatgttcttcctttagtttgcttttgcacttaaaatatatataattgacttttttggaaaaaaatctaagattcattgctttgttttgtaaagaccaataggttctgtatagtctttttttaaattgtggtaaaatacacatggcattaatttaccattttaaccattttaaagtgcacaatttgtggcattaa

SEQ ID NO: 19428 - DNA, 2300 bp, Homo sapien
gttggctttccacagtcctgctaaagccctgcaatgtgcagaacaaaccggtccagctaagaaaagtcccacccaaaatgctgagagcacctctgtactcaatcaaccgttgaggtaaaaggatgcttgcaagtacaacacatgtatcagtgcattttaaactcattataaaatcgttctgtaaaccaaaaataaaattctacgcccagaaccatctgaaaagaccactcctctgggtcaaaggcattccaaatttaaccacaaaaactagttcaggccatgatgggaaggggagccagacatgcctcattattccctcctccgtttggaatttaggcacagctgaccagcattgacatcaacacaggcctcaagacaggtagaacacactctttaagtctgacaagaaacatttacaatctatctctctaaagcctgctacctggaggtttaatctgcatgatgaatccatggtctccacaaccccttatcttaacccagatattcctttctattcattcaaatcttttttttttttttccccatacggctctgtcacccagactggagtgcagtggcgctttctcagctactgcaagcaacctccgcctcctgggttcaagcgattctcctacctcagcctcctgagtacctggggttacaggcgtgtgccacctcgccccactaatttttgtattttcagtagagagggtttcactatgttggccaggatggtctcaatctcctgacctcgtgatctgcccgcctcgacctcccaagtgctgggattacaggcgtgagccaccgcgcccagccctctattgattccagatctttagataacaattctttcaaccaaatgtataaaaaatcaagttgtagcccaaccaccttggggacatgttctcaggatctgctgagggctctatcaccggccattggtcactcatatttggctcagaataaatttcttcagatattttacagagtttaactcttttcatcaacagttcccactccccagtgttaatgttataaacaattcagtaaaactgggaaatgtggtctattaaaaacttggggccgagtgcggtggctcacgcctgtaatcccagcactttgggaggccaatgtgggtggatcacctgaggtcaggagtttgagaccagcctggctaacatggcgaaaccccgtctctactaaacatgaaaaaaaaaaattagccgggcgtggtggcggcgcctgtagtcccagctacgcgagaggctgaggcagcagaattgcttgaacccaggaggcggaggttgcagtgagccgagatcgcaccattgcactccagcctgggtgagagagcgagactctgtctcaaaaaaaaaaaaaaaagaccgccagggctcaaacaaaaaacctcggaaaagccctggcggtcttttttttttttttttttttttttttgggacagtcttgctctgtcgcccaggctggagtacaatggtcggatcttggctcactgcaacctctgcctcccaggttcaagcaattcttctgcctcagcctcccaagtagccaccacgcccagctaatttttgtacttttagtagagacgggggtttcaccatgttgtccaggctggtcttgaactcctgacctcaggtgatccacccgcctcggccccccaaagtactaggattacaggcgtgagccaccgcgtccagcgccctggcggtttttaatcaagtagaaaagctgcattataccacttgcttcggttgcttcagtgagaacgaagaaatggaaatgcaaatcccttattagttgtaggaaacagatctcaaacagcagttttgttgacaagaccgcaggaaaacgtgggaactgtgctgctggcttagagaaggcgcggtcgaccagacggttcccaaagggcgcagtccttcccagccaccgcacctgcatccaggttcccgggtttcctaagactctcagctgtggccctgggctccgttctgtgccacacccgtggctcctgcgtttccccctggcgcacgctctctagagcgggggccgccgcgaccccgccgagcaggaagaggcggagcgcgggacggccgcgggaaaaggcgcgcggaaggggtcctgccaccgcgccacttggcctgcctccgtcccgccgcgccacttggcctgcctccgtcccgccgcgccacttcgcctgcctccgtcccccgcccgccgcgccatgcctgtggccggctcggagctgccgcgccggcccttgccccccgccgcacaggagcggg

SEQ ID NO: 19429 - DNA, 2300 bp, Homo sapien
ccccttctaacaggggaagggaaaggctgacatacatcagatggtgatgttcgtctatggagaaacaccaaggaggttgggggagagtcacagttttaaatcaggaggtctaggaaggcttgcccgagtggagtagagactcaaaggaagaagccaagtgtgggggaagaaggttccagggagtggggatgtcccggtgtgctcaaaaactcacaagaacagcagggctggtgcagagagcagcagctaaggtcagagctgaaaaacggacaccataaggaccgtggctcttactgagtgaaatggagccactaagggcttgagggtgaggaatgatatgctttgacctttggtggtgtctttttttgtttttgacatgggttctccctctgtcgcccaggctggagtacagtgccacgatctcagctcactacaacctccgcctcgtgagcaattctcatgcctcagcctcctgagtagctaggattacagacatgcaccagcacacctggctaattttttgtgttattagtagagactggggtgtcgccatgttggccaggctggtctcaaattcctaacctcaggtgatctgactcagcctcccaaagtggtgggattacaggcgtgagccaccacacctggctgctttgagttttgaaaggatctcactggctgctgtgttgagaacagactactgacttctaatagcagcgacttctttaccttgataaaccacagcaactcctccaaaacacccttccagaacacacgtttggttgtcagcagagggaattcatctgaaaaacaatttgccatacggtttcaagatgggaagacagatcatgccatccaactttcttcagggaagaaaactgccctgggacgtgaggccctggagcatccagaaagcctagactcccgcaaagtgggccagagatcacggtggagctcccaggctgcaagtcccatcagtggcccgattcaggctgagacagcacttctgtgccccggtgaccagtggacacaggaattccacacagtgagatggtggcgagggcagggatgaacatgtggcaaaagggaggagctatcatccactgcccactagtgctaatcctgtcacaaaggtgtgaagacaacaccaagcatgtgtcccaggaacaaaaagggaggcatcagaagtgtcgagccacagagaaatgaaagtgtaaaaacttatctttaaatgcagtcctcgttcatccgcactcgcttgtggtacagtttatattcagacaacagagagatttttgcaagcacctgcttttatcagaattgcctactaagcattattttctccatttttaacatatagggaagctatatgagaagtaacttgctcaatgtctaagcagaaaggtgggttaaaaatgaggtctatggctcatcaaaggcccctgggcttggagctgcagaaaagtggatccctctcctcagacaaaactccccacgctgtcccacgccaatcagccacagcagctgctatgtattcgtctctagatgggtccgtgggccggagggcttttccgctagctacagtgaatctgcttcaccacgaatgggtttccccattcaaaaccacctccacccctgtgtcaaggctgcgctccatttatctgagcggtcaaggtcagcccctggctcacacaccttcgagtcccctcccccgcgcagctggcgcaggatccaggacggcaggacggtgtggccttagggagggccaacggctgcctaacgtcctgtgcccaccccgccccgccccactgtcccctgaaagcctggcgccaatgacccgcgagacattttttgcctggggtgctcctgtcggaaaggaaagaggaaaggacgactaagaacttatactcgaactcccgaatttctcttttcaaggtttaagaggaaagctggttcgtggggattggatgggaggccaccaggaaaccaagttcccgcgccagcttcagtgctctcctcttcccgccgcctttgccccgcccacatcactttcgctccagtttttgaaaacgctgcgaagcggaatggtccacaggggaaaacggaggaggggccaaagccaggactttgagaccggcgcgcggtcaagcccaggcagctctccctaaccctccagcactgggcaaacgctgcccgatgacgcccgcctcgggggccacggcatcactggggcgactgcgagcccggccgcggagccgctgggacgcggcttacctcccggctgtcgctgctgtgtgtgttgc

SEQ ID NO: 19430 - DNA, 2300 bp, Homo sapien
gccaaactgaagagacacacagggcaaggtgtgaggagggggtacagagcttccatgtcccctccaggtgagccacactcccagtacctccacgtgttcaccaacctggaagctctctgaaccctgttccttgggggttttatggaggcttcagtatttagatgtgattcattatttggccattggccatcaattcagccttcagccccctcgcctccccagctatctgggaataggctaaagtttccaaccccacaatcatgcctttcaggtctttctggtccccagccccgtcctgaagctacgtaggggacctcagcagggctctctcgttcacgtacaaaagacactcctatcactcaggagatgccaagggttttaggggctgtgtgttgtgtgttaggaaataggggggcagcgatgggggcagagacaaaatatatattccttcttatgtcacatgggcttttgattccagcctctctgggagaaatttaatactttcctgttcacctctctaaatcattttggctgagggcagtggctcacgcctataatcctagcattttgggaggctgaggtgggtggatcacctgaggtcagaagttcaaaaccagcctggccaacatggtgaaaccccgtctctactaaaaatacaaaaaattatctgggcgtggtaatgcgtatctgtagtcccagccactcaggaggctgaggcaggagaatcacttgaacccaggaggcaggggttgcaatgagccgagatcacgccactgccctccaacctgggtgacagaacaagagtccgtctcaaaaaacaacaaaaaaattattttggatccaagccctcgttctgaaagtacacaagcaaatgcaaagccattcattttgtggaccgcaggactctgtgacttagtgagtcaccttgggctctggaaggtgacagcctagggtaagattcctgggcagcaccagcggtagacccactgcgagattgagaagtaatgcctatttcatggggtggttttgaggattcagatacatgctgtaagttgcgtcatgctcaaggcaccatggctggcacatggcatgcagtcggcacatggtggatttattactgtttctccttacactgtgcccacttctagagagtggagagagaggctggcttctgcatgttactcttatatccactcattctatggatgccacagaatattctagctttaaaaagagagagatcagtgctatcttccccttccgggaaggttgtgaccattaaaaaaatggttcccatagagatgaggaaagaaagtcaccctacaagtaaaaagtgatctctgtcagccaggctgtttctgctgttaatttcaacaacacatgggtgttactctggtctatgctataaccgtaatgcttgtgaaacagatcagcaatgactgacttcctggtcagaccaaggggctctctccagtgtgtgaccctgtgctcctttcccacagctctgtgcccaggcgctgaaggatggctggaccaggtgagtgtgatgatggacctgactttcccagttggcggcaggagagactcaggcagtaagtctctcctggcagggagccaaggagtaaaaggcacccacgggctaggatccccctggctcatagggatgcataagagaagtttccccttaggccaggctctttctctaaaggcaggatgtgagtcctcattagaattataggccatcagagttgaaagaggcttgggagattgtttatttcgggcactaacctagagtagaaatccagtctttactgtcagtaacagcgttgattcagtttctgcatgaacatctccagaggcagcgagcttaacttggtgaggcactttccattctttgagggctttgagtattaggtgggtcttttcttctcttttttttttttgagatgaagtttcactctcgtcacccagactggagtgcagtggcgcaatctcggctcagtgcaagctccacctcccggattcaagccattctcctgcctcagcctccctagcagctgggattacagacacccgccaccacacctggctaatttttgtatttttaatagagacagggtttcgctatgttgatcaggctggtcctgaactcctgacctcaggtgatccgcctgcctcagcctcccaaagtgctgggattataggcgtgagccactgcacccagccaggtgggtctttaatatcagcaaccctttgcttccatgtaatttccagccagaggtcccagttcccaagagcca

SEQ ID NO: 19431 - DNA, 2300 bp, Homo sapien
cactaagttacccaagtggtaaaagttaacaatcctaataataaaacaaaatgacataatcacttatgtagtattgatgccaaaaaatgtattacctgaatctagtcatgaaggaactccagatcagcccagattgaggaatgctgtacaaatcaagtggcctgtactcttttaaaatgctaataacatttaaaaaagaagaagaaaaattattccaggtaaaaagagactaaagaggcatggcgactaaatgtaatacgtgatcccagatgggatatggattagggtaaaataaaatacattattggaaaaaactggtgacatttgattatggactggcctttagacagcaatattctatcaatgttatattccctgagtgtgattattgtactacggttatgtaagaaaatatccttgttttcaggaactatacactgatgtatttagggttaagagagcatgatatttgcaactttattcaaatggttcagaaaaaagaagtacatatgtgtgtgtgttcatatgtatatacatacatatacttaacatatatatagagagagagaaagaagagaggaaaacacaggtgtttttcctgctattcttaaaactcttcaataggttagcaactgttttttttaaacttaacctttaggtgggtttctattgctaccttttaattcttgagatgtgtccctggacggaagacctaaatatctttctctctctctctttttttttttttttgagacagagtcttgctctgttgcccaggctggagtgtagtggtgcgatcttggctcactgcaacctccgccttctgggttcgagagatcctcttgcctcagcctcctgagtagggactacaggcacaaaccaccacacctggctcatttctctgttttcagtagagacggggtttcaccatgttggccaggctggtcttggtcccaaagtcctgggtttacaggcatgagccatcacacccagccctctttttcatttctaaaaagtgcttttgtactttgcttcctaaccagattggtccagaaaagggcgtggtgcacctggcgacagcggccgtcctaaacgcggtgtgggacttgtgggccaagcaggagggaaaggtaacccctctcacaaacgctcaggaggctcctgggagctgtacgacactgactttccctacgcacagaggaaagacagacacactgcagcccccaaaaggaaatacagataattgctttggtgtttttttctcctctgagaggttttggcagtaggtagggaactgcaggaggaggagaaagaggagacaggatggcggaaggcgcaggcagcagtagaggggggtgtggggacctggtggctgacagccagcattagagctgccaacgcgtttactgtcaggaaaaaatggggactttacacatatgtcttacaaatcctttcttttttacttcaagcctgtctggaagttacttgtggacatggtgagtagcattgttaatgttacaattgtttctgtaaatgaaatggatatcattgatgacatgccttttgatgatcagtaaatatattcaggactatctgttgatcactatagcgatgataaagcaaaaagccaataaaatatgacattccttttctgatatctgacgtaacagatggctgtgctcatgcaggcagggtggcatgaggggaagcagtgagggggtcctgcctcccccactgtgcatgtgtaacacacggtgccagttctctgagcctccattgcctgactatgacaagaggatcatcctaacttctctaggaacctcacaaaattaaagatcaatgagaaaagcacctcataaactctgaaaagccagatgttataatattatgaagatattatccaggccaggcatggtggctcaagcctgtaatcccaatactttggaaggctggaggatggcttgagcccaggagtttcaggctgcagtgagctataattgcaccactgcactcaggtgacagagcaagaccctgtctcaaaaaaagaaaaaagaaaagatactatccagtcactttgacaccaagaataagatcaggccattgtagcctctactgtacaattccagcagggaaggagctcaacactgaattctaaagctatgcacttgactgttttctttctccttgaccttttcatagcaggggtgaacaactggatgctgaggaggaaaaaactgggcaaattaaaggggaatgagcttcagaccccatgcagagctggctgtgagtccgggtttcac

SEQ ID NO: 19432 - DNA, 2300 bp, Homo sapien
aatgaatgtctgaaccagaatgattgtgtatcccattaacaaaagccctagagaacctggaatggctggttcagccctaaatgctacatctgacctaaagtgtgcaatcatccgagagctgtttcacccttagccaggcatgtgctaaaagcttggggcatcactttctttctttttcttgagatggagtttcgctcttgttgcccaggctggagtgcaatggcatggtcttggctcactgcaacctccacctcctgggttcaagtgattctcctccctccgcttcccaagtagctgggattacaggcacctgccaccatgcccagctaatttttgtatttttagtagagatggggtttcaccatgttggccaagctggtctcaaactcttgacctcaggcaatccaccggccttggcctcccaaagtgctaggattacagacgtgagccaccgcgcccagcctggggcaccactttcaaactgtccttctcaagatcttattgacagtaaaactgtacccctacaactgtcctattaaatgactaaaaacttttactattgaatccacggcagcaccaaacaaattaatcaaaacgttttggaatacattcctttctttgaagctaagttgatggcttgattcaattattgtgtccatttacacaacgtaggctaaatgtttcctagaattggcaaaggatcaaagggttactttacttattcatcatcttaaataacccaagaaagcctttatattattattattattattattattatttgagacagggcccagctctgtcacctaggctggagtgcagtggcacaatctcagctcactgcaacctctgcctccaaagctaaagtgatcctcctacctcaagtgatcctcctacctcagcctcccgagaggcggggaccacaggcgcaccaccgcaaccggctaatttttgtattttttgtagagatgatgtcttgccacactgcccaggctggtctcaaattcctgagctcaagtgatccacccacctcagcctcccaaagtgctggcattacaggagtgagcgccaggtccaagaaatcctttcaaagtaaaataccacaggacatggtggctcacacctgtaatcccaacacttcaggaggccgaggtgggaggattgcttgagcccagagttccagaacctccccacccactgccccatgcaacatagcaagaccttgtcactacaaaaaatttaaaaattagctggtgtggtgttgcgtgtaggtcctagctactcaggaggctgagacaaaaagattgcttgaggctaggcattcaagattacagtgaggtgctgggtgcagtgtctcaggcctgtaatcccagcaattttggtggccgaggcaggtgtatcacttgagctcaggagctcgagaccagcctgggaagcatggtgaaaccctgtctctaccaaaaatacaagaaattagctgggcatggcagctcaagcctgtggtctcagctactcaggaggcggaggtggaaggatcacttgagcccaggacgcagagattgcaatgagcctagatcccgccactgcactccaggctgggtgacagagtgaaaccctgtctctaaaaaataataattaaaggtaccaaaaataaataattgatggtaatgccgacccaaattaaatttaaccttcaaattacttatgaaaaatgtagtatatcataagaaagtcaatagtaagaaatttcatgttaagacagtgttttcatatattttaacattttacatataaatagtatgctaattgcaaattcattttatttaatgtttaatagtttatgttatgaattcaaggcattttctatacttgtcaataatgaaaaggcatttctccttttaaaaattctatgaagtcagccttcttattccttaggaacatgaactagtgtggtttggttttgaatctgattgttcaaacactttacaaagtgaataggaaaataatttgggaacatttatatttaaacttgtcaatctatgattctgtttttcatgtgacagccaatcacaatgtgttctctactcaggaagtttagctcagtatatggattaacacgtgttctacttgtgtgatatttcttatgacaaccacagaaaacatatggggctgggcacagtggcttatgcctgtaatcccagaactttgggaggccaaggcgggtggatcacttgagcgcagtaatttgacaccagcctgggcagcatgtcgaaactgcgtctctacaaaaaataccaaaa

SEQ ID NO: 19433 - DNA, 2300 bp, Homo sapien
atgaatttctctacatttctacatttctttagatctttttttctcagcaatgttttatagttcagtgtgcaaatcttgcatatttttgttaaacttgtcctgttttatatcttcaatgcaattgttttaagagatactgttttctaatttgtttccaattttttattactagcacatcaactatagattttaaattgaccttgtatcctacaaacttgctaagctcaatattagttccagtagcttttttcgttaagtccaatgaagacagttttcaacaaagatgaataatcatgtcatccaagaataaacaggtttacttccttttcaatctgccttttatttcttttcttattatattaccctaactagaacctgcagtactatgttgaatagaagtggtggaagcagacatcctttccttgttccaaatcttaaggagaaagcatcaatcattcaccataaagtcagtttgtggctgtttctatcttctgaaatagattatagagaattgttgtaatttcttccttaaatgtttggtgtaaaattcaccagtgaaaccatggacctggtgctttttgtttttggaaggctattatttattcaagttatttaatagatataggcctattcagattgtccatttcttctcgtgtgagttttggcagattgtgtctttcaaggaattggtttatttcatccaggttatcaaatttgtggacatagaattcatagtattcctttattatcattttaatgtccgtcggatctgtagtaatgttccttatttcacttttgatattagttatttgcgttctcttttcttgcctggttagaggcttattgattttatcaatgttttcaaagaaccagcttttgttttcattgatttttctttgttgctttcctgttttcaatttcacaggtttctgctttaatttttattatttcttctcttctgcttactttggattttctttttatttctttttatttatttatttttgagacacagtctcactctgtcgcccaggctggagtgcagtggtgcgatctcggctcactgcaacctccgcctcctgggttgaagcgattctcctgcctcagcctcccgagtagctgggactgcaggcgcccgccaccacgcccggctaattttttgtatttttagtagagacggggtttcaccgtgttagccaggatggtctcgatctcctgactcgccatctgcccgccttggcctcccaaactgctgggattacaggcgtgagccgcccagcatctttttttttttttttttttttttgagtcggagtcttgctctgtcgcccgggctgcagtgcagtggcgcgatctcagttcactgcaagctccacctcccgggttcaggcagttctgcctcagcctcccgagtagccgggactacgggcgcgcaccaccacgccctgctaatttttgtttttagtagaggcgggatttcgccgtattggccaggctgatttcaaacgcctgacctcaggtgatccgcccgcctcggcctcccgaagtgctgggattacaggctgaggcacggtacggggacctcatctgcatcagtacgggtgtaatcaatgatgacctgcctcttaatttatcaggtggcaaactgaggctgtgggcactgaaagagacctagcattttctagggcaccgctctcctgggtacgctggcgacaaccagcggcctcggcttgggagctgagccactggccggaatctgccgctgagcgaatgcactcgctcagacccgacttctccctctagggcgcggctcccgggcaggtcccttcacgagtcttccatccgagcagagcagggtcccgcggaggcgccgaccgggcgcgaggcctcctgcctgcccaggttccccggcgaccctgagcgaaccctctcggggtcagctccgtctaggctgagaagggaacggcggaaggcggagtgcgcccccgggagcccggagctgggactgcagctcccatggggccaagttcacggggtgcggccgcgcggccaatgagcgccctctatgccctgacggtgccccgcctcgcggcgctgccgcgctcccgccctcccgccctcccgccgcgcgctcgggatcccgaccagtcctgaccgcacgggggccgcggccacggggcgcaggggccatggtgcgcggcaggatctcccggctctcggtccgggacgtgcgcttccccacgtcgcttgggggccacggcgcggacgccatggtaagcgcggacgccatggtaagcgcg

SEQ ID NO: 19434 - DNA, 2300 bp, Homo sapien
tccctaacacacatgtacataccacacctctatgctgtgcaggagggaaaagtaggggcaagcttatttgtccgtttcaggatgaacagattaaaagcaatttttgttacaccaaactcagtaagactttccagttttctcttcctcattaaaaaattttttaaaaaatattcctggaaacaagtgagccactaaatgtaagattgaaaactttccaggttatttacagactgaagtttgacattgatgaatatactaaaaaagaaatcagggaatgtagtaataaaaaaaaaaagggagggcgaagagaagcaaactcagtaagtcaatgtaatccataacttgtaggtgacattctgacatactctcccaactttaaaactccatatagaacatcttcaaagccaccttaccccttaaactggggcaaactactatttcatttcattattattttttaaaatatattttactaaatagataggaggtctcccatgttgcccaggctggtctccaactcctagactcaagtgatcctcctgtcttggactcccagaatgctggggttacacgtgtgagccactgtgcccggcctattttagaggtgatttttgagactgagtgtttaggaagacgaaattatctctatttagtgaagaaaggcaacagctcaaggaattttctattttaataaaagctgaatatagacctacataaaattttaaagccctgagacagtcaatgacaaatgaagttttagtagctaagaaaatacagcatcgttccacattatgtgtctctttaacgcctacgcctacctttcgttcatttagtgagctgaagaaaaaaatgttcaaacccttatatgcatttccttaagttcctagaataccggaatactgacacatatgattgcactatttcctatccgtcgaagatgattctgaatttcactaaaaaccgcaaaggaaaccaatagtcacaaaataattctgataaccccaccaaagaggaaataaagagaggaagttactctaaaagtctgatagggcaaaagtgactgcagcagaagggcctcaaggttcagtccatgaggaccttgattaaccttcatctttacgcccccaccccatccttccgggtcctcccccttcttcaacgactggctttacaaggctcataggaaaggtgcgtgtattcagacggacacgattccagctgtggctcctccactttcagggtcgctgtttccacagttgacaagcaggagaaccatacttgttgcacttccctcactgggctgccgccagcatcatatagaaaaacgctgtcccaacataagccaaagccaccatgactgggatagtcgccaaacagaactcagcttcggttcccctcccggcaaggctggttcgacctacagtcaacaggaagctcctgggggcagggacaggatccctgcctcggaaggaggcaagacgtgaacgttttttggacggcgatcaggatggtgatgagggtgtgagtaacgcccccggctcacgcggttgggcttgagattttactaccaacgacaaagggtgcggaagcgtagcgctgagaagcaaacagccaaccaaaaaaactcaaccccgtcctcccccacaaaagcaagccccaaagccctggccactactgagagctgggccaaggaacagagaaaggcagaggggcagaatcggagcgctccattcaatctccgcggcagccgagcgtcggtgggttcgcgggtgggaagggacgccgcgggcctgctctccgggcagggaagcacctcctcctcacgccccctcggcctgcaccgcccccgggaatccgccccggaccccgccgccatgttgggtcgggagaagtgacacggaccggtcgcctatcctgaccacagcaaagcggcccggagcccgcggaggggacctgacgggggcgtaggcgccggaaggctgggggccccggagccgggccggcgtggcccgagttccggtgagcggacggcggcgcgcgcaggtacccgcagcccccgcccccgctagaagtcagggggcggggccggggggggggggcggaggaggtggagagtgaggccgaggcgtggggagcccgggaactccctcctcctgaagtaacgcgtcccgggccggctctgccgtcgttgctgccgccgggcgccccgggacgaggaggtggaggagggagagggcccgcgggcctcgcctccgccctccgccacctcgagctgcggtagcagcgactcatgagagcgc

SEQ ID NO: 19435 - DNA, 2300 bp, Homo sapien
ttccaaggtggtactgagtgggccctagttcaactttcagcttttcaaacttccagccaaataattttaagcattaatcaacttacataaatgaaagcattttacttttatagggacctaacatatctcataaagtttgtttgtttaaagctttcccctagctttttcctccagcagacatttccaggggtttcaagacttaagttccttatcactccctaacacacatgtacataccacacctctatgctgtgcaggagggaaaagtaggggcaagcttatttgtccgtttcaggatgaacagattaaaagcaatttttgttacaccaaactcagtaagactttccagttttctcttcctcattaaaaaattttttaaaaaatattcctggaaacaagtgagccactaaatgtaagattgaaaactttccaggttatttacagactgaagtttgacattgatgaatatactaaaaaagaaatcagggaatgtagtaataaaaaaaaaaagggagggcgaagagaagcaaactcagtaagtcaatgtaatccataacttgtaggtgacattctgacatactctcccaactttaaaactccatatagaacatcttcaaagccaccttaccccttaaactggggcaaactactatttcatttcattattattttttaaaatatattttactaaatagataggaggtctcccatgttgcccaggctggtctccaactcctagactcaagtgatcctcctgtcttggactcccagaatgctggggttacacgtgtgagccactgtgcccggcctattttagaggtgatttttgagactgagtgtttaggaagacgaaattatctctatttagtgaagaaaggcaacagctcaaggaattttctattttaataaaagctgaatatagacctacataaaattttaaagccctgagacagtcaatgacaaatgaagttttagtagctaagaaaatacagcatcgttccacattatgtgtctctttaacgcctacgcctacctttcgttcatttagtgagctgaagaaaaaaatgttcaaacccttatatgcatttccttaagttcctagaataccggaatactgacacatatgattgcactatttcctatccgtcgaagatgattctgaatttcactaaaaaccgcaaaggaaaccaatagtcacaaaataattctgataaccccaccaaagaggaaataaagagaggaagttactctaaaagtctgatagggcaaaagtgactgcagcagaagggcctcaaggttcagtccatgaggaccttgattaaccttcatctttacgcccccaccccatccttccgggtcctcccccttcttcaacgactggctttacaaggctcataggaaaggtgcgtgtattcagacggacacgattccagctgtggctcctccactttcagggtcgctgtttccacagttgacaagcaggagaaccatacttgttgcacttccctcactgggctgccgccagcatcatatagaaaaacgctgtcccaacataagccaaagccaccatgactgggatagtcgccaaacagaactcagcttcggttcccctcccggcaaggctggttcgacctacagtcaacaggaagctcctgggggcagggacaggatccctgcctcggaaggaggcaagacgtgaacgttttttggacggcgatcaggatggtgatgagggtgtgagtaacgcccccggctcacgcggttgggcttgagattttactaccaacgacaaagggtgcggaagcgtagcgctgagaagcaaacagccaaccaaaaaaactcaaccccgtcctcccccacaaaagcaagccccaaagccctggccactactgagagctgggccaaggaacagagaaaggcagaggggcagaatcggagcgctccattcaatctccgcggcagccgagcgtcggtgggttcgcgggtgggaagggacgccgcgggcctgctctccgggcagggaagcacctcctcctcacgccccctcggcctgcaccgcccccgggaatccgccccggaccccgccgccatgttgggtcgggagaagtgacacggaccggtcgcctatcctgaccacagcaaagcggcccggagcccgcggaggggacctgacgggggcgtaggcgccggaaggctgggggccccggagccgggccggcgtggcccgagttccggtgagcggacggcggcgcgcgcaggtacccgcagcccccgcccccgctagaagtcagggggcgggg

SEQ ID NO: 19436 - DNA, 2300 bp, Homo sapien
agcctctgggtggatatggtcttcccttattgctttcctcttcccacatcattttcagttaaaaaaattaactgtttccagcagagggattcctgttagaaaccttcatcaggtgaacttgtactgggaaccctcatgctttcccagtctgtctgtgtctcccaaacagagctgaagttgtaaacaaagtggaaaaacatatttctcgcccccaaattcttaaaatttcacttcttgtggaaaacacaatttcacaacatcaatttttaaaatctgtaagagccacagaaggtgtgaaagtagccaaacagccggtctagaaatccaaaagccaggactaacgggggacagaatgctttttcctcaaatccaggcagggatggggagcattctcagcattagggcatttatggacgctacaagagggaaaggatgtatctgaacggtgggggtgatttaggcgatgaatcgccacgttaatagcactactgccaaatcttcaaatttagaggctctggtgaaaaattaaaccggtggcaattttcaacgtttgtagcatctgttaccctacacttcagcacccggagtctggacagctccgcaggccgcgctccggaggcagcatgagctctcatcaatctactcatagccctactgtcaacggcagccagactcaggagagatttactgaaaatcctccaagacttccctttaaaaacaaaacgacttccacatttaatggtctatctgaaagaacatacgcaagaaattaggagatctaaattaaatttattaataggagagcttgatgatgcttaattccagagaccagagctctgattggtgaggcttgatgaaaaagtaaagagaaatcgtaattatatagttaaaaacataacttttgtcatcctcaaaattctaaaaattctttacctgtccttgagaaacgggtgaaattgaaaaccatcaaaacaattggacttcttaaaaattggattgtatgagtgaaaggtgtttatgagaagtcgatgactccggatcttatcatccaagaggacagcacagaatagttaatatgttccttgagggactaggatgctgacgtctttttctgatacccgatcattacgtgactgagaaaaaaaaaaaggaagtcatttcatgaataaaaatcggagcgcaacagtgcaacaaaatattctgtacttaaaggcaacaggcaggcagatgttgacaaagagggctctccaaaaaccatgttcggatagatttttgcgaactgcacagataaataggagcagaaggccggtcacctctgtaaccagcggtagcagcagcagaagccgcagcttcagaggcagccggagagacctcggagcagagaaggcgccgccgaccctcgcggctgcctggcccgcggctcctacaaaggcgggctagccgcccgccctctcccttgccttcctccccttcttttctgactttccctctttcccttaatcgcctgcttcttcctccgggtggacttacggccaccttgctcctccgcgcttcacctcatcgccccctctttctttcttctgcctctctctctgcgcccccttctctccgtgtcacgctccctcctggttctgcgcgtctacaaacttttgagcagaacacgagcctcggcaaacgagtcccgcagctcctcctgctgctcccgctggttcctgcggcttctgctcagacaccaacgccagacggcgatgcctctcgggtggtgactccagcgcaggaacttgaagaagcgctttgcccgccgtcctacctggcagctctcctggcagcgggaggagttgaagggtaagggagggaaaatcttaccaaagcgaccggctcactcgactgctgattctttcgcttggcatcgcgtcaggggagttagctttccttcagccgggtctggctagttattgggcgccgggtagatgcatatatatatatttttttctaactatagcaagcaagaagtggcagggcgcgcaccggctgtcgccaagtgctgttcaactcagggagccggggcttcgctccgtccctcccccggcttccagagctttttggggttggagggtgggaggccaggggcgttctcacagctgtgtgtcctctttcccatcctgcgcagaatgaccatgtgtagcggagcgaggctggccctgctggtctatgggataatcatgcacagcagcgtctacagctcacctgccgccgccggactccggttccccgggatcaggtaggtgctggctgcctgg

SEQ ID NO: 19437 - DNA, 2300 bp, Homo sapien
aagacactaatgagaaagccaagcttaaccagtcgacgtaaccagctattgtcatctggttgatgaataagcatcactaaatcaaaccttaccttgaggttcagatcaagagaaagtgaaagagtttcagaggtcagagcaaagaagcttctcaatggatgaaagatgattcagtgacattccggcaaagaaacctaatactcggattagggctcttgaagttagaactttctcacccaatggaccaggctttagcgggaaagacagaaccaggtaataatatcagtatagacagtccaggtttcatggaaggcacgtcaaagagaagagtgagttctggaagaaagatatatctccaggccttccatgagaccaacgtcaagccaaaataattacaattgggggtttctccagctgaacaaggacagaactagtttatgtctcctccttagactataacagatttactctttcttttgataaatagttattaaggcactgctaagtaccagtcactgtgctaaacacagaggatatggtggtgagacagattaacacagtccccgtcctgaggaggctaccacctaaactgtgataccagaggcacatttacccggaagctcaagaagctgccacttcaggccccatttcaaggcctgcagctaatgttttatcataattttgtattcttttctttaaaaggcttccctcagaaaaatgagcaaactttggatcccacaaaacctgtccccaactctgttgatgagtcctgtgaagaagaggtttccacggtggcacctcttatgttgctttacacacacttatttatatctgtctttcccgagaaccctgagccccttcatgttaggggtgtttctagttttatctttgtgtctctgatgttcaatgcacatttttttaaatgaattaataagtggaggatttttgttaatgttcagttctcaacacgctaagcaaccaatggtttttatgcttttgaatatcatttgtttcctttttgctttcctatagtaaaggtccttttgaaaatttcaatctgaccaagtggaacaagtaagaaattgttgattcttacccagaccagggagccataaagaaaagagcctctttgttgccaggtaaggttatggcagcagcggttgcaattgaaaaatcagtgaagcttgaagttgctgagtcgattaggaaaatgaagttatcggaacaaatggtctcttcagacaaacaattctccaattttagcatgctcacctggaaagcttgttaaaacacagatggttgggactcacctctagatttcttaatgcagtaggcatcaggtaggaaccagaaatctttatttctaataaggtcccaggtgatgccgctggtccagggaccacactttgcaaactactttgccctgtaccactgatgcacaatcttagctgtatattggaatcacctggagagctttaaaaatacttgtctctgggtcctccctcacccttgtattctaattaattggcctggctgctaagatttatttaaagttcccccaagtaattccagagtgcagtcaagattgcgaaccactaccctacgccatggtacattagacgcttaggtcataagtcttgacctacccgtcaccttaacagaagcaagagtatctgaatcctcatttctggaaaatcttaagaatcagagaaggatttttaacatcttacatggttatggcctccagacaccttccctctgccccatccaccccacctcccttggaacaattccaggtggaggctttgtgcatttaaacagccctagctattaaaatccaaagaagactcatttcggcctggctgctccgcacacaccttgtttgcaagcgtttgcacatactagtggctgcccgggatggctctcctaccctgacttccataaaccccagtctgctcctctctgacactgtctagatcccagcctctttaatttgggttagtccctcctcctggttcccacagcgatttttataacttcatttttctcttcttacctcgtaattacttgtttgcatttccatctttctcacagaagaaaaacatgtgagctccttgagggtaatccctctctccctggtagccctagtactgccttcaggtattaaatgtttttggttttgtctttgtttttgttttctgagacagagtctcactccaccaccgccacctctgcctcctggattcatgcgattctgctgcctcagcctcccgagtagctgggactacaggcgtgaacca

SEQ ID NO: 19438 - DNA, 2300 bp, Homo sapien
aaataaaaataccaggtcagtgatcagcattgaatggttgttagacagtcatgtcagtcaacactgatttcacctctttctgtaagcatactgagtaaaaactttttttcagtttaaattgatttacgtgaaagtggattaaaaggcctttcaaaagaatgggtttgaaaaacctcagtccgctttaatacacgtacatttctttcctttcttcatttaatgtaacatatgtctgttgtaactacgtttcttaaatattattttaaggttatatgttctttaattatgctccaacataatttggtcaccaaaaatgaaataatagtttaaaacaagtagctgttactaagtgtgctaaaaatactcattttgtaattaatttttaaagttttcttagtatattataaattgttccctggtcaagtacaaacgtacacatcaaaatgcccatattgtgtctatcatttgatgtgaattatatgtgaaatttttcttgttcaaaattttactaaccagaattctgttacaggcacttaaacacgcagcatgaggaaaatggaacaacaatcttgaggtgccttctgaatcatcagattaaattatgcttcgtatgttttgttttactgtatttctttaaaaactctcaatctttattcatgtgttactggattaatttatttgataatgtctcacaagaatctattagatcatttattcttcagttgtgctttgaatggtggggtggaagtttcaggtgaacactgtggataacaaaagcaagttgtggaagactgtgaagaggatggaataattgaatacaagaaaaaaatgaaaaaaattgtcccatttttaataactatattacactattattttataaatgtgtaacaaaggggtccctctttaaaaaaaagaaatatctcacgtaacccataatacatacactgactttgtacccacaaaaattaaaaaatagctccttaataaataaataaataaaagaattcctcatctgtcacctactacccaccaaaattttcaataagtacaactatttgtttggtgaatgaaatagtaatattttccctttgaaccaggtgttttaatgctgtgagctgctaaagatggaaatcagcaaagaaggaaacaagctaggccactactcactccttctccttagcccatggagatatattccacaaagccagctattgattgctaccattagtcggccaggcaaaccagcaataattgctttagcaattttgttcatgaacatttcctgttaatttcccaggagtaaaaccagctcctccccctcttttaacaaaaagtcagagagcaggtggaaattatcatactcataaatgttacaaaagtattatttacttggtttggggtagtgaagaatgcaaagcaaaagatgaagtatttcaagtttttaaaagatttgaatcaaccacatgtatcagtaagtaaagcaaagaccaaaattaaaaagtatatttgattttttatttatggaaactcttcaccattccacttaaaaataagtaatatcccttcagggtttggtacatttcaagatgtctaactttctaattatttagacaaaaaaacaatggtttagctcactaattttcactgcttcttatatcccaaatcttttttttttttttctgagtgggagagaattttcctttgttctgaagtacatcctttcaaacatcatttagtggtggtctcatgtgatcggcttcttggttttgtctgcctaaatatgtctattattttataaatgtgtttataaattaaatgtttaattttctgtgtcaacttggctaggtcatgacacccagatatttggccaaacacatctggatattgctgagaagtgatttttttagatgagattaacatttaaatcagtggactttgagtaaagcagattactctccataatatgggtggccttatccagtcagtcgaaggccttaacccgtttatgccagaggttgcaaattttttgtgtgaaaaatcagaccttggcaatgaccttgagcagtaggatataaataaatcccacaagcttagcgttccaatagtggagcactaggcataaatgccttaaagaaaggactgatctcccctgaagaagagagaattctgcctctagattgcttacaatttgaactggaacatcagctgttctctaggtcttaagtctgctgctctaacctacaaattttggacatgccaatctccacagtcacatgggccaattccttagtttctctgga

SEQ ID NO: 19439 - DNA, 2300 bp, Homo sapien
taaataattaattgtctactcctaaaacattaaagatgttttccaatgtattttccaaagggccgtattgtctactttttccacctaaatctgaagtctcttgtttggttgtgtgtgtatgtgtacgtgtgtgcgtgcgtgtgtctgtgtgggtgtgtatggtgtaagaatctcaatgttctttttttaatatcaatattcaattgactcaatacaatgtattgaaaagactattgtttccatggttccttgcacaaaatgactttgttagaaataagatgatgcctatctttgtaccaataacatactatcttaattaccacaacttttgaatagatcctcttatttgttagtgtaggccttcagtttgattcctcttctgaaaatcaccttggctatttttggtcctttgtatttcaaaagaagtcttagaattagcttgtcaaggtcaacacagaaaaaagcaggatatttattggtactcattgaaactataaacaaaattggagagaactaacatcttttatagaaagtaaaaaaggtccacaaattccatcctttcttataatcatgcttttgcaatgaaattttacaaggttaggcttcaagaagcattgtgtttactttctctcttttggaactcggccaaggcaccatatgaacaagcttgggatagtctgttgattatgggagacaaatgcccctatgttactatcatctcttgcccaaattaaagccagacatctgtccaatatgtaagtgaagtaattctccaatcagatttcagttgatctaccagatgaccatagatgcatgttagtcaacacctgttactctctttttcatcttagtcattctggcaagtaaaaataagctgagcatgacctagatcagcggaacttcccacatgaccagactcatgatcaatgataaatggttgttattttgtctctaaatgtggaggcagtttgctatacagtgatttctaactgacacaatgtattcacaatatagtgtctttcaatccatgaacggtatgtaacttaatttattttgtctttttaatttttgtcaattttgtattgttcagtgtagagatcattttaatttctatttctcgataatttttaatacaactgaaaattacatggtttttaaaatttatttttctagttatttggtttaaattataaaattgatttttacatatttaatgtgtatcctattactacgctaaaaccattttattaattttaataatttatagagtctttaaaattttttatttcacaattctattttgagaataatgacagcttggatcctttatttctaatccttattcctttgccttcttttaattgccattttgcactgtgctgaatacccagcacaattcagggtaaagtctcaacaatttactataaaatatgatgcctctgataattctttgttatatcaagaagcttttcttccatatgtactttgccaagagttgtggtttttattatgaatgctttctgaatttatcaagtgctgttactaaatttatcgatataatcattcaatttttcttcctttttgtgttaacatgatgaattagattttctgttttgcaaataataaaccactctggcatgcttgaaatgtattccacttttatgtgatatatttacccttttaatattcttgaattctctttgctaatattgtatttacagtttttgtatctttgttcaggaaggagactaatctgcaagttagttcctgtccttgtcaggacttgacttcagagttacactggtctctccctttccattctctgcaagagtttttataatattggtgtgttgtggttttttttttttaatttagctaaatttactgttgaagtcattgagcctcatgttttcttcaaaatatatataaataaagtacaatttttttttttttttgagacgaagtctcgctgtcgcccaggctggagtgcggtggcgcgatctcggctcactgcaagctccgcctcccgggttcacgtcattctcctgcgtcagactcccgagtagctgggactacaggcgcccgccatgatgcccggctaattttttgtatttttagcagagacggggtttcaccctgttagccaggatggtctcatctcctgacctcgtgatccgcccgcctaggcctcccaaagtgctgggattacaggcgtgagccaccgcgcccggcctaataaaggacaatttttaatagccactggactatttaagtgatctcttctgtcagtttctgtaagt

SEQ ID NO: 19440 - DNA, 2300 bp, Homo sapien
acagaaaggcaacaaatttatttctgctccccaaactgtgccaaagattttcaagtcccaaagctactttaaagaaattaacaaccatcttagaagataaagctacatcaagtactgctctagtctaatggtccatagctcacaggactaatgtatgtgacaggttgcttactccacaattcaccagcagttaaatattgaaagacaaagagatcatcatgggatactattttcttttgctatggacttggtaaacatgtatttcttgtggccctctagcttcagaattaaaagtattacacttcaacaagacataaacaataagaagaaattaacctgagaagtcaaatatgagaattattttcaagaaccttcagtcaccccttctcacccctccttatccctccctcccatgacagtaataggaaaacaaaaaatgaattccaatttatatttcaagctacttcttgcagcaattacatttctgaaaaccaaaataattttggatggcttcacatccagtaaactgtatttggtgtttcctgttactccctgtgcagttaatttttggagtttgtgatgttatggacaaaactgtctctaggcataattcaattttcataatttatcatctttcaaaacctggaatttatgccaggtcagacaaaatattaatcaacaggactctctggagctttcatttaagattatagaattagaacctaaagaggtaagtattcagatgttggtataatgctcagatgttggtataatgctcaaacctgtatatgatggttaatactgagcgtcaacttgattggattgaaggatgcaaagtattgttcctgggtgtgtctgtgagggtattaccaaaggagattaacatttgagtcagtggactgggagaggaaaaactgccctcaatctgggtgggcaccatctaatcacctgctgggataaaagcaggcagaggaacatggaaggactagactggctgagtcctccagcctccatctttctcccgtgctggatgcttcctgcccttgagcgttgaactcgaagttctttggcttttggacccttggacctacaccagtggtttgccagggcctcttgggcttttggccacagactgaaaactgcactgtcggcttcgctactttatttatttattttttttttgagacggagtcttactctgttgcccaggctggagtacaatggcaccatctccgctcactgcaacctccaccgcccgggttcaagcgattctccttcctcagcctcccgagtagatgggattacaggtgtgcaccaccccacccggctaattttcgtagtttttagtagagacggggtttcaccatcttggccagactggtcttgaactcctgacctcgtgatccacctgccttggcctcccaaagtgctgggattacaggcatgagccaccgtgcccggccagcttccctactttggaggttttgggactcggactggctgccttgctcctcggcttgcagatggcctattgtgggagttcacgttgtgatcgtgtgagtcaacactccttcataaactcccctttatatatacatcaatcctattagtcctgtccctcgagagaaccctgactacgaatatatatacacgtgcaaatttcttacatcctcgtgctaaattgatctctttatcattatgtaataatcttccttgtctctttttatgtcttttgacttaatgtttattttatctcagtttaactactcctgcacacttttggtttctgttaatgtggaatatcttttcctatctcttcactttcagtcatgtggaatatcttttcctatctcttcactttcagtctgtgtgcgtctttacaggcaaatgaagtttcttttttttttttttttttttttgagacggagtctcgctcttccgcccaggctggactgcggtggcgcgcggctcattgcaagctccgccccccgggttcacgtcattctcctgcgtcagcctcccgagtagctgggactgcaggcgcccgccaccatgcctggctaattttttgtatgtttagtagagacggggtttcaccgtgttagccaggatggtctctatctcctgaccttgtgatctgcctgcctcggcctcccgaagtgccgggattacaagcgtgagccaccattcccggcccaaagtaagtttcttttaggcagcaaatatttgtctttaaaaaaaaaatccattcaggcagtctgcatcttttaattgggaaatttcagctatttacattcaag

SEQ ID NO: 19441 - DNA, 2300 bp, Homo sapien
gaggggtcctggaaaaatgggttgccgatccatggtgaaatgcaggggtttttatagatgagctagtggggaggcggtgtctgatctacatagggtgcaaaatctctggcagcccccaccccaattttggttatgcaggtaggcggctcctccatgttgcttctttctttctcactgtacacgtcctaacaaaaaagggaaggtggagcccgcatggtggatatgcctggccccaagcagcccttcctatcggtgcagctgcaggcattccattgtgcaagcttccagcttccttatctatgtttgcagctcgatctttcaggctgctctttgttagaaaagaaatgatttcttgggctgctttttgttacaagggacattccaccaaggattcttttgccctcattatctgcgtaaataatttctttctatctcctgtatcaatttcaaacacaaagaagtacaaaaacttgccatttatctcctacacaaattcaccaactgcttatattattactctgctttctttattgttttctctattgtaaggctcaatctatctgtggcttttctctggtgtagttccccagggttcctaactgagaccctgtggtatttccagagccacctcctttcgagttttgaatccacttgctgctcctgaggattgcgaggctgcttttctgacacatgctgcttggcttcttagtggcctgccagagcagctgaattagaacattcctgaactggaaaacacactccaagagtaggtctcacttggcctcccttttccaaaggatcttaatccctcaagtcttatttgccttgggaaccccaaactgcacacagacctctgctggtttctctgcattttagcagccatgctcaatctggcctctttatcctcttgctttgccttatgttagcaaacaacccaaacagaaaagctgaggcagtaaactgagctcagaaaatgtccttctctctagggcctggcctctacttcttggctgccacagcagtattctgatgccatcaaactgacatttttgtattttgtatagtttaaatttttttttcagtagcagcgctggtctgatacctggctgggatccaaatcccttactttcatatttctaacaaatttacttaaagctgttacctttttttaatcacctatgtagtctactattatgtagactaatttcctattacataaagtgaagatttatcttctacactttcccccacacaaaaatgtacacacttccccattcccaatgctgtgtgtggggaaaagcaagagagatcagattgttactgtgtctgtgtagaaagaagtagacataggagactccattttgttatgtactaagaaaaattcttctgccttgagattctgttaatctataaccttacccccaaccccgtgctctctgaaacatgtgctgtgtcaactcagagttaaatggattaagggcggtgcaagatgtgctttgttaaacagatgcttgaaggcagcacgctcattaagagtcatcaccactccctaatctcaagtacccagggacacaaaaactgcggaaggccgcagggacctctgcctaggaaagccaggtattgtccaaggtttctccccatgtgatagtctgaaatatggcctcgtgggaagggaaagacctgaccgtcccccagcccgacacccttaaagggtctgtgctgaggaggattagtaaaagaggaaggaatgcctcttgcagttgagacaagaggaaggcatctgtctcctgcccgtccctgggcaatggaatgtctcggtataaaacccgattgtatgctccatctactgagatagggaaaaaccgccttagggctggaggtgggacctgcgggcagcaatactgctttgtaaagcattgagatgtttatgtgtatgcatatctaaaagcacagcacttaatcctttacattgtctatgatgcaaagacctttgttcacgtgtttgtctgctgaccctctccccacaattgtcttgtgaccctgacacatccccctcttcgagaaacacccacaaatgatgaataaatactaggggaactcagaggctggcgggatcctccatatgctgaacgctggttcctctgttccccttatttctttctctatactttgtctctgtgtctttttcttttccaaatctctcgtcccaccttaggagaaacacccacaggtgtgtaggggcaacccacccctacactgtgaaaatatatacataacaattttttgttaaaataaaattt

SEQ ID NO: 19442 - DNA, 2300 bp, Homo sapien
aatgccacgggggtcatttttggttctaaagctgctctgtctagaaagtgagcaattcttcacattcctatgtttgtgctactctctgttagcatctattaaagattttggaaatatagctcttttcttttataactcctttttctctagcattcaatcaaaaacccatacagccttttttttttttttttttttttttttgaatttctgagatggagtctcactgtgttgcctgggctagagtgcagtagtgcaatctcggctcactgcaatctctgtctccttggttcaactgattcttctttctcaccctccccagtagctgggattacaggcacacacaaccaggcccagctaatttttgtatttttcatagagacgggaattcgccatgttggccaggctggtctcaaactcctgacctcaagtgatctgcccgcctcagcctcccaaagtgctgtaagatccatatggtcttgtgttagtcggctagggctgccataaccaaatctcacagaccgggtggcttaaacaacacaaatttatcttgtcacaattctgaaagctagaaagtgcaagatcaaggtgtcagcaggtttggtttctggtgaggcctctctcagcttgcagacagcacctcctggctgtatcctcacatggacttgtgtgtgtgtgtgagaacacacagtgagacagctctggtgtctctccctcttcttatgaagacatcagtctctttggaccctcttctaacctcacttaatacctccttaaatgccctatttccaaattcggtcacattgaacgtcaggcatcaacatatgaatgaagaaaggggtgcactatttactccatagcaggcctagactaggaaaaccaggtaaaaatggaccaagcaagaaatttcccatcccctcaaaggatcaataaattgttcttagacccaaattccactcgcttaaattactttccttaggcatgacatttcctcttaagatcccttattcctaataggataaattgacctatcaccctctcctacccaccctcgtatctgcctgaacatatctgaattgactccatctcctgcacccccacgcacacacgctttttctttcagtaccaaagcaaagataaatacccaacatgataatgatccaggatctcttcaattcctgaatatttctcaggggtcgtagaaaatgagagttttacaaagaatcaataattctttgaattattagatgttcattctgtgcattctttcagtcatgtagcctaaaaagattagaaactcactacccagtgacttgatttattccagaagagcaatttaggtcacgggaaaaatgaaacctatcaactgccaatccctcagataacataataactgttatttttctctactggccatttgtttcttaaattagaagtcttcacagcacaaaagggacagaggtagccttacctatgtgtagatttgtgtctgagcccattaacggaagaggttaggttcttgtactaatgagggaaatgcagaacttgcatccccagagaacaattatagtcacacacaagagatgccctgcttcccagcttactacctgattttcacataaagctgtgctacttgtcttagagaacaccgcactaaaatgtctagatggtaacttattcagcaatcattgactgagcttcttctgtgtcccaagctctgtgctatgaggtaagcatattaatataaataaaataccacccctgggcctggcgtggtggctcacgcctgtaatcccagcactttgggaggccgaggagggcagaacatctgaggtcaggagttcgagaccagcctggccaacatggtgaaaccccctctctactaaaaaaaaatacaaaaattagccgggcatggtggcgggcgcctgtataatcccagctactcgggaggctgaggcaggagaatcgtttgaacctgggaggcggaggttgcagtgatctgagatcacgccattgcactccagcctgggcaacagagcaagactccatctcaaaaaataaataaatgccgggcgcggtggctcacgcctgtaatcccagcactttgggaggccgaggcgggtggatcatgaggtcaggagatcgagaccatcctggctaacaaggtgaaaccccgtctctactaaaaatacaaaaaattagccgggcgcggtggcgggcgcctgtagtcccagctactcgggaggctgaggcaggagaatggcgtgaacccgggaagcagaccttgcagtgagccgagatcg

SEQ ID NO: 19443 - DNA, 2300 bp, Homo sapien
gccattatttcctcaaatactttttctgtcttcattttggacacatttggtcctttttttatgtctctatgtcacttcttaatatgctcatttttttcctttacatctttgatcatatgaatatagtataaataccttaatatcattttttacttttattcccaatatttttatttggactgcaagtaaacctacctaaccttttctactaattttatcatctgtatcattcctatgtttccatttggtgattttttccttttataataaatttttctgcttctttacattcctgataattttaaattttttgtaagatgtttctactttagctttttgggtagttcatattttcatatttgtttaaatattcttgagcttttttctcagaaaaagtttctttgcaactggttgatctttctgagactctctttaagctcatttagttatgatcagagcagactttggtctaaagctatttttttttttcccaattgccgaggcaatgcccttgtgaattgtctgcctgatgttctgtgagttatgaggttttccattttggcattggggagcactaactattctcagccctgggtgagccctgaggattgtttcctcgggtcatttcatctggttcttccttccttgcctttggtagtttcatcccatgcatgtgttgatcgtgactcggctggaattctgggcagatcccctgcagctcttaggagctctgtctgtgctgtctcctctctggcaccttccttggcctttctagactccaagctccatctccttaactcagagagactattggactctgcatgtgtcttccctgtgcctgggaactttctgaaggcagtaagctggagtggtcctttgtttttgctgtttagggaccactgttctacactgcatggcatctgaagtctgaaagcctttttttttttttaaacataccaaccatccaaccaaccaaccaaccaaccaacaaaacaaacaaacatattttgtgcatttaaaaaaagtaatttcagatgaaagggtaaatctgatccatgatactccatcttgtccagaaggggaacttgggttttattttttataattattttagttgtatttttataaaactttgtttatatgtttgttttatagagttatgtttttctttataattcaagctatgttttgtgaaagaaaaggtatgtttattttaaaattagataaccagagaaatctaagattaagtgttgtgatttaaacttaattctccctatagaagatgatgatgatttttttcttatataggagtaatatgctaccactcaacctctattgaaaggttggcagccctgagacctccttttataatttagcatgttatggatgtatttctcctcccaaaggaatgaagagcagatacttcctcatgcaatccctatagattagaaatcccattttcttctagaaacattcagattatcaaatttaccttatacatgtttgaggatatattttcttacatgtatttggttatttagttgtcagtgaatttgtgagggttgtttcactctgcagttgggaaacagcagttcaaaggcgtgctcacacattcttttcattgtagtacagaattattttactgtaagtgttaaggatattgatttcagtttataaactcagatattcaaagcacagtcaatgttcttttttaatgtcaacgttcttttaatgtacttaaaattctcttacagatcagggagctgattttggatggatctttacagttgatccaggaaggtctcaaaagtggttttctttatccactttttgaaaaacaggacaagggtagtaagcccattactttaccacttgacgcctgcagtttgtcagaattatgtgaaatggcaaagcatttgccttctctgaatgaaatggaacatcagacattacaattggtggaagaggatacatctgttacagaacaggatttatttttgcgagttgttgaaaacaactctagctttacaaaagtgattactttaatgggacagaaatacctgctaccaccgaaaagcagttttcttttatctgacatttcttgtatgcaaccacttctaaactgtaagtaattattgtgtttgttattagaaaaagataatttttccgtgggctgaaaagttaagagctagtctgaaatttgaagatgggtcagcatttatgaggatagggtagacacttttccttgggttatttgtctcttaggtttaattttaaggtgctgacttttgcttttttta

SEQ ID NO: 19444 - DNA, 2300 bp, Homo sapien
cagcctcccgagcagctgggactacaggcgcttgccaccacgcctggctaattttttgtatttttagtagagacggggcttcactgtgttaagccagggtgatcttgatctcctgacctcgtgatctgcccacctcggcttgagccactgcacccggcctcaacattttcttttttagtgataggattaacattcattactcaccgaacaaacgtttgagctctttctatgtgccattgtatgcagagtgatgaaacaagataaacataatccctccctgatggatcttataattcggtgaagaagaaagatattaaatacgaaagtttgttgagaattagaataaggaaagtaataaagaaaatacattttctgaaatggaactttttaatattgtgacttttttcttgtgcatattcttcttttttttaattttaattttaatttttaagttcacaggtacatgtataggtttgttatatagatacatttgtgtcatggggttttgttgtacaaattatttcatcacccaggtattaagcctagtacccattagttatttgtcctgatcctttccctcctcccatcctctgacctccatcttccagtaggccccagtatctgttgctcccctctgtgtgttcatgtgttgatccccctttttttttttgagacggagtcttgctctgtttcccaggctggagcgcagtggcgtgatctcggttcactgaaacctctgcctctcaggttcaagcaattctcctgtctcagcctcccgagtagctgggattatgtgtgtccaccaccatacccggccaattttttgtatttttagtagacaccttgttggccaagctggtcttgaactcctgatctcaggtgatccacctgcctcggcctcccaaagtgctgagattacaggtgtgagccaccatgcccagtcccctttttcctttcatcaaatatttattgatcatttactacgtgtcacacacagaaaagaaaatatttagcattgtccgaggtcttagtaaaatagtatgttgtaatataagtaattcagataataacaagcctttgtaaaggactttatagtttacagggtatgggcattaatttttaatgtttaatctctcaggttgggtaaatttcttataacatggaaaaaaatagatgaacctatgtaataaatgtaatcttgatgacaccttctgatatgctaaagcaaattatacaatattaagtccatttatttatttagccaacagacatttattgttagcatgctaagagtttgacacaaggtaagcactggagtttcagccataaaaagtactaagtccttactctatattgttagatatagaacagtgtcaatataaatctgattcatacctaaccctcatcagtcataagcacattggaatttcttttgatgatagcacctggctagtttctcttctcagaaataaaggaaattgagaataactataccatatataaagtgatagatggcactggtaacttcatacggtgtcatagtttccttgtatttcatgggtgctgatgctacactttatcatgtggaactagttcttttttttgagacagagtctcgcacaccattctcctgcctcagcctcccaagtagctgggactacaggcgcctgccaccatgcctggctaattttttttttttttgtatttttagtagagatggggtttcaccatgttagccgggatggtctcgatcttctgacctcgtgatcctcccgccttggcctcccaaagtgctgggattacaggcgtgagccaccgtgcccggccagaactagttcttattaatagcagataaagctgaggtgaccttttacaatccattttgtttatgttgttgtttttaatttactttgggaaagcttacctcctcactccataccctttgcattgattttgacctcagtagacaattactactattaattattaattattattagacagatataagacataaataatgttataatgaaaaagcaaaatattaatggcaacataacttttcccctgtaattgatctaccctttagaagcgtaaaagatgtgttgttttcaatcaaggtgaattggatgctatggaataccatacaaaggtaagtgtaaaatgttcattgatcacattggaagattaatgtgaagtagtagaaaataaatggacaacataaataaggattttttttcaaaatcaagcaatcattttgatcaggcttagcacttaatatatttattgttaattttata

SEQ ID NO: 19445 - DNA, 2300 bp, Homo sapien
cattaatttttgttacacatcttacaaaggggagtgctgctgggtatttaggtccacattctattttaaagctgtatattcagtttttgtaaattgttcttgaaggcccaattatcatccctgtccatttggtaagtgtcatgtctttatcatcttctagactctagctatctgtgccatctcatactcccttttttttttttttttgagacgtagtttcactcttgttgccctggctggagtgcagtagtgcagtctcggctcactgcaacctctccctcctgggttcaagtgattctcatgcctcagccttctgagtaactgggattacaggcgcatgccaccaagcccagctaatttttgtacttttagtagacgcagcgtttcaccatgttggccaggcaggtcttgaactcccgacctcaggggatctgcccgcctcggcctcccaaagtgctgcgattacaggcgtgggccaccatgcccagccactcctttctaaccttcaggttcttccaacagttggaaattgagaggtactcctactcctgagcctgtggtgactgccatcatgtgtcactgtcactcttaggctcgccccttcttccctctaattcatttctgacactatttctatctttagatagtgtcacatctcccaaattcattgtacagacatgaatgattacatcattggtcactggtgatcaactcagccttcatccctgcactcagtaaggctacaggggcggtgagccaggaactgtggatgaaaaccaatgtacatcataatctcactcatggagttagaaatttgaatctaaatgctgtgattattaattgtgccattaagcactcatttatttcttattctgtcccctcttaagttctccactgcactggatttagaaagcaatatctagaactctaatccatcttttgaaaaaaggttagttctgagaaacctagttatccaaggggtactgctcagaaccaattacagatctagactcttaaccttgcggttttgctagggtttagtgcttctgatgtgctggtaaaattgcattttctctgactagaacaattttttctttttaccttattactccattggtagtagtgattaagtagggaagatgatactggagaatgggctgacttactatgacaagtgtagtttgcaaaaacgagggattacctgctaacagcaccttctgaaattctatgcccctctctagataggtttatctcattaaaaagggtgaattcacgtagctaatgtagtgttctttgcttttacaggctactttgtccttttaaggattcaatgacttcctgacttggaggatgtggacctagtggctagacccaaggaccaaagcaagaagtcgtggggggcccaggaagacaggaggatcacattgggattccagacataagatcaggttttaaccccctttggccaaattttggctgaaaatgttgaattatcaactctgaaattaaaaagaaagtttatattaaaacattgcaattttccttagaatttctgtatatattaacatcatgaatgataaattctcttcaatgtgcatgtcaggtttttgtacttgtatatcaaatctatctgtgtgtatgaagtgtatgtttattgaaatacaagatatttaagaagctgatctggaaagttggattttcattctagttcctaattcccagaggcttttttaaaggaagggaatgtctgtggtacaccagttgtcagctgggtggttactggatcatctttcttttatcaacaagataaactatcaacttcaccagcatcatgaaccttgttgccgtaaaaaggagttcactacttctgttcactttgagtctcttcaaatggattctgtgtcctcctctggagtctgtgctgcatttattgcttctgactcttccactaagccagagaatgatgatggaggaaattatgaaatgttcacacgaaaatttgtttttcgacctgaactgtttgatgtcaccaaaccttatataactccagctgttcataaagaatgccagcaaagtaatgaaaaggaagatctgatgaatggtgttaaaaaagaaatctccatttctattattgggaaggtagaaagttttaagaaatatttatttttctccagaaaacataattgagatttattatctaaatgtcttaaatatctggtgattcgttaagtataaagaagaatcagtaaaacccaaaaaggctttagcatatctgaaataatttgtagcttttttctagc

SEQ ID NO: 19446 - DNA, 2300 bp, Homo sapien
tccttacatggcctggagtctccgccttctccccctaccgctctcccttcctcccacccccacccactgcaacagccctctagcctgggaggcttgttagagtagacgtgaagatcacagcctgtgggaccactgctgagtgtgtgggcactcagtttaagtattcagtgatgctccttccaaaccactgtcctgtccccacctcttccactcccacccttggccaaagcacagatcataagccctctgctccgctcccctctgagattcgccttccatgaggaattcagggctttccccatatcttctcttccccacctttatcaagagatgctgctccctccccgtcaagtctctttttgcactgtcaccacccaacactttccacgacacttctttgctttgaccagaagccataaggtaaggttggaagaacatttattcactctccaccagcctaggaaattaatagtgggtcctcagccctgccaccttctgctgttatcatcagccttttaactcaggttttgatatggtgaaaagagtcaccagggttattcagacaccccggctgtcagggtccttggtggttaaacctgggaaaaggccacatgaagacaactgtaagcacacatgatccctctgaattgttttcttttcctgcaattgtgcttgctcttaaaaattgaagttttaaacagggctcacatgtgatcatccttccatctattggagtctagcttgaaatgtgacaaccggaaccaaaagaaccttgaatttggtgcctactttggttttggtgctgctgcttctcaagatcctcagcagggattaagaagttggggtgcacagcaggaatatcaggaaattggcaggcttgacttcctggcaaattgctagcaggaccactaaatgctgaactgtactgtgaatgtataccgaaatacaagcaattatttctgtactaaaggtgtttttaattttgtatttgtgtaaaaccacctttggaagcagcaactatctagtcagaaaagcaaatgatgtttccattaatcttttctggggaaaacattagtgctaaggatttaacaatctgtaggtaaagtttaacctaacagtattccacaaggagactttttattatcagacggttgcctaattttcatataatttttatattaatataatccttggttcctccccatccccttcataggccacagctgaggtgaaaagggtcctggaatggctagtgagagctagaaattcagacgggaaaattgaaactcagagcagaaaggcaagctgcccaaaaataacaacgctagttaatggcacaattgctaccagacccaagtatccagacttcctggagctgtgagatctttcatcaccaccactctccaggtaccgggcagtgcctgtttctggattcaaactcacagcagcgaggaaatcctattttagcaaagtgatctactgttactgttgttagtgcacccctctcctgcgtctctgcttcacatccactccctcgccgcccgcccccaaacacttggattcttcctagcctctcacaggtcagccaccaccagaggaccgtgagcctccggcaagtgatcaaatactgagcccgaatttcggcagccgtaccaacgcaatcctgggagcccattccacccactccgcagcccctctcccacctcacctcttcccttgtcagaaaagcggacgccgccttcccagactctcctcatgaaaacagcacccatctaaatagtgatcatgaaaaatgccccttccagtccacagagaaaaagctttctccttttctaagagtccatgggcgccgccatgttgctgtacggaaaaacgtttccagggcgagttgagcgttcagggcactcctcggcgctcaagctgcccacaggtcttccgacctaactttaggggtcgtgccagtcttcgtagagacggccacactggcccacagaccccagttcctggggtgacgcagctgggcgcgaccagcacgcagccttccagcgacgaggcggtcgcatggaagttactgcgcgcgtcgtgcgtaatgacgtcagcgccggcggagaatttcaaattcgaacggctttggcgggccgaggaaggacctggtgttttgatgaccgctgtcctgtctagcagatacttgcacggtttacagaaattcggtccctgggtcgtgtcaggaaactggaaaaaaggtgactgaatgacatcggattaactttgtttctgcagagctgttctggaggaagaaa

SEQ ID NO: 19447 - DNA, 2300 bp, Homo sapien
agcaggttctttcagatatttttccagcaaatcttgaggaaagagttcggaggagtggtgttttgtaggctgctactatattataccttatgagagcaaataattttgctctgatttgattgaagctttgctaattggaaatatctcagtgaactctaagttacagcacagagcctgcttaaacaagtagctctagaataaaagagaaaaataagagagtactgaacaagaattaacagtccttttagggggtgcctggtaaagcatttggctttggaaatttgtgaaacaaatgacacaaacaacacctagcagagtatcatgcccacttttagatttcattgatccaaaattaggtacccctgggaacagacaagattcaccaagacatcactcatattacatctttatattaactatttcttatgatttctttgcctaagatgataaagcatgcaaattagaaccacaagggaaatactcacgtttgaggggtatagaggccttgtttatttacatcctgggatcttaactcctgcatggagaggcggccagcaccaccgctggaaactgaactgcgcttcatgcttatgacctacattcacgaattcagtatttaaaaaaaactttccagacagagatggtacattaagcaactatttatccttaaacagaaagacagtcaggtttcattgtttcttcaagatcatcatctttcccctggggtatctcttttttgttcatgtacactgaagttctcatttgcaaggaacatctatttaattccatttaaaaatattcaacataaacatttattaactgcccactatatatataggggagtgtgctaggcaatgcaggagatgcaaagacgagtaagttacggtttttgccttcacaagggtatccgtggtagctaaagccctgtctgttacccagaccacattactgctgttggctgtgcctatttcaataggaagacaaaaaaattacctcaaattctcttattcacctcaaaatgtttccttttctttggtttcagagaatggaattattctgttttcctaatgtcaatctctcctgctctgtccttaacccattgtttcctcaattactgcccttttggcatcaatctccccttcaacaaggataaatcatccggtccataaaatggtctataggctgcctccatttacaaaccacattaacaggtcactcccttcacatctgctaaaaaatttgtctcctaggatacacatgattgacaaaacttttgatcctgtctcatctctgcacccagccttctcaggtcctgccctggctttcaggaaggtgacaatccttttacttctctgggtactccttagtcttttacactgattagactcttcttgattttggccgcctatttcctcttcaatatgcgcttgttcatctattcaacttttccactcacacctgtgtgtccacgtttaatctccacttagaatgtagctctcatgatttaagatgaagacttctacacgcagtcctacacggccataagaagctacactagtattcagacgcaacccacccaacgagtcctctcttgtccatctctttccgcccccttcaattcttccccgtttcctctcccgagcctccactcctcatcagtgtcccccaggccctcccctttcctccttgggaaatcgttgccactagaaatttaatagatcccgtgaaaccagcgcctcgcacagttttggcctcgaggcttctcccaacagcaaacaaacaccaaaacatcgcctcaggacctctaaatttaagtcattggcgccatcactttcttcctccagaacagctctgcagaaacaaagttaatccgatgtcattcagtcaccttttttccagtttcctgacacgacccagggaccgaatttctgtaaaccgtgcaagtatctgctagacaggacagcggtcatcaaaacaccaggtccttcctcggcccgccaaagccgttcgaatttgaaattctccgccggcgctgacgtcattacgcacgacgcgcgcagtaacttccatgcgaccgcctcgtcgctggaaggctgcgtgctggtcgcgcccagctgcgtcaccccaggaactggggtctgtgggccagtgtggccgtctctacgaagactggcacgacccctaaagttaggtcggaagacctgtgggcagcttgagcgccgaggagtgccctgaacgctcaactcgccctggaaacgtttttccgtacagcaacatggcggcgcccatggactcttaga

SEQ ID NO: 19448 - DNA, 2300 bp, Homo sapien
ttttactctgtagtaagatagctaattaacaaaaactaagagtcaattgaagagaactcattaaggaagtgggtcatttcaaacgcttttatttacttgtgatgacaattaaataaagaacaaactcgtcatctttctttgatgaaaaaattgtttgatattctgagaacaaaagtgatgccatactgccattaagaaactgattcagactcgatctctcaacaaggtaagacatcaatgttcccatcaagagctgcccataatactgcagtacacttctctggcaccattaaaaaaaaaatctcttagagatgatcctgaaatctcttctaaagacatgaaagaggtgtgcttgtataatctggtattacaaagaaatgagaaattgccctgatgacgaatctccagctctaatctcaatttgctgaagtagagaggcaattcatcttacccattaactaagaattagaaaaacaatttgtgtttttctttgagtcatttaactcaaataccactatataaaggaatagaatgagacattcgcatgaatttgaaaggtaaataaaacatcagacttcaaagaaattccattagaatcgggggttacttttttgttttcttttcctccacctccaccttaaggaacatgaacggcatttggccacagtttatgtctttccaattttatcttccaccatctaccgctcagttctcctcacttccagccaaacaatgtatgttccccaaacacgccttcacaatttcgttctagttggtgtctacctctagtatatgtgtagtcaatttatacacacattccccacgatcttgaaacgtcttgacatccacaagcaaatctaggtttctaacataacactaactttgtaagtctgtccatataaggttttagcaaacctagtaaaacagaaaacgcactattatccaggcttatattctgagatttgaaaaacccctctatctgctacctttgggtttctgaatttacataccactctcaagtatacagtattcacgatttctaagaactggagagtaaacctagtcctctaacaatggcattttatttgttgagttagggcactacctgcccacgatgaggatagttaatgaaacgctgcccggtaacgacgattaaaggctttgattgaaaacgtattaggccttaagaattttgcgaacatctaatttaaccctagtaactgtggcgtgggttctttcagaatttacacgcacgtgggagaccgcgaagcgcaggcagcgttaaaactagggcgctggagtcacccccgtaccccgaatgccgtcggcgctccagggcccccagagggtgcggggggcggggacgctgtgacgtcacagagcgcccttctgacgttctcacggacccgctttgcctcgggggcccacgctggagcccacccagtactactaagaaatgaggaggaaaaaggggcgccggctctcgtagcgcctattttctcggcagagggacccacgtgctcgctttggtggactctgcgcccggcgagtaccgccggcctgaagcttcccgccgccgcgtccacgcgacccagccagagagggctcagtcagccggcgcggcacctacaagctcagtcgggatcctggagaggcgggaaggcagcggggccctttccacagagagaacacagctcttcgggagattcccccgctgcccccgagccctgctctcccgcctcggcctctgaggactacccgcagggcgcaggcagccgcgaaagactcagcctccttccaacttcgcgagggccgagggggcgggccccgggcgcgcgcgcggcgaagccccgcccctgcccgcgcggcctgctggattcgccccgcccctcgctgtcgcccgccgcccgccacccgccaccgctcttcctcctgcgccacagtcccggcggcggcgctggtcgcgggtcgcaccgtgaggctcgcgtgggcggcgataggcgctgggcccgggcccggtgaggagcgcgccgcgcgtccccttctcctcaggagtggcgggccgcggaagtgacgtggtgcacgggcaggagcgcgtttgaatcggttcccgggtgatcctcgcgcctgccgctgctcggccgccgccgctgacgaggagctgcagcgcgccgggccgaggcctcgagccgccccgggagctggagctgaaggcgccgcgcggagcgcgcacctcagccctgagcccggcggcggcaggcgtcgctgtcttttctccttttccccaatatggcagcggc

SEQ ID NO: 19449 - DNA, 2300 bp, Homo sapien
tgaatgttataatttacccaagagttagaacttgtataatacaaagttcccataagtacataggtctagattctttactataaagtactattttatttttttttaatatgagtaatgatactgtcttgtagctttatcttgtaatttggtatctttgggaaaaaacattttcactattgttcctttttgagaatacttttgctcttctagataattttggaatcagctttgtacattcacttgaagtaattctagtgagattattgggattgcattgaatttataggttaacaatattaaactttttcattcagaatacttccttagtacattcttggttttctagggcctgcaaccagagatcctgattcgaatcccatctttgccactttctgttggacaaactactccctgccttagtttccttacctgggaaatgggtagttcacacctcataggggtgttgtgaagatcaaatttaaaaactggggcaacttctcagaatagtgctcaacactatttattaagtgctcctgcccagtacatattgttactcagtggctccactggcctttttggttttgttttttattttttggagacaaaagtcttgcgttgccacacacgctggagtgcagtgacacaatgtaggctcactgcagtctctgcctcccaggttcaagcaattctcatggatcagcctcctgagtaactgggactacaggtgcccaccaccatgccaggctaattttttgtattttattagagacaaggttttgtcatgttgccaagggtagtctcaaacttctgagctcaggtaatcctcccacctcagcttcccaaagtgctaggattacaggcgtaagcccctgtgcctggccatctctgacctcttaaatttgctgtttccaatttttgtgtgctaatagacaaaaagatataatttttttcaaatgctgccttaaaaagaagagcaagtaagttgagtgatcaatcagagggattctcctctaagagcaaagtgattttgtttgattgaaagcagcttttatataagggacttcttgtgagggcttttagggagaaggttttgttttaggtgggtaaactaattccagggtagctgaggtgttaatatgtcaggatcacattgtttaatcctaatttatctggatacacgagagtgtgttgctaataaacataagattatagacaattgtgcaaattaatgctcttgatgcatagtaacatgtcttacagttctgtgtacatttttcatgcttacttgaatctgaaaataatttctaaaaagtaaacttaattttagcatcattcactaatttgttcaaactaggtaaactcgctgctattagatgtcatagatttctcagatgactttcatgtgaacatactagttctgataaaattgtgaaactgttttagatacgggatttaagctcctatatttgtaggaaggagggattttgttataggggataatctttttggatgtaagactcttttagcctcatgaataggttttaaagatgacaggcccagcagctagtacattggttcatatataagtaattattgacttctaaatgacagacagcattcgtaatgtggaaccactttgtaaacctacctttttgtgggcaaacagtataaaactacctttaggttttatagaatgcaatttgaaacatttatgtgtttgtttcattatttctcacattttagcaataaacattttgttccatttgcccttttgatctagaattaaaagatgaagatgatgaagatgattgtttcatacttgagaaagcagctagagggaaaaggcctatttttgaatgtttttggaatggacgattaataccatatacatcagttgaagagtaagtttgatttttgctgaaattatgtttttacaacttaattcttttactaactaacattttgttctgttcaagctttgactggtgtactcctcctaagaagagagggcttgcaccaattgaatgctacaataggatatctggtgcattattcactaatgacaaattccaggtcagcacaaataaattgacgtttatggatcttgagctaaaattgaaagataagaacaccctttttacaaggattttaaatggacaggtatgatttttaaatataaagttgtgaatatttgcaaatgttttatttttaagtaaaagaagacactagcagtgtaggtttttattgatattttgcatcaaaagactatgatgtataaatttttttatgagcagtcaagt

SEQ ID NO: 19450 - DNA, 2300 bp, Homo sapien
tgtttgtttttaatgtaatgcgttaagtaatgatttttaagtatttttttgttgagcatctgctgacatagtaagttactgcaccttttgactgtgtggtggagaattcagagatataggagatgtgctttgctcttggtgatattatatcctagcaatggggatagtgtaagcataaataataggtaagaagtggatcaatgcaatggaaagaaaggattaatagtgttttggcaggttagaaggagagaagaggagaggattttttttttttttttttactttggttggtcgtgtgggctggaagaacagagcagatcgttaaatactttggaaaagaagtaacatttgtgtggaccttgaaaggggtagaggctcaggtttacacagataattacaaggtagaaggctctctgttctctccataaatgagagataccatcatatatttaaagctatagaattggatgagatcatctatacttggtgagtatagctaaagaggtaaaaggattgagcctggagctttcccaacatttagtggttagaatgaaaaggaggagctggcagaggagactgacagggataagctggtgagacagaaggaaactagcagaatgtgacatccctagagccaagtgaagagttacaagaagaaaggagtgatcagtttagtcaaatgcttagtggtaatggagtaaagtgctttctagaaggtaatctgagcatagagatgtgcgtaggttaagtgcagaaaaacagcaagtagtaagagttgggttgtcctgctgcctattgtatgtgtgaagagaaatagtttagaaatggggcaggcaaggtaggttgggataaactcttatagtccttgttgggaatttctgaattggagtagtggaaatttcccttagattttttaaaccaagtaaggagaagaaatatgataggcaagttttgagctgatgtatttgaaaaataatattaacttgtcaaagtttataaattgctgttcatcatctgagagcagaattttatggggaaaaaaggtttcagatatgttggcattcattatgactgaatttgaaggaattctggacttgtaagacacatgcttaattctaacacatttgtataaagaagctgccatatttttacaactatttgttaagtacagaacttcaaaaatacaattttattttaatattagaatgctgttttcattagtttttctaatgatagttaccaaggtttttttctttgtaataaagaagttctgtaaaattattattaagcctttttctcttcgtaaatcttaatactgaagctttttttttttttaaaaactaaatattaggtcaagacaatcaagacacttcccctcttttatggaagcatagtaagattttttctttatggcgatcatgatggagaagtatatgctacaggaggagaggttcaaattgcaatggtaagacagcaagtgataaaacatactgaaagtttcttgataacacttttgcataattgttaagatacagtatatttcgctagtgactagttttccattggataaagtggttgtagtttttgtgtggatttttatgtgtcataagttgatgtttttaataatctatacaatttaacatcatatgctcagtttttgtaaacatatatacattataactagttaccaaattaattttataaagtcatatttcctctagggcccactaactagtaaacattggagccagaattctatctcagcaatgagtaactacaaaactggagtgggttttttccctataccatgctttcttgttaatgtttgatatgttaggactacagaggttatataaaaaatataaacaaacattgtggtgtaacgtaagaatagctactgttatttatgtacttaattaggataaaatatatttctttggaagaaacaaatgggtgtttgtttttattacagctagatttaaatagttttctttgaaatgttggtaaatgtatttattcaggaacctcaggcactatatgatgaagtaagaactgtgccaattgcaaagctggataggacagttgctgagaaagctgttaaaaaatatgtagaagatgaaatggcaaggtaagtcacacttcaagatgcatgacaaaaataagaaaaattggaaagaattgtgctgtaagtattctgagtatgtcatttactctgctgttagggcatttgtagtcttagatattgtacctattgagatgaacttcttgttgaaaaaaattaagaggtctagttatacaaa

SEQ ID NO: 19451 - DNA, 2300 bp, Homo sapien
caaaccaataccagaaggtaaaaagttgtatgtcttgggtagtggtggtggtgataatggtttaatggaatcttaaggatcagcctatgcctttggcctttaaaattaaccacttacttgaaaacagcataatgagttatgtaacatttatatgttgtaaattttctttttaaatcttgttttcccctattgtttgtttatatgtacagagtctggtgctggcagaaagtagtcctggaagggatagtactgaatattttattgtatttgagccccggctaccacttttatcaagaaccttagaaccatatatcctaccgttcatgttttacaatggtaagtttctaggaaataaatggttaaactccgttgttagtgatactttagataaccttgttttgctttccattaacttggtgtttattagctatctaaccactttatgacatattttagaaaagtcagtttttaaattatttaaattatctcaattttttttcttagatgttaagaagcagcaacaaatggcagcacttacaaaagaaaaggaccaattatctcagtctattgttatgtataaaagtttatttgaagccagccaacagcttcttaatgaaatgaaatgtaagtcattttgtattcaagacaaaaattatgctttggggaatgatgaggcaggtgagatcgtgatacacaaacaagcttccactttcctaaattacaagtaaaatacagaatgtttcagaaaggtggtaatgatggttgatactgtcattgagaattcttaagatgaagtatttcttattttaaataaatttgtatcctgcttaaaagaaatcaacacgttctgttaggaatctggacctgtggaaaatttaaggctttctacataataataatgtttatatttagctctagcttctggcaaaagatactggataataatatcaccaagggagtgatgtgtaatgtaatttttcatttgggtaatgagctgtttgtattttacttcaaacatctgcagtttgtcatactatggaggtatctggggcagcacacactgatactgaaatatgtaaattattcttgagtcaattcacagaaagtttgctgcagttttgttttgtttagttttgttttctgttttttgtttttttttgagacacagtctctgtcgcccaggctggagtgcagtggcacgatctcactcactgcaccctctgcctcccaagttcaagtgattctcgtgcctcagcctcccaagtagctaggattacaggcacatgccaccacgcctggctgatttttgtatttttagtagagacggggtttcaccatgttggccgggctggtctcgaacttcttacctcaagtgatctgcccaccttggcccccacaaagtgctaggattacaggtgttagccaccacacccagcctacgtttgctgcaattcttaataatgtttcatataattgaaagacaagacattttctgagttgtgctctatcatctcttcccttttcatttgtcatatttttttgctaaggtttttggccttgtgttattttgatcaagttaaccaagaaatatttaccgcttgcctcaaagtactcacttttgtgtatgcctgcacaagatcaaggatatttagaatataataggagctaaatctagtagtgagataatgtcatttgtgtagcactaaaaattgtttttataaagtctttgagaacagccttgtgcaattatgtataaattatgtatactcgtggattaagattaagtaacttatccaagattactaggagtttgcagtatatcatatctccctttagttgcattaattttgttttctcatttttgtatatcagaattgagccttaagatgtatagtttaattttgaatttctgaaatggtcacctatcagttttcattttagcaacagacattaaaaggaaaaaacaaaaggaactttaaaatatttttcaaaaactatgatttgggggctatcagaaattgatgcaaatttttggttttttattttaggtcaagttgaagaagcaagattaaaagaggcccaattgcgaaatgaactaaaaatacataatattgacattcctacaacacaacaggtacagcttccaactatacgtgaaagattttttattaaagtctattctacaattttctcaattattcagtttttattaggaattctgagtattgttgttttagggtacaaagacgtgcattatcgtcactagacattaaaaatgactaacaaaatgatagagtgct

SEQ ID NO: 19452 - DNA, 2300 bp, Homo sapien
actttcctaaattacaagtaaaatacagaatgtttcagaaaggtggtaatgatggttgatactgtcattgagaattcttaagatgaagtatttcttattttaaataaatttgtatcctgcttaaaagaaatcaacacgttctgttaggaatctggacctgtggaaaatttaaggctttctacataataataatgtttatatttagctctagcttctggcaaaagatactggataataatatcaccaagggagtgatgtgtaatgtaatttttcatttgggtaatgagctgtttgtattttacttcaaacatctgcagtttgtcatactatggaggtatctggggcagcacacactgatactgaaatatgtaaattattcttgagtcaattcacagaaagtttgctgcagttttgttttgtttagttttgttttctgttttttgtttttttttgagacacagtctctgtcgcccaggctggagtgcagtggcacgatctcactcactgcaccctctgcctcccaagttcaagtgattctcgtgcctcagcctcccaagtagctaggattacaggcacatgccaccacgcctggctgatttttgtatttttagtagagacggggtttcaccatgttggccgggctggtctcgaacttcttacctcaagtgatctgcccaccttggcccccacaaagtgctaggattacaggtgttagccaccacacccagcctacgtttgctgcaattcttaataatgtttcatataattgaaagacaagacattttctgagttgtgctctatcatctcttcccttttcatttgtcatatttttttgctaaggtttttggccttgtgttattttgatcaagttaaccaagaaatatttaccgcttgcctcaaagtactcacttttgtgtatgcctgcacaagatcaaggatatttagaatataataggagctaaatctagtagtgagataatgtcatttgtgtagcactaaaaattgtttttataaagtctttgagaacagccttgtgcaattatgtataaattatgtatactcgtggattaagattaagtaacttatccaagattactaggagtttgcagtatatcatatctccctttagttgcattaattttgttttctcatttttgtatatcagaattgagccttaagatgtatagtttaattttgaatttctgaaatggtcacctatcagttttcattttagcaacagacattaaaaggaaaaaacaaaaggaactttaaaatatttttcaaaaactatgatttgggggctatcagaaattgatgcaaatttttggttttttattttaggtcaagttgaagaagcaagattaaaagaggcccaattgcgaaatgaactaaaaatacataatattgacattcctacaacacaacaggtacagcttccaactatacgtgaaagattttttattaaagtctattctacaattttctcaattattcagtttttattaggaattctgagtattgttgttttagggtacaaagacgtgcattatcgtcactagacattaaaaatgactaacaaaatgatagagtgctctattcaaagaaattgcaatttgtatttttaatgtaatgacaccaataaatgcaattaataatacatcagttcaagtactgcattgaaaaggctgcataaccactacacgtgatggtaaacaaaataagagaaaataaaaagcaatctagatttttaaaatttatattcttttatatgtgtaactcagtttcaagagaagtcctattataggtagtgtatttcttggctaagatttttttaaattcagtgaagtgggaactttatattactataaccatggtttttaaaattgtgttttctttgtgtgtgtgtgtattttctgatagttttttttttaataatgcctacttaccaactttatattctttagttatctaaattgttaatttttctccactgtcattatgggctgcctggttcaagagtaattggtcttgtagttaatttttctttataaattataggtgccacacattgaagcacttctgaaaagaaagctatcagaacaagaagaactgaagaaaaaacctagaagatcgtgtactcttccaaactatactaaaggcagtggagatgttttgggaaaggtttgtgtttattaagccttttgaaaggcagtacattttattatcttgtttgtttaaaacgggtcttctaaaagtgacaaaaaagtgtcaggttctttgtaatttacttctttccaata

SEQ ID NO: 19453 - DNA, 2300 bp, Homo sapien
acagtgggtaatagggtaagaccagtgaatttaatgagcatgagcccactgccacacatctttggtgagttctttggtcagaagcaatgctgtgtggcatgccttgatggaagataaggcattctgtaagtcctcagatggtagttttggcaggagcattgcatgttggggaggcaaatccatattcggagtaagtgtctatcctagtaagaagaaaacattcctcttttcatgatgaagcggtccaatgtaatcaatctgccaccaagtagctggctgaccatcttggagaagagtgccgtatcaggggttcagtgttgacttctggcaggttgggcagtagcagtggctatagccaggatggccttggtgagtggaagtccatgttgctaatgtataacctgcctttatggcattatggcattattccattatatgccattatacattatgccatgtataacctgccattatgggctgggtgtggtggctcacacctataatcccaccactttgggaggctgaggcaggaggatcacttgaacccaagaattcaagaccagcccgggcaatatggtgagatcttctctctacaaaaataaaaaaaaataaatagccaggtgtggtggcacaggcctggggttccaggtactcaggagacggaggcaggaggattgcatgagctcaggaggtggaggctgtagtgagtcatggtcacaccgccacactccagcatgggtgacagtaagtaagtaagtaagctccagctggggcaacaacagcaaaactctgtctcaaagaaaaaaaaaaaaaaaaagacagaaggctggaatctgcactgcaaaagaggaaactcaagtggccagtaagcgaagatatgctcaacctcattattaggaataattaggaataaagaaacaagaccagatgtatttcaggatacaaaataaatatataaaaatcaattgtatttctatatgccagcattagttagaaaattaaaaactttaaaattgcaatctacatagaattaaagaaaaatattacaaaaatattatttataaaataatcataatcttaactaatagcaatagttttttgaaggggaatatgagaaagaggattttttacaacctgagtttaaaatgtgtatggatatgccaaccaattggataagctagatgaaatggacacattcctagaaatacacaacttactaaaactcaatcatgaagaaattagaaaatctgaatacaccttgtcctagtcagcttgggctactataacaaaatgccacgaactgttctgattagcaatctctccctctctccctcccttctttctttcctttcttttctttctttccttccttccttcccttctctttcttccttccttccttccttcccttctcttccttcctttctttttcttgctttcttgctcttcctttcttcctttcttttcctttctctcttttctctcctttctctctttctctttttttctttgtttctttgtctttcttttttcagggtcttgctctgtcacccaggctggagtgcagtaataccataacagctcactgcagccattacctcctgggctcaggcaaaccgcccacctcagccacctgagtagttgggactacaggtgggcatcaccacaccccactaatttttgtatttttttgtagagatggagttttaccatgttgcccaggctggttttgaactccatggctcaagcgatccacccaccttggcctcccaaagtgctgggattacaggcgtgagccacggcacctagccaacaatttctttcttacagttctgcagattggaagtcagattgggatgccagcagggttgggttcttgctgagggtcatttttccagtttcagagagctgacctctccctgtatccttacatgacagaaagagagctagttctcttcctcttcttataagagaactgatccctcatgggggctcctgaggacctaattacctgccaaaggctcccactggttagttttgacatttttgaacttcatagaaataaaaaatatatactttaatggaagagtcttctctaacttgtttctttcacttaacatgcttgtgagattcattcatattgatgtgcacatcagtagtcatccatgttcgctgctgtatagtactccatagtgtggatgtaccacaatttatctatattactttttctgttttgttgttttgtttttgagacagagtctcactctgtctcccaggctggagttcagtggtgtgaattt

SEQ ID NO: 19454 - DNA, 2300 bp, Homo sapien
ttgaatttgcctgagaaagctgagtggagaaagcaattctttctcctttctacctctttccagttacgtgtgattggaggcccttcagccagtgtaatctttgcccaagctgctcctctgtgtgggatggcagggctaacctcgctgcctggagaacttcagctccacctacaagacctctgtcctcagcccttctttgaagcttctccggtgcctccaggccctctcagatgttacaacaaataactgagaaagaatttatggtggaacttagcaaatcagcaacaatgacaaatcaacaagaaaaagacaaacaatccaatagaaaaatagacaaaaactggaatctgcacttcaaagaaatacgaaactcaaatggccaataaatgccaatatgctcaacctcattaataatcatgaaagtacaagttaatacctacttcatgagttaatatctaatacagtcggatcatgctacatgcctgacagatggaaaaaaatttacaagtctgacaatgcccagtgtcagtgagaatatggagagaaacggtcatgtgctcctggtaggggtacgctatcatttgggcctctgtccctccaaatcttatgttgaaatgtgatccccaaggttggaagaagggcctaatgggagatgtttggttcatggggcaggtccctcatgaatagattattgccctctctggggaagggggtcagttctcactctattagttctcatgattgctggttgttaaaaaggagcctggcactcgccgactctcctgcttcctgtcttgccttgtgacctctgcacatgttggtgtccctttgccttctgccatgagtaggaagtagcctgaggccctcatcagaagtaagtgctggggccacgcctcttgtatagccggtagaaccatgagcccaataaacctcttttctttataaataacccagcctcaggtattcctttaaagcaacacaaaacagacgaagatagggtctgaactggtccaactactttggaaaacagtctgcattactatgtatatttgaacaggtgtgtactctaaaacccagcaattgcacccctagatatatatacccttaaggaaatcttggacaagtgcaccaggagacttatattaaaatgttactcagcctgggcaacatagtgagaccccatctcaacaaaaaaattttaaaaattagctgggcatggtggcatgcacctatggttccaactgcttgggaggctgaggtggaaggatcgtttgagcccaggaggttgaggctgcagtgagctgcaatcacaccactgcactccagcctgggtgacagagtgagaccttgtctcaaaaaaaattaaaaaagttccagtgatgtttacaatagccaaaatgagaaacaactgaaatctttattaaaagtaaaatggataaggccgggtgcagtggctcatgggtgtaaccccagcactttgggaggccaaggtgggcagatcacttgaggtcaggagttcaagaccagcgtggccaacatgatgaaaccccatctctactaaaaatacaaaaattagccaggcgtggtggcatgcacctgtaatcccagctactcaggaggccgaggcatgagaatcacttgaacctgggaggcagaggttacagtgagctaaattcacaccactgaactccagcctgggagacagagtgagactctgtctcaaaaacaaaacaacaaaacagaaaaagtaatatagataaattgtggtacatccacactatggagtactatacagcagcgaacatggatgactactgatgtgcacatcaatatgaatgaatctcacaagcatgttaagtgaaagaaacaagttagagaagactcttccattaaagtatatattttttatttctatgaagttcaaaaatgtcaaaactaaccagtgggagcctttggcaggtaattaggtcctcaggagcccccatgagggatcagttctcttataagaagaggaagagaactagctctctttctgtcatgtaaggatacagggagaggtcagctctctgaaactggaaaaatgaccctcagcaagaacccaaccctgctggcatcccaatctgacttccaatctgcagaactgtaagaaagaaattgttggctaggtgccgtggctcacgcctgtaatcccagcactttgggaggccaaggtgggtggatcgcttgagccatggagttcaaaaccagcctgggcaacatggtaaaactccatctctacaaaaaaatacaaaaattagtgg

SEQ ID NO: 19455 - DNA, 2300 bp, Homo sapien
ttgggctcactcatgaatcctcagtatttttgcacaatgcctagcttgtaacagatgctcagaatgaaatttatttaccaataaatgttattgatagctgattaaatatagtattgtggtcatctcaatgacaagttggcccttatactcttagacaacttcctattataactttgatttgacggaaaaaacagattgacttgatcagttcaatgcactttcaagtttgagatttacctgtaccagacacacattggagttgttctctgctaattgtagacacacacaacttgtgtgtttcccccatttccccccctcttcctcttcttcatttctatactctgtttctactctatgagtctttacggccaagatggtgttaggacaggcaggatagggaagtcacacagaaagatacagattgggttacgaaagacagctttttatccctttctgttatttcccccccacggtggctcttttgaaggctgggatgacttcagtccactatttgcatgatcttccgcttaagagtccagggacagatgatgtccttacatggtataatgttctgcttggcccttgtagtttctacttagggacttctctttctttcatctgcaaatcaaaaggtccaacaacaccatcaaagaatattagaaacaaaatagaccaatggcttcatttagtaaagtaggaacatagcaaacgtttttattttttattttttgcgacagattttcactctttttgcccaggctggagtgcagtggtgagatcccggctcactgcaacctccatctctctggttcaagcgattctcctgcctcagcctcccaagtagctgggattacaggcatgtgccaccgtgcccggcaaattttttttttttttttgtacttttagtagagacggggtttctccatgttggtcaggctggtcttgaactcccgacgtcaggtgatccacccgcctcgacctcccaaagtgctgggattacaggcgtgagccaccccgcctggcccatagcaaagctttattcacttaacgagtcatggccaacagcgtctggttagctcacagaggccacagttttatctgtggagtctggtaaccacgccactcacgaccctgtacattgattagatgcagcaggtcatctcaaacacacagctctctccaacaccccttagaatacaacacttgggtggtgattttacttaacattctggtacttcatcccaaaaagacatcggtagagattagtgtaactcaacaacaggcagaaaacatacaagaaagtttaagacggatgtctagcagtgcctgaactgttaagaagcaaacgtgagtaaatgccttagtttcaatagaaaaagaaagttcacagtgggacctcagaagcagaggctgtgagatcacctttcaagaattggaggagaattgcagtaagtgatagagccggacgctgagctgcagcagcctctgggaattggcggggctgtggcttgtcctgtcctgccgccccccgcgtggcctcggaaactgtcagatggtgcctaaggcagagttgggcaaagaaagaaccagcgttcgtttcctcctggactctctaggtccatggagctggtgggggaacggccctgtcttgcccgaggaggaaattcgagtcgagcccccactcctctccccgcgggactgataaacatgtccctcattcgccccgggaggctggcacccaggcacgacgcgaggacggccagactcgccgacggcggccgcgtcccggggggccgggagcgagcctgtcggaaggtgggaggcggagtcgctcggcatctgggaagagaccaaaggaatgagtcattggaaatgctgtaacgtagacccttatcccaaaccctttcgcccctccaccccgagccccctgccgagaagcgaagggactggagacggggagacttggtggggggagagtcacgtttcggagagggaagtgaaataaagagggcggcacccggggggacctgtgcgtcattgagggaccggggagaagcgcagggcgcacggggctgcagaaggagaagtaggaacgagaagccggagggggcggccgcggagcactggttggagcgccgcgaagcgcccgagcctcttgccttcgcgggcggcgccctggccgccggcagccttgtggccggtgccccgatccgccgcgctccggacccgggcaggcggggcgcgcccgctgcgcgcgggatgtggcagcccagacggccctggccccgcgtgccctggcg

SEQ ID NO: 19456 - DNA, 2300 bp, Homo sapien
tcttcctgcctccctagtaactgagactacaggcacacaccacctccctgaccagctttcaatatttgcattctttgacgtagtgaatcttactatatatggtcagacggtgctgttgctaggagacactgatgaatagttgctttatctctgttgctttttgtctcccaaactgcaagcagggctaaacaatgtctgtgagactctttgagcacagagatgttaatgaaagtaaaggacaaaacattcaggcactgctttgaggataacatcagaaaatatgatatcatatgatatcaccatccaacagctaatgggtggatcttgctaaagtggtttcttgtggttttactgtatgcagtcaactcttggggtgtggctgcagttcactaatatgggaatgaagtgttcatatgataaagcggataatgaatatttcccctcagggtgaaagagaccattgattatctaataggtgtcatgtacatattattttaacagctctagaagctgttcttctttatagatgagaggattatagttcacagaagttagttaacttgctcaaggacaaacagtaaatagcagagccagaatgcaagtagaggtctatttgactacaaagcccatactcttttctactgtaccacagtacttacctacaattgtgtagtgacctgtaagtgaagatgtacatgtattttgtaggtaccttgtttattgtcttggcagaatctggctaaaggtagaaaatgttcattcatgtccaactttatctttgtaacagataatgaacccagccaattctcagagcccaggaagactttgtccccaactggtacagcacaaccaagctggggggtagatccaaaagaggggcctcaggaacttcaggaaaagaagatacaggtgctagaggagaaggttcttcgactcacaaggacggttcttgacctccagtcttcccttgctggagtgagtgaaaatctcaaacatgccactcaggatgatgccagtagaacacgggcaccagggctcagcagccagcaccccaagcctgacaccactgttagtggagacacagaaacgggccagagtcctggtgtcttcaacactaaggaatctggcatgaaggacatcaagtctgaattggctgaagtcaaagatactctaaagaacaaaagtgacaagctggaagagctggatggaaaagtgaagggctacgaagggcagctcagacagctccaggaagcagctcagggcccgacggtgaccatgacaaccaacgaactctaccaagcctatgtggacagtaagatcgacgccctgagagaggagctcatggagggcatggacagaaagctggctgacctgaaaaactcatgtgagtacaagctcactggcctccagcagcagtgtgatgactatgggagcagctacctgggagtgatagagctcataggggagaaggaaacaagcctgagaaaagaaataaataacctccgagcccggctacaggagccttcagcccaggcaaattgctgcgacagtgaaaagaatggtgacattggtcaacagatcaagacattggaccagaaaatcgagagagttgctgaagccaccagaatgctgaatggaagactggacaatgagtttgaccgccttatagttccagagccagatgtggattttgatgcaaaatggaatgaactcgatgcaaggatcaatgtgacggagaagaacgctgaagaacattgcttttacattgaggaaacccttcggggcgccattaatggagaggtgggtgacttgaagcagcttgttgatcagaaaatacagtctctggaagaccgtctggggagcgttctcctacagatgaccaataacactggtgcagagctcagtcccccaggggcagcagccctgccaggagtgtcagggtcaggagatgaacgggtcatgatggaattaaaccacctgaaggacaaagttcaagttgttgaagacatttgcctgctgaacatccagggaaagcctcatgggatggaaggtgccttgccaaacagggaagaccgcgcagtacgcgacagcctgcaccttttgaaatctctcaacgacacgatgcacaggaagtttcaagaaaccgaacaaaccatccagaaacttcaacaggattttagttttctttattctcaattaaaccacacagaaaatgatgtgactcatcttcaaaaggaaatgagcaattgtagagcaggtgaaaacgctggcatgggtaggttcactaaggtgggtgagca

SEQ ID NO: 19457 - DNA, 2300 bp, Homo sapien
acaattacattctagcattgtttgatgacattgttcccttctcttctagtttccaatactgttgagaagcctggtgatgccttcctgatttgcagtcactttttatattttttcccttgaaagtttgtaatatctcctttttatcttcagtgttctgaatgtggcttggtttattcctcttattcagtaattgtgctggcatctttcattttcttcagttctgggaagttgtgtgtttatttgataattctctccttaccatcccattacccctacataccagtttttctgatttctttttttctggaaggacttcctaggttgaccctttaattttcttatgatttccttcctattgatcatcatttcgtcatcatgttctaccttctgaaagatttccttgatttttatctaccaaccctttcatggaaatctctggttttggcaagtgcctttttaatcagcaaaggctcacccttattctctgactatcccttttgtatagcaatcaattcttgcatcttggatgcagtatcttctacttctctgagggtaggatgtgtttattttcttgcactgtgtctgtctctttagagttccttttctttagttggtgtggcttgctttggtccctgtcgttcacacaggcggctttcctcatatgtcaggtgattttgactttggttcacatttaatggggagacactagatagagtttcacgactgtgggcatcatagggtcaatttgaagaatcctcctatatccagctagaggtataagcaagtggctgggagcttagcagaggatggggactgtgagcctccttattcagggagcagactttcgcttagtgtttttagactggtatcttactcctatcttccactgtagctggtatctgcatgtttttcaatccctctgcctcagtttctctgtctaacccagcctttctcaaccagggttctaaagagatgtaaatcctgatgccattctattgtatggcgtgaactaacttctctgtatctagaatggaattagctctgtatcatcctcagggaaaactgagagagtaatcactcaaattgttttctcttgggcttctctcatggaacattggtcaggaaaggctgttggagaaactgcctctctcagggtgttctggcaacctgcctctgtgggtggggcggggggggggcatgtatttgatctgccatatttatcttagttttatttttttaatttttagttgttatgtgtacagagtagatatatatatatatggggtacatgaggtattttgatacaggcatgcagtgtataataatcggggtaatagggtatctattacccaaagcatgtgccatttctttacagacattccaattctactcttttatttaaaaatgtgcaaaagataattgctgactgcagtcaccctgttgtgctatcagatactagatcttattaactctgtctaactatatttttgaacccatcaaccacctccactgcccttctccccagcttagtgaggctggagtgcagcgggcgatctcggctccctgcaacctccacctcctgggttcaagtgattctcctgcctcagcctcccgagtagctgggattacaggtgcgctccactaccccgggctaatttttgtttttttgttttttttttttggatatttggaagagatgaggtttcgccatcttggtcaggctggtctcgaatttgggggctcaagtgatccggccgcgtcggcctcccaaagtgctgggattacgggcgtgagccaccgcgcccggcccgcttagggagttttaaaacaaaactagacggcaggtcgggaggcagccgccgatttttgtcgggtcctaaacaaaaatcaaatgtgttgcgctttggaactctgggcatcgtgggcaccaggctgacgggggcggcggggatggcgtttcttggcgagcgggtccctcagccaggcccgggtattgtcaggcgtcccgtggacggtcgggaggggcttcctggagggctcgttccgggaacgagttcaaaggaggaaagggcggcagcttccggcgccttccccagagggccgggagacgcacgccaggagcttcctccgttggaagtcccttccgctggcgacgtgggcgctgtggccgcggccctcgtggagcctgagccctcctcacggcctccgcgcagccctggggccccccggcagggtccctcggcagcccgcgggagaggccgtggggccccggcaggagtgtggttcagagacggtgcggg

SEQ ID NO: 19458 - DNA, 2300 bp, Homo sapien
ggcacgcgccaccacgcccggctggttttttgtatttttagtagagacgggggtttcaccatgttggccaggctggtcttgaactcctgacctcaagtgatccgcctgcctcggccttccaaagtgctaggattacaggcgtgagccacccatttcttaaaaagtatattttaatgctggggacggtggctcatgcctgtaattccagtactttgggaggccgaggtgcggggatgcttgagcccaggagttggagaccagccggggtaacagagcgataaaaagaataaacaaaaaacaacagaaccccggcatatttttaaaaatgagttgtgtaataggattttttttttttcggtggagatgtaagtaagcaaaggagatgtgctactagtgatcaaaaggggattataaaacattcattccctagactttttttgcactttaacattcctttttggcaattgggctctcagtcccacgtgacctgccgcagggttgccatggggaccggaagaaactttttttttttaaaacaaagtaaggctcctgtcgcccgaggcactagaaaatcgaggccccgccctcacttggccaggggcccgggcgcgcagcccagggactgggagcggtgagaagccgcacgcctggcgctcggcggcgggggcgcggcgcgcggccgggagcgcgcgtcacgtggctggggcggggcctgcgcgctgcccgcccgccagctgccggctcggccgccgcagccgcggcgtcccattcatgagggccgcccgactcagctgcggcccaggcggcttccaaggcagcggcggctgcgggcgctccgaccccgcgcgcgcccccgaccggccccgccccctcggcttccctccccggcgggtcctagccgtcgcagtccagccgccgcctgccctcagccgcccgctggccgggagcggagcccctgtgggtaagtgggcgcgggccgggctcctcgcaggcgtccctccggggctggcggtgagtgtctgcgcctgggggcttcccttggcgcgggcccggggctgtcctgccggaggccgggaccctccggggcggcgcgggttgagccgcccctcctcgcgccgcggtccccgcttcccggtcctcgcgtcccagtccccgcctcgccgcgaccgcgccacgtagacgcggcccctaccgccgccgccgcaggacggaccggcggggtgcgcggggagccgggggcgtcggggcgtcagtggtggctgctgaggactctgaacccgcgcagttccctcgccgccgccctggggatggttacccgagaccacccctacccctgggtttggggcgcggaggggagtgcggaaggcgcgcgggaggccgcgtctccatcccgcccccggccctgcgggagggggcgccgggcacgtgatctgcggcgaggcgggggccgccgagttgctggtgtttcttccccgccgcgctttgccccgtacctccgccttcaagctgtgtggaccggattcaaatgtggttagttttctcaaagccccccagcccccggtgcagatcttaatttgtgaggaacacgttcagatacagtttgtactgagagcctctctgtccacttctaacgccagcggatcaccattttctccactcgcctgaacattttaagactcttttcattgaaaattcaagatgacattttttaggcataattatgcaaaccagtaccagaaagatcacccttcctttccgaaaagtactggaactctgaatacttggaaatgctttgaaggactacttagtaaatggccaaactaatttttaatgcacatttggggcttacccattttttttttaattgaaaacgaggctctagacttggtgtcaaggtaggtcctgttgaatgaagttctttacccagtagtgatgatgggtgttactgtttattaaaacttggcctggctagattataatgttttgacaatacaaagtcggttttgaaatacattttgaaatatttacgaattatttagtggcccatactggtttatgttttaacggtctggtgttgatcgttcttagtggcttcagattgagaagaagtggcaggtgatgctgaagcgggggagaagcggcagagccggccacacagtgcaggggatggagacaggtgctgggctggtcctcctgcagcatcctcagttgttggagggcagtcatcctcaggccgtacccagccagagaagaaaaagaacagtgtgaagccacgtgtgatagccgtccaacatcggctc

SEQ ID NO: 19459 - DNA, 2300 bp, Homo sapien
tctccaaaagaccacatattcttcatttgaaacaaatcagctgggtgcagtggctcacacctataatcccaacatttggggaggccgaggtgggtggatcacttgaggtcacgagttcaagaccagccttgccaacatggcgaaaccccacctctaccagaaaaaaaaaaacaacaacgaaaattagctgggtgtggtggcacgtgcctgtaatcccagctacttgggaggctgaggcagaagaatcgcttgaatccgggaggcggaggctgcagtgagctgagactgcgccactgcactccaacctgggggacagagtgagactccatctcaaaaggaaaaaaaaaaagaaacaaatcaatctatatctacacacacacacacacacacacacaccccttatgacatgcatttccacctttgtaagttactttaaactgtcttttcttactgttttcctcagggacaggcgttctgccttttctcgaatcacaactttccttgacttcttttcagaagtttcttcctgttgaagagcggatgtggcctgtttggaaaccacagactgcctggatgccgtggactgcctggatgccgtggactgcttggatgctgtggactgcttggatgccgtggactgcttagatgccgtggtctgcttggatgccgtggactgtttagatgttgtgattccttcctcactagcaagaagattcctctgggctatataagcagcagcttctttaattctttcttcttccgtatcagtaattccactgacatgcttttgactaaaacacaacaatggcaaaatgtagatgttgtggatggcagtgataagattgagtaattttactaagttcaaagtaccacatctcagacactgtatcctgcaccaaaagaaaatccgacatagaaaaagcaggtgaatcagaagctgacacttcatgtacagaagtattcctcaccttaacaaataacaacaataataacacctatgatggccctggtgcttttcacatacactatcttgtttcatccccttacaaaccctatgagataaactttttttttttttttgatatggagtctcgctcttgttgcccaggctggagtgcagtggtgcgatctcagctcactgcaaccttggcctccttgttcaagcaattctcctgcctcagcctctcaaggagctgggattacaggctcctgctaccatgcctggctaatattttgtaattttagtagagacagggtttcaccatgttggccaggctggtctcgaattcctgacctgaggtgatccaccagccttggcctcccaaagtgctgggattacaggcatgatccaccgtgcctggccaagataaattattatttctgttttaaatatatggtaacgaagttcagataagttagataacttggccaaggtcgtctcactggttgtcttagtgtgtttaaacatgattttgtttaaaataaaagattatggttcctttccagaaaagctatattgtcaaatgagatctagtttgtgtgcctgtgaccctgatacatgagtaggagcttgatctgggttctgtcactttgctgatgtaatgcattgcctggagttgttacaggtatgaataagttctgaatttacatgaggttccttatgcctactgggtttctttctaagataatacatgttgtgtgtgcatatactatgtgtgtacctatactatatactaagaaattatcaaacttgtgatggaagtggtgacgtttataaatgtgactcgttattattcataattgacaatagtaagggagtggcaacatcccaagtgcaatgcctactgtggcagtttatgatagaatctgtgctgtgatttattcatgtcgtttaaaaatatttgaattattttaacatatttcaatgccttttgttgttaaccccctcaaatgtttcgtgagagagtgtattgattacatcgaagattctcttgacattgagtctccttagacctcttaagacagaatcgtgcattctaagaatgattacttcagaatgtaagcaaatgctgccattgtgttagcaagttcctagcatctaaatctatgctgcttgctgaggaatgagattccacatttgccaagattggggtttctcatggactattcctaaaacatctggcagacgagatgagtccacgttgtttctgactaaatgtagtgagtaaattttaagtttttttctctctccgtaaatattaataagctaatccctactatggatgttagtaatatgtcca

SEQ ID NO: 19460 - DNA, 2300 bp, Homo sapien
acttagttatgattcctttatatatgtggactctggtcaattacacttactcatgatacccttacagatatgtgattatcctgaaaacttaatggagtggttagccagctgttaatttcaaatttcccagaaaatcatctaatgtaaaacactttttaaaaagcatataagtttatttttcctcttttctgctttgagaagatttggggcaattgaccaatgttctctagagaaacagctcaccaggaatcatcctaatggctggtggataagacttgagaagaatcactgcattctgtattggatatttagagaacaaatggatgcttggggaacataacacttggaaaactcgcctatggcttccagatagctaaaatgtccacatgcttactaatagcagaggtatgtatatgaagaaattccaggttgaatttcacaggtacctggatcagaactaggtggaacagattcttttacatactttgagtagctcagaagctaaccgtctattacaagtgaagacccgtattgccatttcaaaatgtctagtttcttactatcaaagtgccactggaggagccagcaatacatgactacaagtacacgggctttggaatcaaatgtctctgaatgaagttgcgtttctgtcatctacccgctgtgtgatctttggcaaatgccttcccttctggaagctttgctttcctcaacggggtaatgaagctgtaccttgcaaggtatgataagtcagtgggatcatgtatataaactgcctatcccagtgtctggcactggataggtcctcaacagtgttaactgtagttatcatcaagaaagtcatgatgaagtatactataatattgagtctgttcaatatcttgatagagactgggtgcagtggctcacgcctgtaattccagcactttgtgagactgaggcaggtggattactcgagtccaggagtttgagaccagcctgggcaacatggtgaaactccatttctaccaagagttaaaaaaaaaaattagccgagtgtgatggcatgcgcctgtagctactcgggaggctgaggtgggaggattgcttgagcctgggaggcagaggttgcagtgagccaagactgcaccactgcactccagcctgggcaacagagtgagaccctgtctcagaaagaaaaacaattttgatagacacaggtgacctttattcagttgatgtaatatcactgtcagaacataaggccagtagatcaaaataccaacctgctgcatacatgtaatctaacaatgagcttttatattattggtatcagtaataacagctgatatttactgagtctatattatgtgactgtcactaggtcaagtgctctgtctgcagtatcacatttaatcaccacagcaatcctataatttggatatgattatccccattttatagacaaaaaacctgaagcttaggaaggagaaataaattgctggagattacatggctactaagtgctatcaatatagtgggatctagatctggtctgaatccacaacacaggctctcacaaccgggttacacctcctcttaattggtcacaccatttaaagaacaaagaaagagaatctcttattagatggactgaccctactctgagttaggaaagataaaacactgagttgcgtctcaaaaggctttagttaatgaacaggaaatcacatattcaggcttgaagctaagacttaaccttgtaaattttcctgaagtgagagaaatagtgaccgtgatgtcaggcaaaaatcgccaccacgtgtaacccatttcttccttgttttgcctttagttagcttcaagttcttttttcacattgtatcttttaaatgtaccgtacgtgtgttgttaacagcacactcagaatcatatcttggcattaaaattccacgaagtccattttgagaatcatattactacacctatttttagctgttaacacaaaccactctttccattacacttttaaattatctactgataaagtgacattgaaaataactcttgttgccaaataaaaaccctatatttggtttaatcgggccagacccattgaccggcattatgcaattatattactaaggctgctacctgcccatgcccctctcctcctcctggtttggaactaccctccccatctgctgctatatttatctgccttcttggccataaaaggctggttgtgtggcctgacattcgactgcctgaccacatgcattatttttgaactggcccccagggtcctgtctttagccctg

SEQ ID NO: 19461 - DNA, 2300 bp, Homo sapien
gattatcacatggaggcaaagatctcccatagggtccaaaggatagaaatatcagagtcagaggcctttgatggtgggtccagtcatgaaaactgagtatcaaaatactaggtggacatttgaagaacattttatcgagatgctatttttccacattggttgactaaccgtttttaaatccatagttgtggaatgaataaatgaatgaatgaacacagactacacaattcctgttcatcttcaatcagccaggccctctgatcacctccagacaatcaggcatgctgctccctctgcctggcatctccctctccttttctttccccactgaattaattctagaattagctctttaacatcccctgggggacaccttccactagttcccagacaagtttacgcttcgtttgtgctccttcaataggccctaactaactgtactgcaattattatatctgttccacccttgttccctgatactccgctaactccgcattttttctattcctcccgcccccatccccaaggtagcaacaactatgttctgctccggaaagcataagccacagcccccaccacagtgcttggcaatgcggttgctgtttaatacctgctgactgagtggaaggaagacaaaacaattacctgactcaaagagaagcaaaagaatgctgccttcaagctgaggggaagactgaactgtccgtttctttctgctctaaagtgtcctctggagaggacgctggcggagctggtgctctcgtggtggcaggccaccaccctgtggaggtgtccatgcattgcaagtgctcgcaagctccaggaacaaacgcatccgcgcagccgtctggggtttgtcccgtcgctgccagccctctcgctgagtccccgccctcgccgataagagcccacttaggacccccattacatggatggcttcccaggacctgcccttaaagactccgatttagtaggttggaaatgacgcaattatttttatttttaattagtaccccaagtcattctttaccatcaaggaagtttgggaaacagatcacttttgtttcaatcacctgtggaactggagcagttatttttttccccagcgactttaccacgaagttaactttggaatacgttagtggttaatacacggaacgttcccgagatccctcaagaaagaagctacgaatacttagaagatactattccgcggcgtttacagcaacactgtccgttccagaaggattcaagtggcggcctgctttgaaggcgaagaccacagggcaacccaaacttcagaagggttctggccacgggagccacactggtcactgtcccctagtgctgggatgacggctcgagtgttagaggatcccactctctcctctggtaggtgaggtcagagagctgagggggccagaacaagtcttccttatcggattctgggcggaaaaagataaagtcggggaggactttctctttttaataagattcatcgttacgaattgttctaggcaagcagacctcaggagaaataggcccaagttttgattcctgttttcaccaagtcgcaagtcctaatcgtagcaagaggtgcggggaagagtcgccttccttcctgcatagtgggatccaagtcaggctgtccttgttagccagggtcaaaggggctctgccagggaaaaacgacggcaaatgtttttcaagaggaagtctccagccacttgtgacctgggaaatccgtctgggccaaaaagatagtggaggcttggctgagggccccagggacacacgtttcctcccgtatggagggggcgggactcttaataaaattacactgcacacagagctagcatcaagatccgctcccgggatacgcgcactgctccggggccctcaggcggagacccagaccccgcgcggggcgtcaagcgcaggcgcactaccgcccacaagctggagcccggcttcggggcggggcgagggtcagtcacgtgggcccgcagccctctcctcgatttccctacaaggacttgggccgacgggccccgcccttcgccgtgccctggaatgtgcggccaggcaaagccacaggacggacgcaaccatctgcggaaaggataggggggaggaagacttaacactgcaacaacaggtacaaaaaagaaggaaactcagtaacaggacccagaggaccattatatattgctctatattctaggtcgcccactttacacttccttctcatgcacttggtcaataccacgcccgctgaccacactggcgacttccctctc

SEQ ID NO: 19462 - DNA, 2300 bp, Homo sapien
taacctgcacgttgtgcacatgtaccctaaaacttaaagtataataataaagcaatttcaacttttttagattaaggggtataccctagttttctaaacttcgatgagagttgtgcatttgctgaaggcttattacatgaagagtgacagtctaaattgtttgaaggaaagtaaaatgaacaacaaactagaatcagcaaagaggaccctgacaatatcagaaatgatctgctccttgagatcatagcactgttcctgatttgactccctccaccattatttattctccccacacttttagtttggtagggaaaaaaccccacagtttctgtattttggaacagtgactgtgcagccaaactccctatcgctgaaaggtttctggtggaaaataactcatagatcagaatccagcctccttgaaaaagtaaaggcctaggtagtaacttcctcaacattacactgccagtttttgatagaattaactaccttaatttgttagaattgagactaacagccgaatctcttcattctaacaatgctttgtagcttctaaatgatcccacacggggtttttcaaggtcttcctcctccccaatcccttaattactcagaaacatcttttctgaactcacagcatttgataattatgtaccatgttaggaattatttttcattattgtcacacgttttaagtttagagtcatacttctggaatgaaaactatgactcatttcataagttgaaccaatcatctcatttctttatagttgcctccccaactatattaagctccttgaagataggacacatgccttacatttcttaactcttagctagtattcaacataattaatatgacgtttgatacatattagtttaattaacttcataataaaattgataagattaagtattgaatgtgctgaagaagagctctatatgaggccattgtcagtgctgacccaaaaaaaaaaaaaagcttttttactttaaaaatctattttataatacatttacaattcaaaaaagtgcgtgattaaaagaataggaaatatatcagaattcagaaaacatactactttacaaccaaaactaagcattttgaaaatgtatctagaggaccctcgtaaatttagttatatgagattttatataatagattaaaaaatcagatgtgtcagccgtttgacctcatcagtttctttgttcttaaaatagctgacatttctgcatcattagggaaagacaatgttgtcacacaaaacagactatttttaaagatgtgctttggcttgcaaaggcgtgacatgcctaaaatattaaagcgatatggactggtaaacgtgtcactcattgggtttcaacctcttgctccaagtccttgcgtacatttaagaattggaggaataatatattctatatctctttgtattttttaaagacagcatttataacagacgaggaaagtacatcctcatgtagtttagatgtgaatgggatttactacccccaaaggtgttatagaatgaaaatatgcatttatgaatagttttaagtcatgaaaggcagcatcctaaaagttgattaaagaattctaggaaatttgggaacagcatatatatcataacttctgtgctatgtaggatatatcttttcaacaatatattccagttgccatacggtgctgtattggatgggctggaatttgtgactatcctttgtggaatttcctattaaaatctgaaaacagatttagctttaaaaaatttgaggcagagcttttctaatcattccataattgtatttagtctggacgatatggttataatcaaggaaagaatgtaagaaattactttttaaacacatcggaaacacattcttagggtcactttggagtgctgagatctaggtggtagttcattctttgcagtccacagacttatttttagaccaatggcatagtgttttgccagatcatagctaaatgttgttttcagaacgtaagctttaaaattgttatcctggtcagagtgaaatcagtagtgcctattttagacctgcttggaagaatataactcaatgcagtgtcttacttttgctgctgagcggttttgcagactaccatcttccctgcaactctgaaggatggtatggtagaattttattgtctgatgactgagatttttaacttgaaacaaatttttgtagtttttaacagattgagtattgaaaattgcctttttattttaggtattattagacattctttttaattttaacttaaattttaccgggat

SEQ ID NO: 19463 - DNA, 2300 bp, Homo sapien
tattataggcttttcttttgcatctagagagaacaatataccttagaattatttcttcagaatagtgctgtcaaatagaagcttctgtaattaaggaaatgctctctgtgccatacaataaggacactaaccacatgtggctattgagcacttaaaatgtgtctaatactagccaggcgcggtggctcacgcctgtaatcccagcacttttggaggcccaggtgggcggatcatgaggacaagagattgagaccatcctggccaacatggtgaaaccccgtctctactaaaaatacaaaaattagctgggcgtcgtggcacaggcctgtagtccctgctactcgggaggctaaggcagaagaatcacatgaacccgggaggcagaggttgcagtgagccgagatcaaaccactgcactccagcctgggcgacggagcaagactccgtctcaagaaaaaaaaaagtgtctaatactgccagacgcactggtgcggtgtctctcacctgtagtcccaactacttgggaggctcaagtgagaggatcgcttgaggccaggagttccaggttgtagtgcattatgatcacgcctgtgaatagccagtgcattccaggttaggcaacatagggtgaccccatctctaaaaataaaacgtatcaaatacaactgaggaactaaatttaagtttagctgcatgtggttagtgacgattgtattggacagcacaattctagaaacttttttttttttaatttagactatcgaaccaaaacctaagagtaaatattgtagaaccaggtgtgacttttcagcaattgcttttctaacactattgagaaaatacacacagttatgaaccgcgtttagagctgtgctgctgggatggcgaccaccccatcagcatcatgtgtgcttaccagaaattcgaattatcctccaccccttactcactgaatcctgatacccggttttgaggctcaaaaatgtttttaaaagccctgttattatgcgtgctactgtttaagaactgctacagagtgctgaacacaaggtccctctcttctaggaatttctgatcaaagatttctagaatataaactccctaagaggctttgaattcatctctcagcatccggcacatgttaaggcagtaagaagagttcaataaagatttgctattagattgccgatcctccaccatcctgaagtaatgctattttagtaatgctagatgaagtaatgctagattacctcaaggtgagggaaaatatcctgaagaacacagccacaaacacgatctagaacaaaacctgaaaaacgtagctttgtgtttttatttgtgtgtgcatgtatgtgtgtgcgttgccattttcttgataaaggaaagcaagtagttcgaataaaactttcttgtggccaaaaggggaatcaaacagccgtaggctgcggccgtagcctgatacggccgtaaaccttatgagggtaagcagagaggagtaggttaaagaatttaactcgggctgtaatgcggtttgaaaagagaaagggattctggaacggagaagaatccgcccaggcgccgccctcaccttctcaacattacatgagacgaaccctaaaacctgtcttgtctgaaattcaaatttagaagaactgtacttttacttgctacatctggcaactcagggttcggcgccaggggaccccaaatcctaggcggatcgcgccccgcctgggtcaaaggggaccccaaatcctcggccgatcgcggcccactcgggtcaaattccagcggcctgcccagccgcgcccagcgggcccaggaatgcggaagggtggcggagctaccaaaggagcgggggacgagggccgggctgcggacgaccgccgcagcgcaggccgcgatatcgcagcggatcggagcaggccggaggggcaattaagaccccggccgtgtgcgtccggcctcagcagccccgccgctcggcggacacgcagaccccgccggcccgggcgcgaacactcagcgcacccccgttccacttggtcccgccgcgccttccggtgcgccttccggtgcgccttccggtgcgccttccgctccgccccttcaggcaggaagtgtcggcgccgccactgtccggccacagcctaacgctcttcgctgtcgtttgtggtctcgcgcagggcggccccggttctggtgtttggcgtcgggtgagtcgcgctcgactctgctcgcgagacccctcgggccgccgtctccgtacccccgcgccccctcccgtcgcgcgcctgcgg

SEQ ID NO: 19464 - DNA, 2300 bp, Homo sapien
ttacaaatggtcggatgggacagggtctctgacaaaaggccctctcctcattggcataatcctttagacagctgtaccgggtgaatgggaaccgctcagagcagtctgttggcaggcttgctgctgtcacctcttgtagaatttcctctcgaccaccctgctctctcgttcagatgtccaacacacagccttaatgggtaatggatgttttcacctggagaatcctcctcattagcctctcagttctgaccaggaggctgaatgttcacaacatggaaagtcataatatttcaacaatcattggccccaaagcacttgttcaaacagtaatagtagttagtatgttgtaagaagatcagttaaaccatgtctatgtctttacatttagctggtatgtttcctcctaccatactgtcctgtttgtgatttactctgtacccaaaagctgatgtcagactctctgctttcaacaccaagtaattatgggtggaaatgggggaggttgaagtggtttgggagtggagtgacatgtaaggtaatagctttcagatcatttccggtggcgctttggtgtgctacaaagatactttcattgaaatgtcccagggattggtccggaccctggatcttacctcacttgaatcagagtagctcattttttttttttttttttttttgagacagaggctcactctgttgcccaggctggagtgcagtggcacgatctcggctccctgcaacctccacctcctaggttcaagcaactctcatgtgtcagcctcctgagtagctgggattacaggtgtccgccaccatgcccagctaattttgttttttttctgtatttttagtagagatggggttttgccatgttggccagtctggtctggaactcctgacctcaagtgatctgcccacctcggcctcccaaattgctgggattacaggtgtgagcctccgtgcctggccagcccacttaatcttaaatgcagtctttcacttcatacaacacacaggagataggatgcagcaagttagaaaaattactcataccacctcccagatgtgcaaagaatttagagtgcattttccctatgcgtgctcatttagaagcacatctgctcctcttcacctcccaggtagcaggggaaaggctagatttaatcttgttacaatatttccatttcttctcattgatacaggcttgtttcagtgtaaacatttggtccatttgaagttcaacttcccactagtgctaatgaaaatctttacctggttgagtaaatgttttcaggtaaaatactctatctctcaaatttagtctcctcttcctcttccttgacctggtagaaagggcaggacttactatatccttgtgatgcctgtaggataaaagggttcctgagtggtatgttgtctcaggcctcctctggtctcagaggcaatgccccatgcctgcctgattactgtttgctctgctgctgttggggggtgaaatttgctgctgggatcattcgtggcttggtcagtgcccagtgggctgtcttcagtaaagtcactccctctgagcctatgccacaacccccaccaaaactctcccccgttggagccacacaagctcctgctgtcaagccctctcgctcttgccctctggggacccaaaaggcccctggtcctcaagtcagccacctctgtgtcttcctccatccaaaagacctgcaggagcttctgagcctggtgacacttgctggggaccaagaccatcctactccgccccagccacgctgcatgacctcatctcagcccaaaaacagacattgggaacatctgaccatccatcccgttcccccgctctttttggctacctgcagtgaccccagcagcaggggcgggagttgcctgccctcttccagcctggaagagcatctgtcctacgctcctccttccgggagtgactcccgcccgcatctcggggtgggaagggttcaggaaacacagaccagcttatcttaaggaagcctggtcgggaatctttcaaaaacacatctgttacaagggggaaagacacctccaggacaacagtgatttgcctcagcggggcaaaggccaggcctgacggaagagcccagccttcgccgagggccgcagggagccagagactcgagcctgcggttccagccccgccgcggttccggccccgccgcgatcccgaggcctgcgcatgctcggtgctgcgcggggctccctccttaccgcaggagctcctcatcgagaaacccaggtaagtcctgccccttcta

SEQ ID NO: 19465 - DNA, 2300 bp, Homo sapien
gtcaggatatcgagaccatcctggctaacatggtgaaaccctgtctctactaaaaacacaaaaaattagacgggcgtggtggcaggtgcctgtggtcccagctactcgggaggctgaggcaggagaatggcgtgaacccaggaggcagagcttgcagtgagccgagattgcgccactgcactccagcctgggtgacagagcaagactctgtctcaaaaaaaaaaaaaaaaaaaaaaaaaaaaaagagaagaaaagcaaaaaaaaaaaaaaaaaaaaaagcgcagacagattggaagagagcttcttgtaaaactggaggtagatttcagagcacaaccccccacagtgttcaggaggccctggcgtccctggcataatctgaggttagtttctgccctccacatccatctgaccttctgaaatgacaagatttcccagagaccacttgatttataatcagataatttatgttgggtacccagttttatgccttttaactttgttatatttggatgtgttaagtgatcttgactttttaaaaaaaataactaacatcactagtttgggcattaagtgagattaaataagtgtttcataaactgtaaagaataatacagacacagatgttgagaataaggagagtgaagcttgtgctcaaggaattatctttccgtttttttgtttttgtttttgagacagagtcttgctctgtcacccaggctggagtgcaatggcacgatctcagctttctgcaacctctgtctcccaggttcaagcaaccctcctgtctcagcctcccaagtagctgggactacagtcacacgccaccacgcccggctaatttttgtatttttagtagagatggggtttcaccatattggtcaggctggtctcaaactcctgacctcaggtgatccacccacctcggcctcccaaagtggtgggattacaggtgtgagccacagcgccctgcctatcttttcgttttatcccctggattccaaaactcatttaggtaaagagaagtgatgacttggctacagaggaaaaaggagggccgggaagggaagtgcaggctaggaaaagtgactaaaaacaaaagtagtagcaccagttacactattcatgcaaggaagctgaggagaattatcctgatggggctgataaaatcacctcaagatggctctaggccaccccaggttcttaagacaatggtcagctctttcttaagcagtccaagaccctctgacctgagatgtgactggatgattacagacctcttgtccagtgtttagagcctagctgtctgcatattttataaagatatctgccttccagagactggaagtgaaagagatccaatgactgggtgagtcaccctttctccacctagaacacagtccttgatggaactcatgctttatcaattgttgttgagtagaagaaacaaatacatcctccaatcttcacttggtggacctggcatcaaaaaataatcatattaagtgcgtttattagtacacttttctggcttatctgcctttccaagtttctatttgagttcttgcctttgaagggtttgcaggctgtgaaaagtaacttaactttttaacaactttctttgcttggccttgaggcagcttcagaagataagacgccaaaaggaactatgtgtgcctggagagaaaaaaaataatggtgaaaaacgtttatcagtagcctccgccagcaccaagcaacgcctcaattttactcaagcaatttcccaattcaagtaacattcatatgaatcagcaaataatatgtagcaaatttgaatctatatactttaaaaaaaaaaaaaaagcactggaaagaatcttaaaagtcattgaatccgttttatagcaaggccccgagactggaagggactgacagagctagaaatgaaacttgtttttccacctcgagaaaaacgaatcaacaaaaaataccctaagcaattgctggtatctgaagcccacttttttgaggctgttccctttgttacgttgcgctgaccctaggcactttcttcccagaatgcaccaagaatccgaaactccaaacaagtttgagatcagcgttggctggggggaggcagtgggggtgcatctacgggagcggttgggctgtaagctttcgctacatcacagaattgtgccagtgtttctctttggagtgcctcgccagctttaacaaccgtttggatatgacttgctcgggcaaaagttgtgcattggcccgatcaagcctgacttctagccaaggtgagttcacat

SEQ ID NO: 19466 - DNA, 2300 bp, Homo sapien
ctggaaagtttgttttcaagctataaaccctttccaattctcggttcccatctcggttgcctgagaatcgcagtcattagccaagtccacttggacgaaagcaaagctacctttgtgtacataatgagagccaccgcgtggccaaggagaaccacggggaagagggaaacatttttgtctcgagctggctaaagcgggcggggggggaggtagggttaaaccgaccgaaggcgtgttttgtggagtggcttcgaaagcggccgaggcagccgaagccgctttcgaagttagcaaacaaagcgtctccccagtaaccgcccggttccagacgaggctcctgccactcaggccgcggagtcgcagcgtcgcccagcccccggctcctcctccctgcgtctctcctccctccgctcccggctccccagcggataggagccaccaatcccagccacagacaacccttcaaacgaaatagcgaggcggccccctctaacgggcggcgggggcgctggccccctccctgcgccacatctgtcccgcaccgggcgcagcagctgattcatctgcagccaggtccgggaaggaactgtgctcccggcagttgcagggcagcgtccgggcgggtggcttgtccccaggaccgcgctccccccgagccgttttaggtgtgtgttctcttctgtcccgagcagtcagcaaaccacagaagaaaaaaatcgtaaggttgctgccttcttagagagacgctttttttccctgttgattcattttagtcctgtaattggaaaaaccacccaggctttttaaactctggcctccacgcattctaggggcgggggtgtctttttttttttttttttttttgagggagggtggcaggctagctctagttcctgaaacagacgctccgaagtcgagttagttatcccttggccgtcttagtactcctcgggtttaatcttatttccacagagtttcttctgccgggatctccaccgaggttaccgaacaaaaacagcacagagcccagactggaggcagacccgggcgctgtctctgctaggcttatttacgtttagggcttttctttcctttttttaaagtgatgggggaagtctcattgtgtggcatgtgacagttcgtttgcttcaaaacaacaggacgtaaccacgcgaaaactagaaccagaggagggggcatgcgtttcttcaagtcagccaaacagcatctggtctttgaaagcgcaatttcatcaagaaactcctgttggatccctcctaactgtggaccaaaataagccaacaggaacgggtgtttacttaatggctagtttctgtttgaaatgggaggagggatcccctagcagggttccaatccgaagagtagacactgttgaccgaaacagacgagcaggcacggcgtggtcaccccttagctataaaagtggccgctgccggggttcggcgactcggggtgtcaggcggagtcttggtgaggcaggcgcgcgcccggccgtccccgggcagagacgtttaaagagcatgtgagcgtgacaagtgtctgtccgcaacgtgtcagatttcgaaactgccttgcaatccagtccggaactcgcagctttagcccgggggaacagacgttcgtttaggctgtgtctcatcattcccccccgccccacccccgccgacctcccactgtcgctgctggaggaagagccccgggaggagaagggtgcgccgcgccgcgcccgcgtgtcaatggcagccgcgcattctggaagaagttggttcttgtctcgaatacttttcctcccgtgccccgccccttgaatcagaggcggctgtctcgtgcggctagagcagggccagtagagttcggggcagctgtcaaaaacgagacggggaggcttttcttcccgggggtggaggagggaaggagggaggtgtccttttttccatctgttgcagtttccgaaccaaacgcaccctcgccagccccgggaagaaaggcccaagggagaaacctggggcgctcggctggtgcccccaccgccgggcgagggatgcgggcggtccgtgcgcggcaggcggaaaggatcgtgtttctggacccggccaccccccgcgtccgcaccgccgcccccgagggacgagtgacagcggccgccgcgctcggtccagtcttcccggctggaaggtgcgggggaggggcggaggagcggcggggcgggagggggacggggcgggcggctgggggcggaggcaggacctcctgtaccttccctcctcgcctctctcact

SEQ ID NO: 19467 - DNA, 2300 bp, Homo sapien
tttagcccgggggaacagacgttcgtttaggctgtgtctcatcattcccccccgccccacccccgccgacctcccactgtcgctgctggaggaagagccccgggaggagaagggtgcgccgcgccgcgcccgcgtgtcaatggcagccgcgcattctggaagaagttggttcttgtctcgaatacttttcctcccgtgccccgccccttgaatcagaggcggctgtctcgtgcggctagagcagggccagtagagttcggggcagctgtcaaaaacgagacggggaggcttttcttcccgggggtggaggagggaaggagggaggtgtccttttttccatctgttgcagtttccgaaccaaacgcaccctcgccagccccgggaagaaaggcccaagggagaaacctggggcgctcggctggtgcccccaccgccgggcgagggatgcgggcggtccgtgcgcggcaggcggaaaggatcgtgtttctggacccggccaccccccgcgtccgcaccgccgcccccgagggacgagtgacagcggccgccgcgctcggtccagtcttcccggctggaaggtgcgggggaggggcggaggagcggcggggcgggagggggacggggcgggcggctgggggcggaggcaggacctcctgtaccttccctcctcgcctctctcactctgacagcgccgaggtgcgccgagcaggagcagggaacaaaggagcggagaggggaggggagagagttgggcgagggagagcccccggccggctgccagaagatcccggcgggaggaagcccaagtgtcacttgaattccacccaaggagcgggcgcctgggatcagagcgtcctgtttagcaataacggctggagcacgtcctacaagttacgggagagtcggctgtgaaggagacgttcgcttatcccctgtgtccccgctcctggcccctccagacccccgccttgcctcgcgctgggaggggagatccagaatgaaaggcaagaaaggtaaggcggccgcgggctgcgcgcaccagaagacgcgagtccggggaaacgtgctggccgggccgcgccgcgcggagtcacttggtggacttttccgcccaggggctctcatgctggagtggcggccgtgctctttgttgaggctgcgtctgaaacggcagcggctgttttcctgctagacacaacacgaggggctgttgtggggcgagcctctccacgctgctggcacgttgtcaagaaacacgctcagcgccttgtttgtgcgcctgcaagtttcattgtctccgccgacaccccacgctcggcccagccgccgcgtggcttctcgctctttctcgcgtgctggggatatggggtccgagtagggaggacccagcccctcgtttttcccgatccggacccaggcggccggggccgcgggaccgccgcggctttgtctgaaagttccactcctaggctccccccgcccccgcccccgccgcccccctactcccagccgggccctagcactgttctttagggatgtggtgtttttacgatcgaaggaatgcgattctggaccccctcatcgccctcgggtgtaaacagctttggaaagctagacttttacaaatccccagtctctaaaagttttcccacgatgaattttggggcaggaggaagagttagcacccagggccagcagcttcaagcggcatgcagtcaaaatgcgtccaaatgtgacaagcaggcttggttgtaagtgcaaagagcaaggctgtcattgtttccacgaagtgttctggaagctttacaactaaaacttgccgtcagtttggtttaaaaacaaaatacaccggagggggacggggggtggagaaaccacacaaaacaccccgaaaggtcagagtgtgaagtcccttttgaagttaacaaaaattgagtccctggctgggaggtcccccgagtgttccgctgtgggctggaggtggcgtttctgtcgtgatttatgtggagtggttcaaaacagaagttaatcactcgggaagcggacgggaggggcggcgctactgcgcatgcccgggagccgcctggagtttggaactccacattctttcagacccggcccgctgcggggcgttcctggggggtagcctcaaggccagcggggttccttcggctgcgtttctgtgggaggccctgaaacgcgcggagcttccctctgcctccaggctttcccagcgagagtgaaattaaacttgaaactcggatcaactggcagtcgttgttggtagaacgccctaagga

SEQ ID NO: 19468 - DNA, 2300 bp, Homo sapien
tgtgggaggccctgaaacgcgcggagcttccctctgcctccaggctttcccagcgagagtgaaattaaacttgaaactcggatcaactggcagtcgttgttggtagaacgccctaaggacccctccccgcgggacggagggaggactcgggacagggaattggccctgggagaaaacgcgcggggggcgtccgagacgccccgtgaaagccgtgccgacccttgggaggactgacaggtctagagacacgcgctgtctgttgtggtgggcctcccgggaataagtgaggggctctgtgtttcgaggatggttctagcgcagagccgggtgtctgccggggtgggctccccgcattgttcgggctccggcgggggcggctctgattcctttccatggcccgcctcccaccccgggaatccccagtgctccttttccacggcttttctggcgtccccccgactctcccgcggcactttggcctaccttcccccagcgccgtggtcctccctggcgaccccctctgcgctcctggggtcctcctgcgccccccctcctccaccggcgcgctgcccacagccgcgtgccctctccccggagctggggaccaaggctgggccccgccggccgcatcggtgggaacttccgcggtccccatcccagggcgcacagggtccagctcctcggcgccgactcctggaaacaatgaaaggtgacgggctgaaggggaaactttgcgactggttcagggctctttgggggagccgaggctgccgaggttacccgggtttctttccccttttaggtttccctggcgagtcgtctggggtgggcaggcctctgagaaggtgggattcacggcctcatttctagtttcttgggtcctggagttcctttgcttgtgctaactcgtgcagtgtgcgggccggcctgtttcacttgaggccgaggaactctcaagaacaaaagctacttgcttttcctccttgggcccctccctctccccgtgctcctccgccgtcctcctctaaaactacctgggaggggggagccttccccgtcggctctggaaagactcctgaggaagtcgggccctccttactgtcttgtcttataaaagtctgcaaatcttttcaagttttcttaaaacaagtgcactttcagctccattcctgagcccggggtaagcttggtttgtgataatagtgtgtcctcccagaaagctgagagtgacgccaaaagatctcctaaaatgacttaaaaacaatgagaaggatcgataaggaaaatccactaagtctttttgctcccagtttttaactgttgaattcctgctttgggattgctctttggctggggtagccaaccataccttggatttggtggcttgagtgttcaatgcctgttgcttctcccaaggagatactgattttttttttcttttgttcctggagaccgggtctggctatgttgcccaggctggtctcgaactcctgggctcaagaaatcctctcgccttggcctcccaaagttctgggattacaggcaagagacattgctcccagctcaaaggagaacttctggtcaggaaacttgttgagttaaatttgctttttcctaattgtgcatctcgacttttcccatcaatcttatttctagagtctcttcacaaccggtgtctccctgcctccctgtctcatgatgttaccgagctattcagaaaagaaagtgcagggctgggcgcggtggttcacgcctgtaatcccagcactttgggaggcctaggcgagcagatcatctgaggtcgggagttcgagaccagcctgaccaacatggagaaaccccgtctctcctaaaaacacaaaattagccgggcgtggtggcttttgcctgtaatcccagctattcgggaggctgaggcaagagaatcgcttgaaccctggaggcggaggctgcggtgagccgaggttgcggcattgcactccagcctgggtgacaagagcgaaactctgtctcaaaaaaaaaaaaaaaaaaaaaagaacgtgcaggaacaaggtcgctgcttagggcggtgggatcctcaggccatgttgtggctttctccacaacatttccttgtatgtggatagcgtgaaagaagcttgtgatcctgcccccaccctccccaccgccacattttttaaagtgtaagcaaagcaagacgtttggaaacaagtcttaaccgggaaacttttcaaaagcgctgttacaataggaaatgagtaaggaggaaaaaagtctttgtttttccaagctgagccaca

SEQ ID NO: 19469 - DNA, 2300 bp, Homo sapien
tcaatcttatttctagagtctcttcacaaccggtgtctccctgcctccctgtctcatgatgttaccgagctattcagaaaagaaagtgcagggctgggcgcggtggttcacgcctgtaatcccagcactttgggaggcctaggcgagcagatcatctgaggtcgggagttcgagaccagcctgaccaacatggagaaaccccgtctctcctaaaaacacaaaattagccgggcgtggtggcttttgcctgtaatcccagctattcgggaggctgaggcaagagaatcgcttgaaccctggaggcggaggctgcggtgagccgaggttgcggcattgcactccagcctgggtgacaagagcgaaactctgtctcaaaaaaaaaaaaaaaaaaaaaagaacgtgcaggaacaaggtcgctgcttagggcggtgggatcctcaggccatgttgtggctttctccacaacatttccttgtatgtggatagcgtgaaagaagcttgtgatcctgcccccaccctccccaccgccacattttttaaagtgtaagcaaagcaagacgtttggaaacaagtcttaaccgggaaacttttcaaaagcgctgttacaataggaaatgagtaaggaggaaaaaagtctttgtttttccaagctgagccacaactaggagggagagttttaatgaaaacagtcctgacagcagcaaacgtggttttactgcagtgaaatatcagctggcgtagccaaggcactgaagtcttaacttcctgttacttcagcttttgtgcacatattggaaatatttgttaagagttccagaggtctggcattcatttatttaaatgaactgagaacagagtaaagtcgcgctgcagtttggtgttgcttaactgaaacctgcttttgtgtgtcactaacctattctgaaagatcaggcttcttgtcaaactaggcaagcagatcaaagggcagccttcaggggctttttttgtttcaaactctttgtgattaccaacttacagttgggaattcactgttcaatgagcaaattttcacactttttctagattaaaaaaaggaaggagataatagccttgagaagaatgtctggcttttcagacgttggagagtttaaacaaattgctttattcaaatttgctttagtcatttaattaacttaacactttttttaaaagttcgatttctttaattattaaagccaatgtgagacaggaactcagctataatttctttaagctattttattaatagttcttcacccaaatttcaatataggttttgaaagtctcatcttgccaatagtgaaagtagtttcagttttaaatgggcacttttaaaaacctttttaaaaacttaaatcatcaggggaggggaatttcaaatacatggcagttaaaacttaggattcttgtgcagtttatttgtagctgtttgttaagctgtgagctaaagtgaatttgcaagatcatccacctctttgttagaactttactttgtctttggagagttctgccttttgtaggaataccctgcagcaccttctgccccctgcagtccaaaactaaaaatgtgtcaccaagtcagagtcattaaaagggtgggaaaaattcctttaaaaaacacggtgtttagcttaagaggaatattccgtgtttatttcctgtcaaggggaactggctcaattaaggtcaagtcatattttcaaccaaaattacatactacagaggaaagaaagcatacaaagctaaaaatgcttacctttacatttttgttattttaattacttcccctaatatagaagtactgatttttttcaagcatgccattgtttgtaattcatttctgtttttaagattctagattgtctacaagcaaaagaatgtatttctttagtcattcggagtagcctgctgtagtttttgaaaggtggaattaatagcgtttgttatttaattttttttaagttcagaatgatgtttaaatatctgtaaaggccagttctggagctttattgaaccccgtccatctgtgatttaaatattctctatggcttgtgaattcttaaaatttctggcaggattaaagtacttacagccaaaagagcttcctctggggcttgcatattcagtttcctttgtcatgtaatcatttaagactgaactctgcttattgatatgtagtattctattctaggttgagctcaaactggtagctgaaatttaggagacatttttaattcatttagtattaggcatcttttgaccttactaaagtaccagta

SEQ ID NO: 19470 - DNA, 2300 bp, Homo sapien
ggctcaactagatgacaaggtttctttcaaattggatggttatgataatgagtgaaatttagacaagaatttgcaaactagggagggtcccacagagaatgatgctgaagagctgaagaaagaagccaaaaaaggaggccagagaaagagctccaacgaggctgtctggtagcaatgatgaatgttctgccatcttgggaaagcagctggcactgatgaggacaaaataactaatagacaagtttgctgctgctgcttccagccaagcagaccccatagttgtgcacttaacagtgcatcatagggctcctgctccttgcggtgatgtgttatgctggccggactttccaacaaatgccagacaaatcagcggtctggctggagtcctccaccggcaaaaatgcgcaaaccctggcaacaacaaagatgatgagatgagattcagtccagacccgtgacatgccattagatcttcctaatcaccagagagcaaatccttactctgtgtactggacactgtgctaagaacttaatagacatgggggctgggtgtggtggctcacacctgtaatcccagcactttgggaggctgaagcataaggatcgctttagcccaggtgttggagaccagcctgggcaacagagtgagacctcgtctcaaaaaaacccaaacaacaacaactagctggtcatggtggtgcacgcctgaagtctcagctactcggtaggctgaggtgggaggatcacttgagcttgggaggtggaggccgcaatgagccatgactgtgccactgcactccagcctaggtgacagagcaagaccctgcctcaaaaaaaaaaaaaaaaaaaaaaaagaaaaagaaagaaagaaaaagaaaaagaaaaagaaaaagaaaaaaaagaaagaaaagaaaagaaaaagaagaaaatagacatgatctcacatatgtgaaagatcccactatccccatttaactgatgaaaatattaaggctcagagcaggcaacggacatccctaactcatctagagattcagtgacagagttagagtactcagggctccaactcccatctgaccattaactcaaaccacctttgtttatctcccccgccccccgccagtaaacactctctagtaaacaccttgtccactaaagcaccgtggtttccacgagggactccttcgtgcacagccatcctcactctgcaggaactcttaagtttcagtgaatgaatgaatttggagtggtcaacaaggggtgcacagttgcaacttttaaaatattgcagaaggagagaaatgccacaaaacaaaatgcacatggaaaaatcactaccttatttcaaaatatttacagcttcacatttaaggccacccaaagcgtggcggtcagtggtgagaaggcagagatcagaggctgttggggtgggtcatacaccatgattcccggcccccctctgggagatacaaggtatcccacagtcttctctcccagttacatcctccacggaaaccacaagatgactcgctcaactttttctaaagtagaaaaaaatatgcttgtgtgtgtgtgtaaggggaggagaggggatgtgaatgaaatggagggtagtgtaataattcctgtagtcataagacacgccagttggtagttgctagtattccagacacttcctaacgccagacaaatgccccaagcctcggcatgtctggcctagagatctattcaactgatagcagccgcctcttctggggagagcagatctttcagaaagcactggctgcgctgctaatcaaacgcaacattgttctcagcaaggaggaagaatggaaaggtttgtttcagagtcacaactttattttttttaaaaggcacccaagttgtttcaacaagctgctacaaaacttgggcttcctgagtggaggctgttttgcacagtgcatgtactgtacaaaaatccaggcagggaggggtcagagagttcgtcattaaagaaaaaaaaaaaaaaaagccccaggcacttgatgcctggaaatgatgtcagacgcagccactcctctgttagaactacagccaaacaatgcgcaggcaatccacagcagctgcccctgcaaatgtcagcgccagcccagtcaaaagagcttgaaacctaccaagccggaggactgtgctgtgcctctctcgcccacattttccccaagcactctcaggaacctggcaacaggtaacgtggcaacctttgacttataaaagggcaagtggcacaatctcagggaacaaatggacttttttttaaa

SEQ ID NO: 19471 - DNA, 2300 bp, Homo sapien
atagatatatagatagatatagatatatatagatatatagatagatatatagatatatatagatatatagatagatatatagatatagatatatagatatatagatatagatagatatatagatatatagatatagagataaagatatagatagatatatagatatatagatatatagatagatatatagatatatatattttttgagacagagtctcaccctgtggctcaggctagagtgcagtgatgtgatctcagctcactgcaacctccacttcccgggctaaagcaattctcccacctcagccacccaagtagctgggattacaggcacctgccaccatgccagctatcttttgtatttttagtagagatggggtttcaccatgttgatcaggctggtctcgaactcctgacctcaagcaatccacccgcctcggcctcccaaaatgctgggtttacaggtgtgagccactgcgcctggcccagaatggagtaatctgatgtggtcttacagataaacacttcacatatgcaagggtgtgtgtgtgtgtgtgtgtgtgttttaactcatcttttccattctcttcccaacccctcctttcccatctgctaccctcaggctacagttcgacttcacagatagaaaaataaaacctacggctgggcatggtggttcacgcctataatcccagcactttgggaggccgaggtgggccaatcgtttgaggtcgggaatttgagaccagcctgaccaacatggtgaaaccctgtctctaccaaaaatacaaataaattagccggtcatggtggcctgccccagtaatcccagctacttgggaggctgaggcaggagaatcgcttgaaccaaggaagcggaggttgcagcaagcccagatcacgccactgcactccagcctgggtgacagagcgagactccatctcggaaaaaaaaaaaaattagctgggcgtggtggcgagtacctgtaatcccagctactcaggaggctgaggcaggcgaatcgcttgaacccgggaagcggagattgcagtgagtggagatcgggccactgcactccagcctgggctacagtgcgagactccttctcaaatgaatgaataaataaataaataaaacatatgatttaccttggcccactataattttgcactacagggtggcagctccgtgctatgtacaagccgggtgccgcgcagctttgatgctgcccaggacactgacctaaaagtgtgtctgcaagtactctcacccttcattcattcaagctttgcctagtacacactttttggaaaccatttcccaaaatgcatgcttttataccacatttcccacccaccagataaccgagacagtgcacgtaacacagtttgaattaaagaataatcttgttttggccgggcgcggtggctcacgcctgtcatcccagcaatttgggaggccgaggcgggcggatcacgaggtcaggagatcgagaccatcctggctaagacagtgaaaccccgtctctgctaaaaatacaaaaaattagccgggcgtggtggcgggcgcctgtagtcccagctactcgggaggctgaggcaggagaatggcgtgaacccgggaggcggagcttgcagggagccgagatcgcgccaccgcactccagcctgggcgacagagcgagactccgtccaaaaaaaaaaaaaaaaaaaaaaacaaagaaacttgtgttggtagacaaataaattcatgaactgcagatataaatagatcgagcactagatatgtttattatctccagcacagcactgcctcctggtgcggattatattccagttttcaaaaggaaccatagaagatacaagcaatacgattttattttggagggatttctagcatcataggtcaaagacgttattaagtatcgactctgaaaaagcaactataaatactgcaaatcgactaagccagaggacgcaaatatatcctgcgtgttgtgtgctggactgtggttgagacttcatggtcgtgctctgggctcatgggggcagctgactgctcataattaagattgctgttgccgctgcctgtgttccaaagagaacacaagaggacagagctaaggtgtaggaatgcggaagaacttgcagaaactagagctagtcttcggattgaaatgaattaccaataaagggttgggaaatggatcaaggagagggaagcgttttgatggtccctgctccgaggttcagcccatttgcagttgctgataaccttgtcaggtcaccagataaaggca

SEQ ID NO: 19472 - DNA, 2300 bp, Homo sapien
tttgagaccagcctgaccaacatggtgaaaccctgtctctaccaaaaatacaaataaattagccggtcatggtggcctgccccagtaatcccagctacttgggaggctgaggcaggagaatcgcttgaaccaaggaagcggaggttgcagcaagcccagatcacgccactgcactccagcctgggtgacagagcgagactccatctcggaaaaaaaaaaaaattagctgggcgtggtggcgagtacctgtaatcccagctactcaggaggctgaggcaggcgaatcgcttgaacccgggaagcggagattgcagtgagtggagatcgggccactgcactccagcctgggctacagtgcgagactccttctcaaatgaatgaataaataaataaataaaacatatgatttaccttggcccactataattttgcactacagggtggcagctccgtgctatgtacaagccgggtgccgcgcagctttgatgctgcccaggacactgacctaaaagtgtgtctgcaagtactctcacccttcattcattcaagctttgcctagtacacactttttggaaaccatttcccaaaatgcatgcttttataccacatttcccacccaccagataaccgagacagtgcacgtaacacagtttgaattaaagaataatcttgttttggccgggcgcggtggctcacgcctgtcatcccagcaatttgggaggccgaggcgggcggatcacgaggtcaggagatcgagaccatcctggctaagacagtgaaaccccgtctctgctaaaaatacaaaaaattagccgggcgtggtggcgggcgcctgtagtcccagctactcgggaggctgaggcaggagaatggcgtgaacccgggaggcggagcttgcagggagccgagatcgcgccaccgcactccagcctgggcgacagagcgagactccgtccaaaaaaaaaaaaaaaaaaaaaaacaaagaaacttgtgttggtagacaaataaattcatgaactgcagatataaatagatcgagcactagatatgtttattatctccagcacagcactgcctcctggtgcggattatattccagttttcaaaaggaaccatagaagatacaagcaatacgattttattttggagggatttctagcatcataggtcaaagacgttattaagtatcgactctgaaaaagcaactataaatactgcaaatcgactaagccagaggacgcaaatatatcctgcgtgttgtgtgctggactgtggttgagacttcatggtcgtgctctgggctcatgggggcagctgactgctcataattaagattgctgttgccgctgcctgtgttccaaagagaacacaagaggacagagctaaggtgtaggaatgcggaagaacttgcagaaactagagctagtcttcggattgaaatgaattaccaataaagggttgggaaatggatcaaggagagggaagcgttttgatggtccctgctccgaggttcagcccatttgcagttgctgataaccttgtcaggtcaccagataaaggcaagtcttgtcaccctcaggcacctggctgcgaagtaataaaacggttgccttatcatctaaaggtggagtgagtcaaacctcagcccagggtaattatagtaaactgaaattgcctgtcctttacaaaaaaaaaggcggagggagagagaaaggaaaagggcttaaggcaggaaattgtgtttgtctttctccttggatttaaaaaagaaacgagcaaaacagcaaaaagttttccagggagtgagaaaagcagcccggctagactcccctcaccctgggttaacaggattgccgacagatcaggcccacgtgatggtcaagaaaagaggctcaagctgatgaaaatccaagaaatcttcttaggagccttcctttctaaatgtaaatgactgagtcattgctttgctaaggagggaaggaagttacaatcacaccaagtgactcattcattgctgttagctccggcagttggatgaaaagttttagcaaaagcagcaacaaatgtactttaaatactagcacagtaagggaattcctgtctttcaggatgaatgccatccacacaaaagagctcctgttgacatctcatttacaatctcccccaggacacagacaagaccctttcaataaatccagctcagaaacacctattgttcaaaatcttcaactcgccacaggctaccaccactccctatggctttgcaaaattaaagatttagaagaaggatggggcggtgg

SEQ ID NO: 19473 - DNA, 2300 bp, Homo sapien
agaggacgcaaatatatcctgcgtgttgtgtgctggactgtggttgagacttcatggtcgtgctctgggctcatgggggcagctgactgctcataattaagattgctgttgccgctgcctgtgttccaaagagaacacaagaggacagagctaaggtgtaggaatgcggaagaacttgcagaaactagagctagtcttcggattgaaatgaattaccaataaagggttgggaaatggatcaaggagagggaagcgttttgatggtccctgctccgaggttcagcccatttgcagttgctgataaccttgtcaggtcaccagataaaggcaagtcttgtcaccctcaggcacctggctgcgaagtaataaaacggttgccttatcatctaaaggtggagtgagtcaaacctcagcccagggtaattatagtaaactgaaattgcctgtcctttacaaaaaaaaaggcggagggagagagaaaggaaaagggcttaaggcaggaaattgtgtttgtctttctccttggatttaaaaaagaaacgagcaaaacagcaaaaagttttccagggagtgagaaaagcagcccggctagactcccctcaccctgggttaacaggattgccgacagatcaggcccacgtgatggtcaagaaaagaggctcaagctgatgaaaatccaagaaatcttcttaggagccttcctttctaaatgtaaatgactgagtcattgctttgctaaggagggaaggaagttacaatcacaccaagtgactcattcattgctgttagctccggcagttggatgaaaagttttagcaaaagcagcaacaaatgtactttaaatactagcacagtaagggaattcctgtctttcaggatgaatgccatccacacaaaagagctcctgttgacatctcatttacaatctcccccaggacacagacaagaccctttcaataaatccagctcagaaacacctattgttcaaaatcttcaactcgccacaggctaccaccactccctatggctttgcaaaattaaagatttagaagaaggatggggcggtggaagctatgaaaagaggcaggaaaaaagttcctttgacccgatgctgtcagagagcgtgcatgaagaagaaagttaatggtatttccatttatataagaagcgcctaagaaatgcctgtgacgttcgtgaactagtgattgtgaattccaaatttgatgccaactttatgtgtaaagaagctaactcctgccaacatcgtggctgaatgaacagctgggactatgcttaacccattcccagcttataaaagccccatggcagctgcagtgaagcatcaggtgagtctgatatgggctgtctgttccctcggggatttgaatcttgcctgtcctttccaagtggagtcttgtgcctaagtgctagagcccactccttcctccccactgattcccttctttccatttctgccatttcccttcttcttttaataaaacttggacattttctggagttacatgtttttcttgggatgtacttcaaattaaggagcatatttatgtttacaaacacacgcacacgcacacacacacacacatacacacaaaagaatcgggcatttctcaagtggtgatacctttaccctccttatttttcacttaaggttccccatctcagtacacgatccctttatctgccccgagttcaagccaaaactcagcattatctgtaagcactcctttgggtccttctctccagtctcttaaatccctgtggagtcattccacatccttctgtgcatctttctgcttccctagatcctacagttttaatgttatcttctggagtatcacagcaacttccttaactcaaggtttctccaactctgagttgtcacttagtgggtagtgaaataagatgagtcatgcagtttcaccatttagaaaatgcaaaatgttaggtagaaaatgtcagcgtacatcctgtgtagaaaaagtaagtcttgttgtgaaacctctttcagtttgtgtgtgcgtgtccccggatctgtgtacatactgggcaacagggaaaatgcattttgtaggtcaaaatatttggagaaatacgtttctacttagtctcactgggtctgtcttttctgtttccaaactattgtgtacacttagaggaagagtggaaaccctccagcaggtcctgtcagtctgcagtttacaaatctcccctcaggataagagttcctattcacccttttcaggtctcagaattctgcctcctcctgaccacttttcctt

SEQ ID NO: 19474 - DNA, 2300 bp, Homo sapien
caatgtgccgctgcactctagcctggcgatagagcaagactctgcctaaaaaacaaaaacaaacaaacaaacaaaaagttgaaacttcattctcagtttactactggtggtaaatccatcagcatctgtttattaaaggatttaccacagtctaccttgacacgctgagcacatggctttgctctaaaaatagaaagattcagctgggcaaggtggctcatgcctgtaattccagcactttgggaggccaaggcggtcagatcacttgaggccaggagtttgagaccagcctggccaacaaggcgaacccccgtctccactaaaaatacaaaaattaagccgggtgcagtggttcacgcctgtaatcccagcactttgggaggccgagtgcagtggctcacgcctgtaatcccagcactttgggaggccgaggtgggtggatctcttgaggtcaggagttcgagaccagcctggctaacatggtgaaaccctgtctctactataaatacaaaatagccgggcgtggtggcgggcacctgtaatcccagctactcgggaggctgaggcaggagaatcacttgagcccaggaggcggaggttgcagcgagccgagatcacgccactgcgctccagcctgggagacagagcaagactgtctcaaacacaacaacaacaacaacaacaacaaaaaacaaaaagcaaaagttagccgggcgtggtggcgcgcgcctgtagttccagctactcagggggctgaggcacgagaattgcttgaacctgggaggtggaggttgctgtgagccgagatcacaacactgcactccagcctgggcgacagagcgagactctgtatcaaaaaaaaaaaaaaaaagaaaagaaagaaagacacaatgacaaaggcagagttcacctacagagggaatgacatcaatacattaggaatatttttaatacattaaatccctttggggtgtttttggacacctggcttgtcatactatgaacaacagaatttccttaaaaagtttttattttagagacagggtctcgctctgttgaccaggctggagtgcagtggcgcagtcatagctcactgtagcctcaaactcttgagctcaactggtcctgccacttcagactcccaagtagctaggactacaggtgtatgccaccacaaccagctaacttttacaaaatattttttgtagagatgagggggactcgctctgtggctcacggccgtcttgaactttgaatacctggcctcaagctattttcctgcctcgccctcccagagtgctgggattacaggtgtgaaccaccgcacccagccctcatttatttgatttcttcagagaggctcatctgttcctatatttagaaatgtggaacttttccaaagaagacaaccttcatttttttcatacgggctttcaaaagaatgtgatgtccttttggtgttttagattctcacctatgaggtataaacaaatcgccttgcagacaagtctcaacacagaacacatgctgcttatcactggcaaagacttgcatcagcctgccaccacggctggctcatcttgtccctccaggcctgtgcctgctggaacactcccactccccatgtctgaatacaccacttcggttggaccaagagtttccagctcgggtggcccctccttccctggaaataaatagctgcctatagaatatcagagtcattctgactcaggggtgactcagctcttccatgacctgtgttcccacttctccttgataaggccaatgttttggccctactggtgaaaatatgtagacctaacatctatctccctgctccagtttcaagagaaaagaccttattcagagaaatatttagaagactcttgtggaattcttgctgtgagtggtttttccttccctgccattggtgcgactgtttcccccttccgtcaaattgctgtctagatgtttctctctgaccccaattttctcggagtttgggattatcaatctaaaatcagaggtgagaattcatcagtgttatcgataagactttgcaattatttctttcaaactgaactttttccctattcacttatttttcctcattgcaaaataatcaaagcattgatgagtgtttctgtttaaattcaaaggacattccacctttaaccttagcattcatgagacacaaaatgggtttttctttttgctgatttaaaaagctgctatgaagctgcacagtgcggaagagggcacccctgctccagaaaagaagaaacaaaactgcctgccat

SEQ ID NO: 19475 - DNA, 2300 bp, Homo sapien
tacaagagaatttttattttgttttacctttttcttccaattatcaatattactgagaatactaattctaattctataacttctaattaaacttatggaagaagataactagtctaagttatctctaatatatgacaaactgtcaaagtttaattagcttttatccctagaatattctgtggtttcaaaagggtacataatattattacacttgacattggttaaccagtttcatgctgtagagatgtatgtctgacaagaagtatcagatctaatcaagacggaagttcatcctgaatttctggataagactgccatcctgtctctcttcaaatccaaccttaaatgtctttttcacctaactttcttattccattacatatttgtcccataatgaaattttaaaatttatgaaaattggtgagtccatctcatccactatgttgcttttgaaaacctttctcttttctaaaatgttgattatggccagagaatcacaatgatactttgatgtttgcttttatcattttcaagaaacttctttcaattgtcttttatttttatcttgttaattagaaacaattatagatttataggaaattacaaagatagtacatagaggtccctgtacccctcacacagtttccccaacagttacatctcaacaatatcaaaaccaagacattgacattgttacaatgtgcatgaatagttctttctttcttttttttttttttttttttttgagacagagtcttgctctgtcgcccaggctggagtgcagtggcgcgctctcagctcactgcaagctctgcctcccaggttcatgccattctcctgcctcagcctcctagtagctgggattacaggtgcccgccaccacacccggctaattttttgtatttttagtagagacagggttttgctgtatcaggtcttgatctcctgacctcgtgatccgcccaccccggcctcccaaagtgctgggattacaggtgcgagccaccgcacctggccaaatagtccataattttatcacgtgtagatttctgtatccaccactataatcaagatgtagaaccattccatcaccacaaagatctcctagtatccacattttgccagttggatgaagtatagaaaccttacctcccttcaagtctctttgccctctccaacttaaaattatcttaaatatttcctacacatacatgaagagttacatcacacaatgttatactttctgcttcaaatgtcaaatataatttagaaacttttagagaaggaaagtctattggatttgcttgtatttttttcccaaattgccaaatttgagaaattttcagccattatttctttttttttttttttttttcagacaaagtctcactctcgtcccccaggctggagtgcagtggcgcaatctcggctcactgcaacctccacctcccgggttcaagagattctcctgcctcagcctcctgagtagctgggattacaggcacctgccaccacacccagctaatttttgtatttttactagagacagggtttcaccatgttggccaggctggtctcgaactcctgacctcaggcgatccacccgcctcgaccccccaaagtgctgggattacaggcgtgagccaccgtgcctggccattttcagtcattatttctgtggctactttttcatcctcctccttctgagattccagtgacacaaatggccacaattctgtcagtgggggttttgggcaaggcggtttccttagaggtggatagttgggcaggcactgtttcatctccatcatataacatcatctgcttgttgaatacaaaaaatatttcttccacgcatcctagaaatgcccccatcaaacatgacccaactttcacatggacagtcacaaaggggaggccagtcaaagttacactgagccactgtacccagcacacagtgcctcttattgatataagaccactcctggctaatttttgtatttttaatagagacggggtttcaccatcttggccaggctggtctcgagctcctgacctcgtgatccgcccacctcagcctcccaaagtgctgggattataggcatgagccgctgcaccgggccttttctggttttattaatggtgcatttgctatatccctttaaataaaaagaatgttgacataaatccaggttaaactgacacaaattaaagcaactttctttttatttaaaaattggtaacctgaaacatgaagagctgttctcgttctcagaaaaagagaacgagaaactcacaat

SEQ ID NO: 19476 - DNA, 2300 bp, Homo sapien
caccggcacaggtggttcttgagatacgtctgcagccttctagtcttcaagagcatcccacatttggggtcatcctttctcttccccaacctctccctatctgccttgtgtagaatgtgttatataaaactcattcatataattataaacatatgacaacgttcttttggcaaattaataattttataacatctctttttttcagaaacaggatttattttcttaggccaatgctatcctgataccaaaacaagaaaaagatattacaagaaaagaaatttactgacctagcttccttataaaatagacatgcaagccctttaacaaattgaatacatcaatatatttaaaagatcatatatcatgagcaagcaaatgttatcttagggatgtaaagttaatttaacattcacaaatcaatgtaatgcatcatgttaaaataaattttattgtgatattatttacccatttaaagtagacaatttaatgggtttaatgtgttcacaattgtgcaaccatcaccaagatctaagataaaaatattttcttcactccaataaggaatcctgtacctgttagcaatcacttcctggtccccctaccccaggtccagggcaaccactagtctacttttctgtccctatagattctgccttttctggacatttcatataaatagaatattgtaatatgtgatcttttgagactggcctctttcaattatcatactatttttaagatttatccatgttatagcaggtatcaatatttcatttcttttcattccaaataatgttttattgtatggatatactacacttttaatcctttcatcagttagtggatacaagggttgtttccactttttgactattgtgaataatggtgctgtgaacatttgtgtacaagtgtttgtgtggacatttgctttcatttctcctggtatatgcctaaaagcgtgattgctgggtcatatggtgacactatacttaacactttgaaacaaaccaatcatttaattataattttccttatcatttcttattaaatgcacctgtgcttttattaattcagtagaggaaagttttagggtttggttttgtatggtgacgaagaaaggaaaggtgtaagtctttgctctactgaaattgtattgtccttgtctattgataacctaaaagtgatcttgctgatgtggttgcagattgcactcagtaaagctggattttagtaaatgctgcccacttaaaacttataaagtgaaatacttggaagaggacgctgcaacagttcctttgccccatcccgaaatgagacacacacacacacacacacacacacacacacacacaccacactttcaataagattttctgggatgtttctctatggaagtcaattttttaaaaaatgaaaagtgtttgccaagaggtttctacaacacgtttaattcttttgaagaaaatgaatgaattgttgagaagtattacttaatttttctctaaaagagaatttgatatctcaaggatggaaatctattgttattttactccttaaaatctctctgtttgttagctgactgaatgttctatccaatttgtgcatgtgcacacttcaacattgtaaaaggcatctgtctttccatcactagtcagacaatcaggcatgcttcttttagcaagctgcaaggatcgttccctgatggggacttccatttgacagaatatacgttaccccctatatgggctgcaaagtgatcaatagcccagaatttactgagataatgaaagatagcaatatgattttgctgggacagtgagcatgccagactctgtaagtacaactgctatgcaaaattgcacaggctgaaaaatctgcactaagtattcacttaagtgttattcttcagctatagggttttatttcattaagtatctttatatgaatgaaaatgtaaagttgcaaatcttgagttgtgagccatgaccaaccactctccccccacccccaagtcctgtgtttactgcctcactcaaccacttagaatcggcaaatcatagagagaagctaaatgctctcagctgcactataccaaatcaaagctgagatgaataatgaacttaattttccataaagacattctgtttggcattccagctaataaggtaagctaatagcaattctgggctatggaaaggaaaataaatcgtttctttgtgcttgatttctgtgctaatctatcatctttcttttaacatactggagttaatttcatgtttcatgatgtctgtgaactgggg

SEQ ID NO: 19477 - DNA, 2300 bp, Homo sapien
aatttacttctaagaatgagcctatagatgaaattattcccttggagctagctggcacgggctaaccctatcttcctcagcagagcttgcacggggtggcagatcctcttttcatttcctagaagcaagaagggagccagaagcccagttctcaggaggtattttctattctcctctgaccccatatgaatatatggctctttcttccctttctttacagcatctcttcagcctcagcacaggggttgggaggtctacactgttttacatttaattctcttactaacatactacctcccaacattgaaatatagattttttcccctagtttgaaagtcttgcataaatagaagcttaatacattcaatatctattaataaggattaacttggagtttagtttaaaaggttgaactagcttggttaattatttcccaatgtaggacagaatatgttaaactgttttcaacctttcaataatttcagaattgaaaacaaaggtgctttggtgtcaaagacagatgagctattactctggggaagaagggaagtaaagggattaatatgagtgtgtctgtgatccattgtaatgaatgttttagttctgtatgacgggtgatgtatacatgggtgttttattttttttctttatacctttctgtaagcctcaaacgtttcattacaaaaatgacttaaagaaggcaaatagtttgaaaatagaatttccaaatctttatagtaggagatccaataatgctactactaaatcccatacttaagcctttaagatttcattctcattttactgaaaaactttaataataatatgcttattttaaagatttttattttcttcttgctcaccatttttgatgcccttgatttcaggtctgtgctagggcatattagaaagagcttggttttggcatcaaacatacttgagcctaaatctcagttgtacaacctccagattgtggggctttaaatgacttgatatttctaagtgtcagtttcttctcttataaaaatagaatattattacattcagtaatcttgggattatcacaaagattaaatgaaataagaaatgggaacacatttgctatagcatctggtatatagtagattttcaattaatatcactttccttatctttccacttttcaccactacctgagatcgcaactccaaaaaggtataaaaaagaaagaaaaatgaacctaaggaaggaagaatgtaggcatataggcagatataacgaaaacatttcattactaacaaaggcttatgctagatccatacacagcatcctttactctgatacttctcatctaatctcatcattacttacttaagtacaggtgtttttgtttttgtttttgtttcctttcagtttgttttgtttttgccactggtcatagaaccttcgcagacaaaatgtgtggtactctagggcttttatctctttactccttactttttgtaagacagatatccttatcgaaatactttactttcagtggtgggtgaagctttatgttcttaaagagtttctagagctttcggttgcaactttcattaatggccatttctctaagttaagagactgggttctagtcccacctctgccacatgctaacggtttaacccactaagtatttacctttctttgtgtctactttttcatatgctaagtggattaaatgattctttgagctctgaaattgttatagttcttgataacttattaacatgtagcaaccttacaggaaattaggcaacaccagcttcagtgggaagtactgaccacataattgtgtgtcgtgtatgaaaactgtccatgtgctggtggcttcttctgaactccaagaacaggctctggcactgcccttgtccagggattgccagcttggggtcttctcagggattgatggaggcattcccaagggagccagacttgtcaggaggagttcaaagggagcaaaaaagatgaactcctcaaaggaagaatttttctttgcatttcttcttaaggtgggagtgtaaaatgggagtgggtatgttatacttttatagctcagtaatttttttttttttttaagatgaggctaccaggagagaacagagaagaaaagacactctgaaaaaggaaaagatgagagttcttatggaaaaatgtgccttgggaaaaattacaatactacagcaaggaggtagggaagaaaaacatctctctcctatatttttatccaggtaacatctggtttcagtgaactggaggaaaacacaaggagacagtgg

SEQ ID NO: 19478 - DNA, 2300 bp, Homo sapien
cagaaaccttaaactaggaagaagagatatatgatcctcaaattagcctagtcaagcttaacttgttctctgtttgtttagagaaagctcttgaccctcaattgacagaaatacctgggcagattttctctacatttatgatttatttgccatatctttactttttcccactctgagtaacctggggggattgtttgtgtggtgaagttgttcctacagaattcaaaaaggaaaacatgcaacagaagacagagatatcctaaagatacgaggtgccattggcttctattattcatcttagtgtttgtttgtttgttctgagacagacggagtcttgctctgttgcccaggctggagtgcagtggcacgatctcggctcactgcaagctccgcctcccgggtttatgccattctcctgcctcagcctcccgagtagctgggactacaggcgcctgccaccatgcctggctaattttttgtatttttagaagagacggggtttcaccgtgttagccaggatggtctcgatctcctgacctcgtgatccacctgcctcggcctcccaaagtgctgggattacaggagtgagccaccgcgcccggctcatcttgttttttaactcacattttcattcacacttatggagtgctattactgtgtgcttacatggctggatcgacactaggtcggggtacataatgagactaatagactgggaggcaaggaacataagccggaagagagatcctgaagcaagcaactctgtaggttctggggagtgagtttcagatgtggtggaaacacaagagaggaactaattctctctgctaggagagccagcagaggtttcctagaggaactgagcccctctccagttctatctttaacaattaacatgtagagactagcctgaccaacatggtgaaacctcataaatacaaaaattagccagccatggtggcaggcacctgtaatcccagctactctgaaggctggggcaggggaatcacttgaacccgggagagagaggttgcagtgagccgagatcgtgccattgcactgcagcctgggcaacagagcaaaaactccatctcacaaaaaaaagaaaaagaaaagaaaaagaaaaaaaagaataagacccaagaagcaagagaacgatacatccagttattggggtcatagagggaaggagagttattgtttcaaataatttaaaaacaatttggtttttttttaaatatagttttcttttcctagttttctttttctttttttttttttttttttttttctgagatggagtctggctctgtcccccaggctggagtgcagtggtgccatctctgctcactgcaagctccgcctcccaggttcaagcaattctcctgcctcagcctcccgaatagctgggattacaggcacccaccaccacgcccagctaatttttgtatttttagtagagacagggtttcaccatgttggccaggctggtctcaaactcctgacctcaggtgatccgccctccttggccccccaaagtgctgggattacaggcgtgagccaccgcgcccggcctcctttttctagttttctagctttacctccaccttctctccctacaggctttggagtcagctttcctgccccacagaggtgacagagctcttccaataatgcgttcaagctgttttaggggacactgattaagttctgccaaaaaaacacggtcgcagatggcaccctcaagagatcaataccaggcctgcagggttgctcacgcctgtaatcccagcacttaagggaggccaaagtgggaggacagcttgagcccaggagttcgagaccaagcctgggcaatatagtgagacctcctctctacaaaaaattagccaagcgtggtggggcctgcctgtagtcctagctactcgggaggctggtgtggaaggatggcttgagcccaggatgtggaggctgcaggaagcagagatggcgcctgtgcactctagcctgggcaacagagcaagaccctgtaaagtgcaatacctaatttccaagagaaatgttaacgactttgcccttttcttcattcccccagatccctgcccaagacgggtctggagcctgacttccgggtgtccatgaccctggcggctgcttccggtccgccatgaaagggctatcaggcagccgcagccatcaccacggggtcacctgcgactcggcctgtgactcgctgtcgcaccactccgaccgcaagccctacctgctgagcccagtggagcaccaccccgcagaccacc

SEQ ID NO: 19479 - DNA, 2300 bp, Homo sapien
aatgacatttttgaaatcttgttttataagttcacttccacacactagagtctattaaatggaagggacatattttcactccatagtggaaagttaatgcatagaacaggtaccaagactcagcttttctccatgtttgaaatcaagatgctttggttctttttagcaaaaatcttgctaaagtatgaggtgacaggcatgagaaggtacaatgccactaaatatgaaccacattacaaaaacaaatgttcctgagctggaaataaaaattagctcctcaggaacttaatgaaacacgaggtataaaatggtagcaaaataatctttaatagtgatcttcaaaattgttggcatcaggactttctcaggtacagaggaacagtgtgacacagcagctgatgacattatttttcgttcctgttaactactcaaggaggtgacagctgtgagtgttgtacctaatagcagaagtgagctcacctcaaattataaataccaagggtaatgtagtgataacttctctcacctaaatattttgccctcttggttaataaggccttctgtttcacctgagagatcatttcttttttgaaattgctgttgtgagcccaaggaagagaaagtatcttggagcagaagagaaaaaagcagtctccccaaacatctataagccctgccctgccctgcctccaacaaacttccagcatctgctgaactccgaagtgcgatttgcttagtgggatctaaaccctttgctctataaagaggaacagaggtagttacctacccaaagatgcatggctgaaggatatgagcttaaaggctatcagacataactgtggacagtggaataggacagagagagaagagtttataaatatatggatatggagaaattgaaacttacatggtcacgcttggtggctcacgcccataatcccagcactttggcaggctgagacgtgaggatcacttaagcccaggagtttgagaccagcctggggagcatagtgagacccccgtctctacagaaagcaaaataattagccagtaatggtaacacatgcctatagtcccagctgctgggaaggctgaggtgagacgattgcttgaaccgtggagatagaggctacagtgagctatgattgcaccactgcacaccagcctaggcaattgagtgagaccctgtctcaaaagaaaaaaataaataaacttgagaaacaaatgcagaaatccatcattactgaacggttactgtacttctatagagtaaaagtgttgcctgactcatttgggtaagcatatctaatatgcatagccaatattcactttttttttttttttttttttgccagaacattcaaccatgtcaggccattaacttgctgggatccttagtactctcgtgtagccaggtgcactcttgctctttttcacatctagtctctttattttaaaaaacaaaattccatacatccttcattcatgtattaattcaggagctctacactgagcattttactttgtgcccggcagtgttctctgcattggaaatgaagcatgagcaaaagaggctgaaatttgtcctcatgtagttcacatctggagggagtatacagcaatgaacaaaataagtgattacaacatataaggcataagatatggtgaggagtacaatggagagaaatagagcagggaaagggaggggagtgcctcgggattttcaataggggagtgaagggtacagcctcgctgagcaaggcatatttgcatagagacataaatagatgcacaagtgccctatgtgggtatctgagcattccaggcaaaggcagcacatacatgggcgggaggccggagggtgcctgaccaattcaaggcactgcatgtgaaccagtgccctgaagcagtgggagtgatggacaaggatgtggccggcggggtatgaaggtcaggcagggactcaatgatgacttaggccttactctgaggaacaaaggaagccattcggtaggtttttaagaaaggagtaacgtgattcgactgactttttaacaggattgctctgctgctgtgctgagaatagtctgagagggagagattggaaggtcgtttttaagcttgagaatggtaatagacatccaggtggagatgactaggcggcagatgagtctggagttcagggcagctctccatcgatatttctagctcgctttgtctacagtcatggtaagtccacgtgtctaaatgtctcccctttccccccttgagtaattgaacagattcggcagtctctataa

SEQ ID NO: 19480 - DNA, 2300 bp, Homo sapien
catttaattacttgcaaggaaataggaataaaactggtcattgttcaaatgactcctgatcctgtgtctagacatgaaaagcaatagattttaaaatcctcagggacacagcaacatccaggtgctacgtgggcaacacagcagagtgccagtgggcacactctctgtacccagactccctgggtttgaaccaccctcagtaatccctagttatgtgtccctggcaaatttactcaatttcagcatgcctctgtttccatatctgtaaaatggatgtaatattacttatgtcatagaattgagagaggaggattaaatgagatcacccctgtaaagcactaagaacagaggtgtaacatggtaagtattcacaatattgccttctattattattattattattttattattttttttttgagacgaagtctcactctgtcactaggctagagtgcagtggtgtgatttcggctcagtgtaatctctgcctcccgtgttcaagcgattctcctgcctcaagcctccggagtagctgggactacaggcacgtgccaccacgtccagctaatttttgtatttttagtagagatggggtttcttcatgttggccaggatggtctcaatctcttgacctcgtgatctgcccatctcggcctctcaaagtgttgggattacaggtgtgaggcaccgtaccgggcctgccttctattattataccaggacgcattttcatactgagtggttctgcaactatcaatacaaagtaaaataatattactgactagaaaactaacagagtaggtatctttccgtattgcttttaattaccaaaaatgcccatatatgagatttaaaaaattcttccattcatttaaatgaattcttattaaaatttgtttgaagtgatattttaaaataatttttaagtaaatattaaataaaatgcataatttaagaaatacaaaaagactttatgaatagtcctaaaatctgatctactaccaaatatggccaaagaggataaagaaaattctagatgaaaaatacttccattaaatgtttaagttgaataaaggcaaggcctatgtcctcctcctcactttatcttggtaattggtgcccagaacttcaatatttaaaagaaaaataaatggataaatgtgcaattaatcaattctggttcatttcagcatatcctatggaagggcagttgccatcaaattcaataggtgctctttgtacatcatctttgtatttttttaatgtgttttttcttttagatagatttcagttacttcagaacattaaactacatgaatgagaagatatgatttataaacattttctctcaaaatgaatgactccctactcattaaaaataatttggttaatattggctcaactattatgataacgaaagcaaatagtctttctgaagtcaacatttctttaagcatcacatatgaagatattttcccacaacttctcataaatataaataagtcatatgtgctttgttaaattacgttctgtaggaccagggttggtgaggcaaaatcaattataaaatggaaaattcataaagtccatccaggagcttcctgtatttttaggaaaaggatgttgagatttcttggagccacagaaatccttgtatattgaactaaaaatagagagggaaagagaagatgtggaaagtgcatccatttgctctaaacattccaaggcaatcatttgcttttctcatctccatcctcttcctctaagccagcagatgtatgtgctagcttggctcccacactgaactcacattttgagatccacatccggtcagaggaacaaagttcaatgtcattgttctctggtaagtattgtgtaagattttctcttaatccttgatgatctgtcagtagctagattcctgcccttgcatcaataactacttcataagactcattcttcaccttcactgaccttcaactctacactctacctctgcctcacccttggttcccactctgcacttcctcccaggcagtctgccacctggcttctctaactcctgccttgagccaaatcccgacaggacttgttactttcacttgctcttttttcctcccattttagcagccaaggatgggaattacacagcgaaatgcaggctaatcagctaaatctagattaaatatgctagtccttggggaccttgagctgaattaatggaaaccgaggtttttaatgttccagactaattttggaagctcacttccagcagaggcaaacttgaggctgtccaaagg

SEQ ID NO: 19481 - DNA, 2300 bp, Homo sapien
tgtaaagatgggataggggaataacagtaaattcaacaatctaggtcttcatatgggccatagattcaggagtgtttgctttgtttcattacttaaaaacagacattgcatacctattgaagatctgtcatatatctggccacgttgttttaaaattttattttctaatatatacctacaaaagaatatatgtagctatcattagtcagtggtaggcacatcctgagtgttttgagcatgactgcctagtctcgttatttgcttcataaatttcatgtaaattataaaggacaaagtaagagttcattttggctttgcaactttaaatggcattttgatactacctttagctccagataaattccataaattatactgactcggtagatggctttccttttttagaagagttgaatataatgacatgttccttttccctcagcaaagaaaataacgtctagctataaaggaataggcatatactacatgttcttcagatcgagcctcagatctgaaacgcagtcttacttaacctctgcatgcatccttccttccgtttaagcatttgttaaaaaatggaaagcatttctattttcttaactttttctttcatttaatgtcttttttaatttagagtttatttgagcatccagtgattcatgaatcagtcagcactagaccacaagcagttcagtgctccactgtggaggcaaaaagggaaaacttttgtaagatgtttgcagacacaaaacaaataaaaatatttggttaaattgggaagtccctagtgagaagttggttgacagtttctagttggttaagcttaagttttgttttctggatttaacgtcttgtttctataattataaaatgaatacagtcacttcagaaacctagaaatgtataaagtaaaaattttccacaatactccacccaaagataacttttttgagtatgaatttgttcttcctcaaaatacgcgttttaaacaattgatatcaaaatgcatcttgtttatttggcttttgaaactgttataacacaacttataacattggaaatacattattttattaatacaaagtagttttcatagtaaaataccaaattaattaaaaggcagaatgaaacgtaccatatacatgtagacgacaaatgaaaactgtcaaagtatccttctctctaaaaagccacaaattacgttctttgaagtaagtattgggttttatttcctaaactatacacatcaatatcacctcctgaagctttttacccagtttcacggttggtatttcggacatgcaatgttccatgctgtcaaacttggaatgcctcgtttggatacagggagacaaagacttggagacccagaagcctgaaagtggttcttgaccgactttgtccactcaaattaaggcatcatgcagctggtcatcacttacattgctggttgcacgcaggcacacacacaccagtgctcacagccagcacttgttaagaatggttgagctggaccaaatggtatacgtgtctttcatcaatataaacatggactgcattcatctggacacgggcctttcccgcctaccgagcctgcccaccacccgaagtttaagctcatcttggaggacctgacactcaggaagccgtctcccgttgttccaccggctttgtggccccaatgtctgtataagctgctgatttgccttgggaaaacaaaccagcatcgatttcagagaaattactggataatttgcgctgtgaggcgcctagatcgcaaggcgcactccgcaaatgacagccgctcccgtgcacttgtccagtcattcgggtggcatactgtccgggtggaagcccgccaaaataatccatttggaagggacggagggcttcgtcagaaattgccttcttgtagctatgagacattgagcaaaacagataagaactggggcaatggaggcataaacattaaggctaggatgtatttttggggagaaagcggcggctagcagggacgaagctcaacttcatgcgccgcgccccggaatgctttgcctttagccactagcggagccgcccgcctgagggagccctccgggagtgagcgcacgcaaccgtgcagtcagattcctccgccgaccgcggccctctctcctcgggctttgccttcgctctctagcttttcttctttcactcccgctcgccgactccagcccgctgggctcacgctctgccggacaccaatcccggcggccctgcccgacggagctcaaggctaggcctggccttgtccgcggagt

SEQ ID NO: 19482 - DNA, 2300 bp, Homo sapien
taaaatggtgacggcgagctttcattagaaaatccgtgtattctatcaaatgtatgctcttgtgaggtttactgaaaaaaacttgttttttcctttggtggtggtatcctgtaggttttttactatggaggaaaaaaaaaaacgctgctttgaaactgtcagtaaatacgatcaagactcaatttaaaacgggactcaagcgtagttcatatgaggccaagttaatggggagttccttaggaacttttgtaatactaactggcaataaaataactgctacaacatgtctttatttcgtctttcaaaaacagtgttttcccctatcatctttaggtagataaactgtccacgaaggagagagtgatcagtttatcttaacataaagattcctaactaggaattcaaaaagatacttcagtgggacgatattgatcatcagaatgacaaacccatgaacgttttaggaaaggcagtttcagatttttctccttagagggtttcaagaaaccccttgattgagaggagggcacatatcctcctcttaccttctttgttcccaaaagagactcaaagaattgtgaaccaaactttcataatataaagtctctaattacctgagaaaactgcagcccaaaaatctaaagtggcttacccaaagtgaggaagttaatactattccttttagtccaagagaataatgccaactggatacagctcaaagactgcaccattcccattattttttgccattagttacgtttaattttaaatataccatctttggcagcaaaaatcaagctgggctttccttctcctttataaattgcatatatttttaacatatattaacactttaaaaccgtggggtggaaagtttaaaatgccataaaataagaatcatatatgcattctttacactgtaaagcattttaccagacattagaatctgcattcagaattctttctcagaacgtaagtgttcttgaagacatatattttgtcttactaatctgtttcttccaagcactactgtactaggcatacggtaaagatatacattcaagttttaaaagtaaatactttttcctggtagtggccagggcctgcgttcctcagaccaaaaggcgcaaactggcattgctgtgatttcagaagagaagtgaaatgtataaaacgaagtaattctggggaaggaaaatgtcacaatttttcttcagtgttgtcaggcacactaacccgggaagccgtctctgggcctgaactatccaaattagtgtccgaggaagtgtgacaaatgcaggcccttccaagtttgaccctgattctcaaaggtggccaaaagccgtctctagaaacggcggtggcagcggcgtgattctgggaggtccattcaacttttaacaggtcctgggcagtgaccgggttgctgggcagtgcaaaggcatagagattggcgagaacaggcggcgatcaagcttcccagcgagggtcaaagtccagcagcttggaactagtgagccgggcttgtaggagtgaagcggctcgcgcgggcccggccggcagccgctccccagacaccggggatccggcccgactgtttcctacccacgacggcgaagacccgctacagcgcgtccacgaagccccagtactgagccaggacggggctctccctctcgatgtaggcgactacgaactgctccgccagccggtgaggcagctaattaagaaagccaccttcaggatgtctttcgagaatctagcctcgaagaaagtcatgtaagagaacgcctgcatcaaaaagtcgggaggccgggcggagtcgccgttaaacgtccagggaaagccaccaggtgggccggcgaacgctcccgggccagcaggtaggctttctcgcacagcagcccccgcacccggtccgtaagctcgttgttctccctgcgccgggcatggttctaggtcaggaggtcctacatcatgacagccaacgcgtccatcctgcgcctccccgcaggccttgctccccgctcggtccctcccggccgcggcgctgccggaagtgcgtgtcggcgcgggggcggatcccggtggcggcgaggggcggactccgcggacaaggccaggcctagccttgagctccgtcgggcagggccgccgggattggtgtccggcagagcgtgagcccagcgggctggagtcggcgagcgggagtgaaagaagaaaagctagagagcgaaggcaaagcccgaggagagagggccgcggtcggcggaggaatctgactgcacggttgcgtgcgc

SEQ ID NO: 19483 - DNA, 2300 bp, Homo sapien
ctccgagccgcgggccccgccgcgccgcctacagccgccggcggaggagggggccgggacccagcgcacgcactcccgggtgcgcccgcggagcttgggttagccggccgcgcgccgcccccgcccccggccgcgggagggcgggggagggcccggcgcgagctggccggggagtgcgcggggcgcgagctccgggctcgcgggcggagcggggcgcggcgcggcgcggggctgcggagccggccgcacgcccgctcccgctcgtcgcgccgccggggccgccgcgggccgcagtccctccctgcgcgctccgagccgcggtcccaagcctgcgctcgacgtctgattatgaaagggaaagtggccctttcaccacctggctcccaggctgggagcttttgtctgggaaggagtgcaaacggcctcctccactccccacctcccaggcccaaagaaattgagagggaggactcgatacgccttgagggcttcttgggtctgcgcttggctccctgcttcctcccgactccgaagttgcaagcttgcaacaaggaagtcgtgcagccgccattgtcgggctgcccggggcaggggaggcggctgcagctgcttatgtaagtttttggctttgcgggaagcccggctccctgcactgtaacgcggcttagcgcgcccgcagtttggagagcaattaggaaggggcagccttattatgaaggtggtgttggggctacgtcttttcctacacctgcctacacagatgctggcaacagctgtcttccagttttgactcacctgaactgagcaattggacatctcaatggcaaggggggcggggcggggaggaggcggctttggacacacatggtctctcttccaggtctcatacatcttgagagagagaggggagaggggcgagtggccaagtacacactagccaaaacaacaacaacacattgatatgttgtcatagctagtctaaggccactcctctctctggtcccatgcacttttatcccacaagccctaggacgagttagtgacaacagtagtaagtgtcacagtgtaaggtttttgctgggctgcctagcctctggatgattacaggcctgggtgcttctagggaatagagaggcagaaacacgtagaatgatcaagtcagaatcatcttttggaaatgttgcctaacctcaaacttcagatgagacatcccgcttctacgctgggtagctcggtgtgttcacttttctttagaaggagcttattatgggtttcaaggtgttggtctccaggttggagtcttgttccatggtttttgtgtaagactgttacagcccagtcctttgctcctaccacaccaaacaacttatctgtgtggtcactgttcagtagaggaaactttttgtttttcaggatatgggtctgcaggatggagttcttccggtaagagttaaaactcacaaaaaagctgaaattctttcacccttattgtagggatagaggtaaaaacacctggatttatcaaatacaatcttaaaaacaaacgtgtatgctattaatacatcacacaggtgcagaaagaaaaagcaatcattgttccctctcctcccatgttacctgttgggtttatgtacttctatagctttatttgtaaggtatatacttctataggtttgtatgagccgagagaaaaatgtagagggctaacatacccagcgggaaatgggataggtgtagggggcacggtgcacttgtttttttctatatctgtgtagccatcaatctctgtacaaatatggacatgagcttagtgtgtgaggagaaatcccttaatggttctccaacccctccttccagttcctagggcacagcccctttatgcccgagtgctacagcccttatctgttctagtccatatctgttcagaactgcacttgatgtaccagctacctacctgccactctccccaacctgaaaatgcacaaaagagggaacaagaaagtttatttttaaaaaatcaattcttggtttaggatttgggatacaggaagatcctacctcattcttgtttatcctttcctctgtaggtctggcgtgctcctgatcagagttactctgatctgaagattttggcgttcaaggcattaagataatagcctgagttgttcatggtaactataactttggatattaaatcttgatgaaaatgacttggcatttgctttaaaatatatataccaattctgattgtgcatgaacacttctatttgtctgggggaaaatattagccgaataaaagt

SEQ ID NO: 19484 - DNA, 2300 bp, Homo sapien
ccctttaatttagactcatccccacaacccctgtgaaccagcaagggacagccaggcagagcccaggtgacatgaacataaaacaaatgagacaagaggattcattgatacaaaaccaggatgtcaggaaccgtcacttgagaaatgcattctagtgctttagaactcttgtgaattatgttatcgggttagtggaaacgtgggaagtcttttcctagccatatgcgaaaagattgtctttacacagtaggcagaccaaaaatacacgcagaatgagtgggaaaccccatatgtggtatgggagaagggggagcgccagcagcagatgcgccatgacttgagtactggccgtgtccacacattgtgctaactgcagtggctgctttactgcttggtgacgcaaccctatgacagagtactattattatccccctataaacacacagcatccacaggattgaaatgcaacttcaagagctacgcaaacaagaataaagcgagtacacggtatcatgtctgatgagtgtgaactttcgtggcagaagacttggttctggttctgtccaggccactggaacccactatctgtgggtgcaggtgattttccatcatggagctaataccttagctgggcattatttcacttaatccttacaagtgccttattaggtgctttccatagctctccttcagctgaggtttagagaagttaaacaatttacccaatatgtgaactggatatgtctgactctacaaccggtctcttccatcctatttcctccatataagccgtaacttgggtgcttttgtgaacatcaaaaaagatgcgtataaagtcgccttggggaacgttaaaccaaagtcaattaacattacaaaatcaactgaggccatatagaacttcctttagaaaattaacacatccaatcatcatattatttcccaaatgtttacttaggtgcctgttgcaagcactatcttatgtcatcttcaataagcccaagaggaagcttctgctctaatctttagatattaaattacgcgtttcggggaaacttcgcgtgtgaggtaaagcaacatgagcgactctaaggcggcgcggcattgctgtccggcctcctgcatctcggtgagcagaaaacgcgggagcgggagggacttcccagctcccgacgccagacacaggcacagccgccgcgtcagagggaaggcgacgtggttcaacagcaacggagccattactggcgctgagcagggatgttaaggacagagccaagttatcagagctctccgaatcgagtccagggtctggactgccacagacgggtcgccgcctccagcccctggacttttccttggagtgtccgggcgcggacctactagctccgaagccctatgggtgatccctttctgctgggcaactggggttgcgctttacactacaaatcgaagacgtcgctttttccatttgttctgcaagtgtttattgtgcaccgtccactcccccacaaactcaatgtgccggcggcaagaggcaagaccgcagacccgtgggcgcgcctcccggtgtcggccggtgtgcgcggagggcgaaagtggccggggcgcccgctccgagacgcggcagagccccgcagcctcagcgcccggcctgcgcgcgcccgggggaggctctggcccacgcacatgcacacgcacgggagcgctggctcccgcgtccccggcgctgcgccggcgccgggcgcgggcggaagcccacgaaccagggcgggagggagcttgaggcggggcgggtgtccgcgagcagcgctcgtgcttaagttccctggctcccgaagccccgcccttgccccgcccactccttctcccgcgcgcgggctccgcgcgccccaagccgcgcgcgtgcgcgcgcgtgcgcaggccagggccctccgggggcggccccgtagtctccaacgaaagcgtcggcaagggcccggattaaccctttctttgctcgcccacttagagacccggtcgggttccgtgcctgcgcaagccggcggcgcgccttccccccagcccgcaccgcgcatgcacgggaaggggggggcggtgggggtgttcacggccggctagacattctgtgctcgtgcaggaggagggctgctaccatcagggacgtgcacgatttcccccaccccgccccctccccaaactccaaaaaaaaatccaaaacacactgccacccaccgtgcccccgcgccccgagcccctccggtcccggcctgcgtttgctagcgagcgcggggaacccacgg

SEQ ID NO: 19485 - DNA, 2300 bp, Homo sapien
aagtctgagattttagtgcacctgtcacctgagtagtgcacattgtacccaatatgtagttttttatccgtcaccaccacccccgccactgtctgccttctgagtctccagtgtccattatattactctgtgcctttgcatacccatagcttagctcccacttatacatgagaacgtatggtatttggcttttcattcctcagttacttcatgtagaataatgaccttcagctccatccaagtcacttcaaaatacatgatttcattcatttttatgactgagtagtattccatgatgtatatataccacattttatattcataattattcttacaggcttttgtgagctagcctaggaagttaattgccattgtgtgtcttctaagagtttccagaataccgaacttagagccagcccttttgaataaaataattaccaggactgtttcgagctgaattaagatattgaaatatcgatgttaacattgaagcttttctttctggtttatcctattgactcttgtttctcctttagagtgtctctattacctatttctatatgttatcagtatttgaggaactttgtagaatcgcactttttttttcctgaatatcatccactttgttcagtgacgtgcaccccagggaacacatttgttgtgaatgttgttttccttatgacctttagtgtgataatgactgctgagaagacagaagacaattgtgaaatcagtgtactaatgtcatgctgtctctttctccctgcccaaaagtgatgttagtatgtgttgtctctcactccttgcggtcctgccagctctagtatgttttctgctgctgttgagctgggtggcacagctgcatgttgcaacataaactgcttttttgcaaggttgcatctcacagagaatggcctaactggtccattaggaagttgtgtctcatatgagctttttcaacggtgtaaagagatataaaatgtcttagtgaagatattttagtgacatagtttagctatcgaaagcatttcagagaggatttcatttcagaatcctttcttttatttacgtttttaaattcctaaaataataatgtagatattttgtctgtgattagttactgtgtatttgaaaagcaacatttataagttttaataaattttatatctaaaacctaaaataatgagtaccaacttttaaaacttaattaagcatcttttcactaagacgttttagctgggatgaaaggctctgtcttattctcttgagtttgcatgttttgcatttgcatgaatttcatttagcaacattcattgtgttttcccaaaatattagagatgagtaaatgtatatgcatattatggtagtctgtttaaaatgcagtagaaatgaaaacatttctgtactttaggtgaatggaattgccatctgatttttataatctctaccaagatggttaatatttgttattacccatggagcttttatactgtaagagtgatagacttttcaacattaataataataatatgaaaaccaattcagtgctccttggtgaatggcacttccaaagagccaagtgtattagagcaattgtgtactgcaaagactgctgttaggtgtggaattggccactacgagactggtgccagtgccagccaatggtgataatatgcccagcggcagcctcgcctcatgaccctccactcacctccacacttacacacatcctcagcagagagtctgaggatagatgaaattccaagacatgagcatttcacgaattttaaagcactcatataggaaatacaggaaggtcatgctctcatgaaggtccctgcagcactgatttgttttttcaaggcaaacctggtattttgtgttggtattttttttttcagtaaagatatagttggtattgttcatgtgtcttctgacctaactattttggattttatttctttaattgtatttgcttttagcatcagtgaatgaaaaccatgaaatatacatgaaggattctatgtctgctgcagaggttggtactggccagtacgccacaacaaaaggcatctctcagaccaacttgatcaccactgtgactccggagaagaaggctgaggaggagcgggacgaggaagaggacaaacggaggaagggggaagaagtcacgcccatctcggccatccggcacgagggaaaggtatagctcccagactgcctgcaagagcttgctccagcttttaagaatgactaaatgatgctgaggctgtaaaccaggaatgtgctcagatttagga

SEQ ID NO: 19486 - DNA, 2300 bp, Homo sapien
tttttgtgtttttagtagagacggggtttcaccatcttggccaggctggtcttgaactcctgacctcgtgatccaccggcctcagcctcccaaagtgctgggattacaggcatgagccactgcgcctggcttagataggtatttctaattaaaaaaatacttagttgtctaacatttttctcccaagaaaattgccattcagacactattgctgattttcatcaccacaaagattaagattcatgagtcataagaaaaagtttgctttcaattttaaagaatagcaaaaatactgcaacaaaatgaatgaaaatatggagccatctgtgtcttgaatgataatgccaaatgagtgtttattgtaaacaatacaatttattcaagtccactttcaatggagtgctttagtgtacatgcaaaaaaggaaaatgaattctttcttcattcacagaccttatgtgctacacacacacacacacacacacacacacacacacacacacacacagagtcatacaggtgcgtatgtgatatgtgcatatatgtctctaatactcatacgcaacactttctgacaggaaatgcagttaattcccaaacatccactattggaactgtcacctttatctgtcacctgaaagacaattcaggccctcattacctctggtaactgtcttaataccatagtctcctccgaacaccaacctggtatttgcccatctgttctagtctttgcagagccataagattagttttcttaaaacattacttaagtcacactttcttgctcaaaatttcccaaagctacacatctatagaatatagtcccataaactccatagcaacatagtaactataattttccaaccttctccctcttcaacatgaaaaaacccttccactccagccaaggaaatcaaataccatcctcctttcctaccaaagtcttccctattctagaaacctgcgccaagtctccccacgtctccgggcctcactgacagatcaggcccactaatctttcccagaggcacgtgttctgtatcttgtctttggcacccagtagcaaatgcaatatttttgtgaatccatttttttccctcttttaatgagtccctgagctcctggaggggcaaccggatgatttggagaaggctctattttaaaaaaattaataacgtacaacatgaaagggatctgatgtacaacacgaggactagagctaagaagtgtcttgtattcaggattttgctaaatgagtatattatagctactcttgccacaagtagaggggtgttgggggaaatgcataactatgtgagttgatagatatgctaatgtgttccactataataaccattttactatatatgtatcttatgttgtatgccttaaatatacatacaatttattttaaaaattaaaaaaatttaatattttattttcaatttttgtgggtacatagtatgtatatatgtttatggggtacatgagatgttttgatacaggcatgcaatgtgtaataatcacatcatggaaaacaggaaatctatccttcaagcattatcattggtgttacaattcaattatactttattttaaaatgtacaatcaaattattttgactatagtcaccctgttgtgctatcagatgctatgtcttattcactctattctttttgtgcccataaaaatatttcttaaatatcttggttagtcggttagatcttaagatattgtgagatgaccaggagttacttctttcacttacaagtcagtgagccacctccgctctttaaaatcaaggtaaatttcggtggaaagctttatagatactggagaggacggagtagctgagttgctgaaaaatgggcgacttctcttatcaagcattaattcagatcttctctattaacatgacttgaagacaccaccaacttgattttattttctttccaaaaagaaaaaaaaaatactgcagtccctagccaataaataactcacctgaaggtcaggaacaccctctccctcctttctcacaggggatgtctgggaggggagaggggtctggagaggccaggccatcatctaagtgggaataaagggctaaagctattggcattggcagctgtctccaggcgtcgtccgcggagcctgaccctgcgccaggacggaggaggctgtgcccatgtaactgtcctgaagtactgcggtggccccctcccccgcggctgggagggcaggcaggacgaggttggctttcctcgcacggtctctgggcgtgggcccccgccgcagct

SEQ ID NO: 19487 - DNA, 2300 bp, Homo sapien
ttacataaagtgtcccacatgcaaattcagcaaaacacacacagaggtgttggagaagctgttccaggtctcagtttccacactgacttccttcacattctcttttgtcttcttcagaatcttcagccacaggggctccagtgtccactgatttctcccactgtcaacagactctcccattttctcttccaatcctttctcattcctccctctttcctacatcatactttctcattcacaccagtcttcaagctctgtctctaatatgaaggaacattgttttcctgaggaagaacttttcatcacttctatgcttggcacagcactcccagaaagaaatccatcttgtctagttgtgcctcacctggctaccaacgtaacagacacatatctagtttaatagtcactgctacccccattacccacccttctgcccctatttttttttatcagctattcctccagttattgaatcaatctggacttaaacttgagcaagccacaccttcattctactcattgttttacctaattcagttcaaggtgcgattcataagcaaacatttagcctggggtattgaaatatatgactgtgaatgctttgccactagactgctgtcttcaggagtttcaagaggaaaggcgaggactagcttgcctcttttgagagtggccagagtaagcacttggctgcagggaaaaaagtttgcttttaatttccaaagtggacccaagatgatagggtctcatggaacaaaatctttgctttgatgcaaggaaccagtggtatatagcggtcttccaagttacttagcaacagttgacaaggtgtggcttcttgactggtgccaactgtttccaatatgcccttgtataaagccacctctgacatcctatagaaagtctctttcctctgcctcagcctgctgaggattgcacaaaacacaggtagatgtgagctgcatgtgcacactccagtctcacttaacagtgcaacacctgcactctcaaaacatagacatttccctaatgggctataaaatgtgctatttgggcagttaattttgaaatgttattaaactaataggcacttggcaatgtacctctttcacatagatacacccaagagtcagacgtttctggttgattggatggctttccagacttgtgattgtcatattttatagcttttcctcctccagaaggctttaccaaatcagttttccagaaagcacacctctaggagctactaggaggcagagtgagtgaagagtggcctgagtgcccagggacagactgtgcagtgaactcttgtccaggtctttggggcagaagtggaagggaaaagaaagataatgttccttttgtttacttagaaggtccaagagttgtagaaagcacagatctcgtttgtgtgtgcacgggcatacattctgatggcctggactcacaggccacagaatcaagcaaacacgcatgtgacacgctgagccttcaggcctggaaatcccgtgggcaccagtggggatggctttgcaggccctggaacgccagggtcctccgctgcaggggtgcaggctgggtgagaaaacggtgcaagctgcgtctacacactgctcttcatattttggcgcttcatgtgaagttggaagatgcttaaatgaaacagcctccaagccactttctggcctacatccctagactgccgctgtgaagttaactcttttcagagattgcaaaaatttaataccagcaaaagaaaccaagttaccaggtccccttaaggcacacgaagggacatttatcatagcctctcccttccctccactccctatctacacaaaattgtgtgcgtgtgtgtgtgtgtgtgtgtgtgtgtgtgtaattctatccctgcttgcagagcccgctggctataaagcccagggaggaggcctgtaaggagacccatactttgcgagcgcgcggctgggaggcgggctcagggcggggcagagcgcggggaccgcccgggcaccgggcgcagccaacgagcggacggggagggcgggcccgcgagggctgagcggcgcgggctgtcacaggcgcccgaagcgcgctgcaggtggcaacttggaggtgccgccaccgcagctgcgggaggagcccgggtctggcggccccttccagcctccaggagctctttcccgccgccgagcccgagactggaccccggagaattcgaaggaaagagcccctgcggagggacctgtgagcagccctacctctctctgcccttgcgctactttttttctccaagg

SEQ ID NO: 19488 - DNA, 2300 bp, Homo sapien
tactatcagagaaataagttgcattttcaagaaatacccacaggtgggtggttgtttctgtttgggaccagtcccacccaccagggaactgtggtgccagacaggacagaatttccgcattgccatccggttcttatcattagcaaatgagtaaagaaacgggagatcaaagcgaatattcatccagtgctaaatgctttgaagaagactcttcccttgctgaaccccttggtatgaattagctaagtgatgaataaatacaaaatgtctacccgggagcgagagttaaagaaattgaacaaaggaggtgcagatggatgtcatgatgactaacgtgcttaagtactcagcttatctgtgatgtcccctgaggtttcttagaactcacaatgactgtttcatatttgtacaacaccctggagtctcagacaacacatgatctctacctgccacttgcctaattctgttgacagaaactgctttcaatatgactgttgaaatttaaaggtgaaattggctattgaaactcaagatatttaattactttgtttttactttatttgcataaaaacataatattatagttacttgtagtaagtataggttataaatattttatcccaactgttctttttccctccaactgctgaatctagctacctatgtttagtctttacttaggctgctcttgcttccactgttgaggaaattacaccagctttatatccagagaaccttaaacctctcatctttccctgcttcccacactcattcaccaccattgtgtccaggaaagacacagtaacattctcccattttctttatacctctttacatatgtagttcttacttcgccttgccctttagaagtctgggtacataatatgtatgtttgtcttcaaagaggcactatgctgtaatagtttatagtacgggttggaaacttttttctgtaaacacccaaattgtaaagattttagacttttcaggccctagtggtaacttctcaattctgcaattgtattgtaaaatcagccatagacaatatggaatcagatagtcacggttgtgttccagtagaactttatttacatacacagcagctggccagatttgacctacaggttgtagtttgctgactcttggtgcagagcatggactttggagccacatggcctcacttcctggctttgtgtacttgggcaagtcactaacctctctgcccattagttttcccatcatcatgggaagaataacacctgcttcacagggttgttttgaaggtgaaattatctgacacatgtaaagttggtaaagatttctctctggaatagtatgaaatcaacataaatgcttgctattgttacaagcaacttgaggggaaaaataatacgtattatttacttttctcttcctttgtgtttccacaatctcctcactctccacagcacatagtagagtccaagttgcagagatactcaataattatgtgttgcattgaattattctggcttgctttggccttactttttttgttttttgtgttttttttttttaacaaagaataactacttaatttctcttctttcccttccatctgatgaatatgtcctgtatagttattactttcttgctcttagagaaaaattatgttctagggagtatctatttggggcaacttgaatctatgtttcccagcttaaatttttaaaaaatatatattttgagctcctgcaaccaatatcctttttcccttctttatggtttagaactaaaattttttttttaactaatccttttccttcatgtgtagacctaaacttttaaagggggttttcctaaagagatcaaatattttgtcctttctgaatattttcctgggggacagatctaggacagccctctgattatcctcccttggtagtattcatactattgtatgatccttttactgtgagtataggtgggacctgtaagttgtttctaaacagtaaattatgacaaagatgatatgatgtcactgtcattattatgtcacataagattatgacttctatcttgctagtagaccctctccattaactctctctctttctgattgagtgtaagctgctatatgaagggatccacaagacgaataattaagggggacctctgatcaacagccagcaaggaactgaatccctcagacccacaactcacaagaaactgaagctgaagcagattcttcctcagtcaagcttcaggtgagattctagccctgcccaacaccttggttatagcctatgacagaccctgga

SEQ ID NO: 19489 - DNA, 2300 bp, Homo sapien
gtagtcccagctacttgggaggctgaggcaggagaatggcgtgaacccgggaggcggagcttgcagtgagccgagatcatcgcaccactgcactccagcctgggcgacggagcgagactccatctcaaaaaaaaaaaaaaaaaaaccatgttccccttcttcagcctgattagtgccaatagttaagtgatttgttttgggacttcccaagaaagtgccacaaggccttggtaaagttgcttacactgtgtgagcctgttgtcttaccagtaaaataaatacgctaatacctttgggtattcagtcaaaaatatatattcattagaaataatacatgtaaaacaccctgtataatagtgggcctatagcatacattcaataggggtagctttttaattcttattataaattgtactttttggtacgtatgtcttaacgtcttcactgaatttatattctctatagtacctagcatgtagcagatgcttatggattgttgaatcaatacctgaatagattaataaaccaatagatcaatactgattattacaaattacagaacatgcatgtaaaggcgcccttctctctgtagcaaaggttgctgatacaggtatagatcatgctgggccaggctgatatcatcttagccatcctgtccccagttccagagtccattctagatattggtactaaagtccttttggggttagaatgcatatggccttctccagaagatccagtttatttttattatgttcgctggactcatgataaaattgtggaccagaaatctgttctagtccacaattttatcatgaccttaaaataaaagaaagctttcatgtattcagaatggatttactttgtactatgtatcagcaaattcatagtgagtaggaagtgaatgctcagaaaagaatcaactgcctcgatattgatgtatttggccacgtgctcctctaggtgtagccggtgataacactatgatggcaataacagctaccatttcatgatgtgtgtgtgtttgtgtgtggcatgtgtttgtgaattcttagggtcacactaacccttatgagttggatctcctttgctcatttcactggggagaatctctgaagctctggcaggaagtaccttccccagggtaatgtacaagtgacctgtcttgggtgtgtcttccctggtatagcaacctcatttctagcagcggcagagttttggggcctctttggagacagggacgtgggcacagggatctaatggagacagcccatcagcctgcagaaggaaccaggtcattggccctggcagatccttctgcccatagcctgctattgggttctgataacatccaggactcaggactcagctttgacttgtgaggggagataatagactcagcagacctgggcttgggcctctcctctctcacctacaatgtatcctttcacaccccagcccaaaacttcccagcaaagctctggaggattaagcagatctgcagatagagtgtttctgcatacatgaatattaagaaatgaaaacgcaatattctctgataccagtaaatatgcttagttacccatagtcttttctgatacagtcaaaccagggaatgcatattgaggatacaaactgagttaagtgttatgtgacatttgcattgttccattggaagtacatctgtatgctattcttagatttttaagtttctaaaattataaatgccgtatgtgttgatgaatctatctataattctttgttgaccagtgtctgtggttctagaacctgagattttctcaaaaggcaatatgaaaagaaactattatttgagtgtgctcagggaaagaagaatgtttctatgcaatttttaaatattaggtgtaagtctgctctaatgacaatggatccctgatttatcactgtatactgatgactgtgctctcatttttatacaaaccagtgcttttggctgcccgtattcagacatgaacttgaaaaaggaggcaacacttcacgatcgtttgagagaacaaacacaggcaaatttggaatcagactcttcacattcaaaatcaaaaagcctctgtagtttgaacttcaatggaaaacatgaaaaggtgaacagtcagcccaggtaagaaacttcttaaaaatgtgagccagaaagtaaaccatgtagaatagtaaaagaacaattttgttaatagtaatagtttctatttctttcttcaaaagaattatttttatttctggatattattaggttcgctgggctgataaaattcatctaagccttg

SEQ ID NO: 19490 - DNA, 2300 bp, Homo sapien
ttttgtgaattttgtgtctactccaaatatatgacacttaacgaatgattgtaaactttctatcttgcaggtttgtggttaccgtctaagacttcattttgatggttatttaagttgctatgatttttggaccaatgctggttcccctgacattcatccagtaggatggtgtgaaaagaccaaacatgaactgcacatccctaagggtaagccaggatacatttaccaactggaaagagaatcaattggtatttcacttatattttaacaatactttatgaaattcgaagaagagatcctggtgtggattgatttccaaaatgaaattgtgttccataaagagtagtaagactataatggtaccatttttagaagtaaatgtctttaaagaaaagcataaatgactatttaggtcaaatattctgataatgtacagaaggcagaaataaaatattatgaaagcattttattttattttatataaagtttattaaaccttataagcagtgcagactaatatttaaatcatggttgaaacaaaatatctaatcaatgatacagcaaggtgaggaaacttgattcactgtaagtaatttgtttcagacttaggaatcacggaaaacaaagaactatgaaaaaaatcactattttctttcgatgggaatgaaaaatatcatggttttgttatgtgctagaggagtctgggccaggcagatgtgaccaaaaccttttcgatttgctgtgtgcaagtgaggtggggatgtggtcaaggatgatgctgacgggctcatatctttgcacagcaaacttctgtacattgtctctggcttggatgtcagactgttcgatgtctgtggcaacttctggagtcagtatacagtcctttattcctagttatccactcagggtgtcccttgggatcctcccctgaggctgatggcagagtccttgaggttgctggtttggaggaagctggtgacaggctacaggctcattcattcagtaggtatttatggagcccttaccacgtgaggcactgagggccagtagcaagtaaagcaatgtctctatctccacggggcttcatttcagaggagaaggataatggcggtggctgcagggacactctttcagaaagcatgggggagaaaggcctctctgtggacataatgttccaaagagacgtgggtgaaatgacagaggaagcagtgtggtgtctgggtaagccctccaagggaagaacaggagcaggcgccggggcaggagtgcgctttgcgaggatgagtcatctcagggagacagcagagaagcgcccaggtgggaaggtcggggacgaagagggtggtgttcccaggcctggaaggctgtgcagggagtttgacttctgttccaaggctggtgctcagaaccatattttgagcctgtactgtttggccagcactgtgtgagagccacgccagggcatgcgaatgggaggatgcagcagtttttaatgggagactagtaaagatgcggcgcagaaagctggagctgtggagtgggcattggattgagaaggcgtttctgtgcctggcatcctggatggctgcaccctcaggacctctgatggtctctgtaaagtctcttcctcaggagtggggacaggtacgggaactctggtctcatccctttgcccattcaggaaagccttaatgggcgatgagactcccatcaggccaccagagtactgactccgtatcagagcatgtgaaattgtatcgggaatgatgcgcgtgatggggaagcactatcaacagttttgcacataatacattttaaaaaggtgaaacaatttggagattttaatttaaatcttttgtgggtgctaaggacgttgaatttatggcaggacactaataataaccatatgaggttggtgcaaaagtaattgcgttttttttccattaaaagtaatggccaaaaccgcacttacttttgcaccaacctaatatatttaatatgcatgtgattacatcttttgggtattttgagtaatctgtgctttttttaggttatagaaaagataaatttgtttggatggattacttgaaggcctgcaaattgcaaaatgctccaaagaaattattcagaaacagaagtcctgtaagtattttctttcccagcataaatcaaatttcccccaagcttaaatttcttaaaattcactatatattctgttttattttaatcctttaagaagttatggaaactgttaacttcctgtcacttttctcacctaattcgtcagtttcttgtgggca

SEQ ID NO: 19491 - DNA, 2300 bp, Homo sapien
ggcattcttcaaatagagaaacagaactcagggctcaacaaaaatatactttaataagttaagtgaatgcagttcttattggctttctgtgaatccattctgctagaatttcaattgcaaaatcctcatttccccagaagctactaatagtaagaaatttggctgcacaataaacattttaatgtgcatcctaaccactgactgaattacggtctcagaaacaaaaacaaagcacgtaccggagcagataaaacactactaggtctaggcaaccttagaccagcaaagatcatttatgaacaaagaaaaagaacccacaccattcataatacaggactgcacagaaagaactttttaaaataacttctcaaattgtttgataattcactggccatcaccgaactgattccacaaatcctgagtctagtgtctaaaacaataaactcacatatttttcccccaatgactaaactcttcccagagaaaatagacaaggatacttctaatacatatttcctttaactaaacaagaagtcgtgtctacccttgattccaaatgccaccattttcctctttaattcctcctccttctgaagagctctgaacttgacattcagcttccagctggaactgcagataagcagcctgttacaagtgcttcatacccctaccaggaactaaaaagcagtcctgatctgactgtctggttccagacttcagatctgctcaactatttcccagcaaccctggtactttcaatcaccatttcagagacacagattctaaatgtaggaaaagcatctgaaccacatcaggatgtatcttcaattctgccccagaacttagacctttagaaactacgggaaatgagcatgaatgggaattctttctgcccttcagagccccagcaattaatcatcttaaatgacttcatgtcacaaggccacactctatttttaaaatacagttccttctttcgtctcgatatgccttgtgatttaaactccaaccaaacatctcaatataatgcacacagtattctttcaaaaaatgctttttttccccctgggagtactgttaaataccagtgaagttaccttaaaactgaaggcaacaaaatacatataaaaggcaaaaaaaaaaaaaaaagaataggtagacaagcaaacagtttaggcaattgaaaagaggacacagactcaggctataatttggttccaagcatatcagaatgcataaagtatttcactgcattttataaaagtactaaaaagccagacatggtcatcatttggcttatgattaatatttaaagtactaagaagcatctatattaaaacagtgatagtattctcagtgactgtcaagtaatttggaaccatgttcacagcacaaacacttggtatctgactaaactcttctggctggaaagcttctgggtatctcaaagtttcacaaggagttttaacaaataggaatttccacagaacaatcttcctgcacctgcagggctaaatacaaattcagactatcaaaaacaaaatgcacctatcaaaaacaaaatgcacatgtgcacgtctttcagattctatttaatgtataggcatagatagaaaaattccatttttaaaatataattcaggcataggtgaagaacttaaatttggggtagggtgaattccctttactcagatttcaagtaaggaagacaaagagagaataggaatgtgttcaaataaggctgtcttgtttctaggacaattaggaggttaaaccaggaaggtgcctctgttcctccaacaacccccagcccctcccaaaaataaatgcaaccttatcatcctgcagaaggctggaatttccttttcaggacataaagtctttctttctgaaatcatactagattataataatagctatgaagaggggaaggaggtagagcaggacaagaaagtggggggaggtgggaacgccacgattgtgccttgtttagagagaaaggggatgaaatgaggaaccacttctgttttcatcgtgaataaagttggtgagtcatcaggcaggagagaggaggctgggaacaacgtgacccactaaggattctgctccaaggacagtgggtttcccgctgggcacccactcttaagtgcagatcgggagactaagacaggaacacccgccgtgggcaggccaggctggaaggatagaggactgtggtcgaaccaaggcaagttgtggcaaggacaaggtctgccgaggccaggctgggctagtgttctgaataaacagggggtcggtgg

SEQ ID NO: 19492 - DNA, 2300 bp, Homo sapien
acctgggctattctagcaaatcttccagctgggttctgggactccctgactcttgagttcttgtcctgtgaatgtcatcccaggtctgttgcatatccccctttccaaccaaatccagctgtaatcctgcttggctttcacagccctccatgaagccttcctgggcaacatgatttcctcttattcctcatgagaaattgccttccgtgtatctgagctcttttctgtttctaagccatggcctgtgttatttcccttgtatagagtgatcccttctaaatattctccttcctctgtataaggcttctcagccttagcaccattgacagttttggaccagagagttctttgtggtgaggggctgtcctgtgcattgtgggatgtttaacagcattgctggcctccgcacaccacatgcccccagcatccctccctgcccgtcccctggaggacacattcccttgctttcaacctactttcttatatcttctgttagtttcttatttacagcatattgatgaattatgatttttatacagatggctgatttctgtcttttaatttgtgtaattttgagaaccactgctctcaaaccgtatgtgggggacacactgccccaagctgtagccccgcttctccaggaagcatctgttgactgcagccctcgctcaccttctcttccttggactaatgtagtgcttgtgcataacaggcattgactttttttttttttttaatttttgagaccgagtctgtctgtgtcacccaggctggagtgcagtggcgagatctcggctcactgcagcctccaccttccgagttcaattgattctcccacctcattttcctgagtagctgggactacaggtgtgcgccatcacacccgactaatttttgaattttcagtagagacggggtttcaccatgttggccaggctggtctcaaactcctgacctcaagtgatctgcccgcctcggcctcccaaagtgctgggattacaggcgtgagccaccacacccagcctccagacgttgacttttattaatattaataattggacagcactgtttgccagttgcttaaagtgaattaatcttgttgccataattgtgtcgtaggctcctaaagtcaagggaccacttggtatactactttcctgtgactttttggaagtctcttaaactttctgtggctccattttctcatctgcaaaatgaagataataatacctatacctcagggttgtcttgaagttccacgagttaatgcatggaaagtgcttagcagggaccttggcagacagtaagcacacactcagcagctgtctacctgctgtgactactgtttatcacccagggtccctagcaaagtagataatccaatgggtagtcaagttagttcacttttacttctttagggaagtgagtggaatgggagcatgtgggctgcagcctcaacaaagatcttctggtgttttctctcccttgctcgcaccccaagtatttttatgctgttgacatcagttaaaagtaagcaccgacggccgcctcactgtgagtcatggagaagcagcacagagcaggtcttggtggatgccggtgactggagagagtgtagagggtgaagggaagatggcgctaccattgcctgtgctgaggggaggcctgaggtctttatgcatttgtgtgtttactctcttgtggctttcttgtgagctccagggaaatcatgctggcttggtatccctcagcaactcagagctgaggtgtgttcagccacatcttccttccaagcatgttcctcccaggacttggttttgaattcatgtttcacgagctttgtgactgtaacttatagaactttcatttctttataaaatgggaatgattctactatctccttggggttgaagtgagggctaaaagaggtaatgccgaatccgtatcttgtaagtaaagctcatggcgtctgttaaaaggcaaatcaccatcctttgtgaccattagtgctgtttatgatgtgccttcctagtggtcatgggaaatctggaagtgggtggcattctgacctcagccttggcctcacagtgctttatctgagtgctctgactttaggtcgggtggcttctggggccttctgaggaacatgcacaagctgctacagctactggtaaaggggtgtgaaaagattgtcagggattgccctgaccccagcttttgagagcaggtgcagcgtgtttttctcattcagtgggcaaggccaggtgaaagagctctgtgtgaagacattctctgtgggc

SEQ ID NO: 19493 - DNA, 2300 bp, Homo sapien
acagaatcatatgttgtcagcactatgcacctatgcacttacatttaagtagctgtagatgaggtttcctgcctgtttcaacttgtttcattggtgtatccttttccttatgtaaacccagcccctgaaaacagtgtgtctgctttcataaacttaaaccaaatatagtcaataaacatgttataaaaacaattgtttccccccaagaagtgaagataagctgatgtaaattcactttatttggatttcaatccagctttcttctttgatttcatatattataacatcaatattcacttttctgaagggctcctggaaccagaagtgcacttaactctttctgtgctggggacattttgatatctctattactaatacctagaatctccaatgataaataaatacctctgggatggactggggatacactgcaataattgaagcactttatccttcaccaaaaatggtatccgtgttcctgtgagtagcagggaggtggaactctcacctgctgagtcccgttctaatttcatccaatctggtgaacaagtatccaaccaaaggtggtacctgcaggcatgcccattgtcacagtaatgcaacactgtaagtccttagcacaatgttaaaattggttggaactgagtttcaaatgttttcctctcgctactgaggtcttctacttctttctttttctctttgtctctaatatctttttctttttgtttttctttttcttcttcttttttttttttttgagttggagtttcgctctgttgcccaggctggagtgcagtggtactatctcagctcactggagcctctgcctcccaggttcaagcgattctagtgtctcagcctcccgagtagttgagattacaggcgcccgccaccacacccagctaatttcgtatttttagtagagacagggtttcaccatgttggccaggctggtctcgaactcctgacctcaagtgatccgccctcttcggcctcccaaagtgctgggattacagatgtgagccgccatacctggctaatatatttttcttaactgactagagcacagaacacaaatcgtgtgtttgcacttacaaatttctatgatcattgttcctagtttaaaaacttcattagcaaaggggtttatatttctcttttcagtaaggacacgaaattatgtttcaacaatgcccagtctcacctaaaaagcaagttttcattctctgtttatggtagcccacgacaaaccaaaaagatcattttggatggtatcattgttaatcctgctaaatgattcaatttcctgctgaaagcaacaaactaatacttatttagtacctactatttattatttgcatactagggtttatacacaaggcgtcctatgaaagaacatttcattcaaaagtcacaacatatagtcttcaattatcagctacctttatttgtaagccaaaataaatgatttaatacagtcctcccaaactgggagacaatgctttgagaaaggccaaagctagccagtaaggccataagttccatgagggcaggatctacccagctcctgtttcctgctcaattccaagcagttagaacagggtcagtaaacactgcttgccacttggaaagagtattcttttatttggaaatggtatccaggtactcgtgagtagcaaagtcaagagcaggaaaggggagtgggggaggttgcaaaatcggagcgagcagcaggaccgagagggatccggaggagagagccttcagacggtgaaccccaagagctgggatgaagcatgggtgagctactgggacttcgctgccagggagcaagctggcaggcaggaagtagccaagatttgggggaatccttcccagggaacgaatacagagaaggacgcatctgaaaattccgccgcagccacctccctcccatgggaaagccccgacctcggcgggcccagcgccacccggctccccggggtgtggaacactgagcgaggcaggtgcggcgggagcatgcgcgcggggcgggcagggggcggctcccgcgcccccaccccgcgcgtgcaccctcgcgcccctcccgccgggcaccgcggggcagcggcgccgcagcctgggctggcggaacctcgcgctccgactcgccccccgcctgtagctcggtcggcgttgcgggcaggcgccgctccgctgggggtaagaaggacgccgccgcccgcgtgggatggtcgcgagcccgcgtgggtgcccacggccgccgccgcgcggggtggccccatccccgggcaggtaga

SEQ ID NO: 19494 - DNA, 2300 bp, Homo sapien
caagataagctggtgtcaatgaggataaaaatgtgagaacccagtggagaagagcagtcctcaggaaggaagagttggggcccagtttctctcaccactctcttctcccagcattcgggctccatcattgtgccactgtaaccttccaaccacacgccccccagcatgcctttttggggtgcgctgaccacttcattctttgaaactattattccaatgtccttgctattgataggtgaatccctgaaagaatgatataagattgtaccatttaaaatttgatgaaaagatcaaaacaaattatcctcacagcaagaactgccattcaaagcttttaaaactatttgctatggctattgatatataaatattaataattataaagctatttgctgtggggaaaaaaaaaatccctaaaatagcaaattttcttttcagagctcagcttcttaccagcaaagttttttattttctaggcttttccctttggcctaaaaatattgaaatgttctcatgtgatcattcattcacaattgaagttggggccgcgcgcggtggttcatgcctgtgatcccagcacttttgggaggctgatgccgacggatcacctgaggtcaggagtttgagaccagcctggccaacatggtgaaaccccgtctctactaaaaacacaaaaattagccgggcgtggtggtggacgcatgtaatcccagctactgggaaggctgaggcaggagaattgcttgaacctgggaggcggaggttgcagtgagctgagatcgcgccactgcactccaacctgggcaacaagagcgaaactccatttaaaaaaaaaaaaaaaaaaaaaaaggattgaagttgcccttgtaaatgtattttgaggataagaaaaaaaaaaaactaaaataagaatcagcatctcttgagtgaagaaagttctttaagctacattgttattatttacttttcctttatactaataatatatcatttgctttcatgttttaggtagagatcatcaatgagaatggttattaagatacttatttttttccagggatgtagtctgttaactggggaaaacttctttcatgtagattggtggttttcaacaatggaagaaacttaaaaaaattagttctatctaggccctacccccggaaattctgatcgtttttatctaagacaatatagcataatgcctgtggcacagacattaacactttacaaagctgtgatgtgcaggcaaagcaatggcagtctgaattttaatctggtgggttggctttccataggtgtccccatgggtgttttttgtttcacttttcaaaaacacagttttaaccaatgttatcattctctattaaaagtgttagacacaactctcaaagacaactgtatttaaatatacaggcacaagagatttcttaatgtaaaagtttaattccaactttttaaataatctaattcctatccatcacagttggattgacagtaggattactccaactgtaatttcctctttaactaatttgagtagttctgctttgttccatgtattctggctcattctgccttttgtctagtcagaaaatacaggttggcttcagtttctcctggccttgaggcatctgcatgtctgtagttgataaggtctggatctgtgtccctgcccaaatctcatgttgaattgtaatctgcagtgctggtggtggggcctggtgaggggtgattggattgtggaggtggagttctcatgagcagtttagcaccacctacccttgttactgtatagtgagtgagttctcgggagatctggttgttcaaaagtgtgtagcacctccctcagccccttcctcctgctccggccaggtgacgtgctagctccccctttgcctttggccatgattgtaagtttcctgaggcctccccagaagccgagcagatgccagcatcatgcttcctgtacagcctgtgcaactgtgagcaattaagcatcttttctttatgtaataaattacccagcctcaggcatttctttgttttctttttgtttttttgtttgttttttttttgtttttgttttgagatgaagtcttgctctgtcgcccaggctggagtgcagtagagtgatctcggctcactgcaagctccacctcctgggttcacgccattctcctgcctcagccttccgagtagcttggactacaggcacccaccaccacacccagctaatttttttgtattttttttagtagagacggggttttaccatgttggccaggatggtcttgatctcc

SEQ ID NO: 19495 - DNA, 2300 bp, Homo sapien
acttgttggttagtgtggtgttctgtaaatgctcattagattaaggtggtggtaactttaatcacatttattatgttcttactaatctttgattgatttaacaagtactgagagaagttgttaaaatctctaacttttattgtgtatttgtctattttttccttttgttctgtcagtttttgttgcttataatttgaaactatgttattgggtgcatatacatttatgattgttactccttgttgaattgactcattttatcattataaatgagcttcctcaatactcttagtaatattccctgtcttgaagtctgcttcgtctaataatatatagtcattctggctttcttagggttatagggttattgtttgcaagatatatcttatttcatccatttactctttacctatctgtctgtgtttttcttcacaatttcttcatagtttctatgcttacatttcagctatattgctttaattggtggtgttgctgttcaggcattttaatattcatccataacttatcatagtctacttagataaatactatgcttcattcactatatcaaatataagaatcttgcagcagtagaatttcattcttcttcatgcccagtggtttatactattgttttatgtataacatctgcatatgttgtacatacatcaatgcaatgttgtcatttttgctttaagttgtcatatgtacttatattcttttaattttgaaataattccaaacatatagggaagtcacaagtacagttttaaagacagtttcagggaccatttgagagtaacttgccatcctgatgctctatcactcccaagtactttaggtattatatgtatatatacatacacacttatatagagagaaagccattcgctgtataatcacaacatactattaaaattaataattatttttattatattactatcatccagtcctcagactgctatcgtttctagattaccttttatgacaaaaaaagaaaccctccagtttagaatcacttgttatatttaattgaaaaacgtgtttctctttcttctctctctctctttctctctctctctcccctttacagtctggaacagtttcttagcctttctttgaattttatgaccttgacacttgaaaattgcaggtaattttatagatgctcctctacatcagacaagttgggtttgtctgatgtttcccaatgacttagactcaggttatacatctttggcaagttgtgatgttgtgttcttctcatggcatcctgtcaggtggctcataattttaatttgttctgtcactgatgatgtccacttcaatcacttacttaaggtgatatatacatgcaaggtttctccagtgtgaacttagtcatttcatttttgtaattactgttatcttgggaggtaccttcaaactgtataaacatcccactctacaccaagttatttctttatatcagaatggactcctggtttatttagtgggtttatcttttactgtcatttattttgatgttcagattgccccacattttatctgggagtcagttagggaatatatatggagactctaagcatcccatttaaaaacaactgctgaaagctgtttttaactaaccaagattacagatgttgcatagagcagggcaagcagtggaggttatgagtccagtcaagttaactgtgggaactaaaatgaactccctttagagcaggataaggaatacagcctctctaatagagcactctggaaggtgttggtgttagagtgattaaaaaaaaagcagaattttttttctctcaaggagatgataatctagtagaagagaaagtaattaatgaaataatataaatatatttggaggagaaaattacttgaaggaagaagaaacagcagtgttaggattgatagcaataggacatgaccttatcttgatgagttcagggaaaaagaggctttcctgagaaaaagatgtagaaactgagatctgaaagatgggtggccagtaattatgaggtcaagtagaaggactgacatgtccaaagaccttgtgacaaaatagaatgttgagtttttgaggaatccaaagtaggccagtattgccagagaacaggagaggaggagagtatggtataagcatgtccagaaatgtaagccgtttcacactgtagaattatttttgttttcatttgaaagggctcatttagttataatatggataatagattagaaggggatcaagaatggcataggaggaactgttgcgagtctatcacagcaatcca

SEQ ID NO: 19496 - DNA, 2300 bp, Homo sapien
ccccaaaccagctaagctatgccaacccattggctgtcactttggggtaagtaaagcagttctgtcttgagctccatgtgaaagagtgaataatcaaagtaccagaaggatctcaggcatcctcaggacatgcaaacagaagcataatcacagcaagtctcctctgtcccttctgtttcccagtctccccatgggcaaaatattctctcacttggctttcactatgcctttcatttcaaatcattgaaggtcataccaccttttaaaggctgatcagggccaggtgtggcagcttacacctgtaattctagcacttttggaggccaaggcaggaggatctcttgagcccaggagtttgaaaccagcctgggtgaaaaagcgagaacctgtctctagaaaaaaaaaaaaattaaaaaaattagccagatgcaatggcatgttcctgtagtcccagctatttgggaggctgacacgggaggatcccttgagcccaggtgttcaaggttgcagtgagctgtgatctcactgttaaactccagactgggtgacaagaccttgtctcaaaaaaaaaaaaaaaaaaaaaaagttaaccggggtaagcgtggtgccaaacacatgaagaaacttctcactgagatagaagagaacactgaagttattctagccatacctgtgagctgctgggcagtttatggaatgaggtggcaggcactgtcctgtcctgcagaaggatgatgaaggagagtataatgaaatgactacgtagaacagtaaaaataccaacttacataatcacatatattacagaatgttacatcttcttagcagattgtgccttttactctttgagcaaatctggcaagaaatgtctctggatactaaatttttataatccaaaaaacttaaatcctaaattggtgagtatcaagatgctaggccctaaatcggtttcctacagtaatgtatagctattggcccatctgctttttcatactgtgttattgttgagaagtctgatgcctccctaaaacttattcctttatttatatcctgctttcatttttatatttctggaaaccttgtaggtgtatttttattgttggagaactgaatatcattaggatatgaaatctttttttttccatcatcatcagcactcagctttttgtttctgataactcttgctttcctttgaattctgaacagtctcttccaagtatttctgtaattatttctttctctccactttttctattcttcctttcactgcttggattaaactcacatatcttaaattgtcacttattttccgtatattttttctatttgtatgctagtagattttgcctgcattattcttgtagagacttaattttaatgtttatcatgcgtaattataacttggcccctgttgcatttataattcaacaatcatactgttaattcacaagaatgcctcttttttcactgatttcccctttattgttatacttagttcctgacttcttgttacaaccgcctctcagatctctctaaaattattaaataattataaatgttcttctctttcctcaattatctgctttttgtagaatgtttatcactgtacttctttttcatgatgttggttttctcttgatactggtttacaaaccattgcaaaatacaatcacaaagtctggctttaaaatagcatggttttgtcagttagatcagacttagacaattagaggtttacttttcttacaaaacaagaggcttaaggagaaaggcaaaggctggtatggctgccctggcagtgatctatcaattttttcttctttccattctgccacccttagtgtatgggccaattgttaatacctacaggatgtctggacatcacatgcaccatgtccatgcttctgaaagacgctgacttcatccactttcacaagaaaacattagctttcccagacactccaccaagtagaattacattcatatcttactggatggaaccatcacatgatcacactcagtctttttagttagaacataccatcttggagcaaaatcatgatattcataagttaggaaagaaaagaaagtgggttttggcaggaagctagcagagtttgcttctgagacgaattctgttacagtacatggcatttatgaggatcaatgtaattatgaatgaattggtaagtgctgttatcaatgcccaggtagtcattaattgtatatatctccaggcagctgtacatatatataaaaactctagtgtaatgcatgtgtgaatacgcagtcatatttgg

SEQ ID NO: 19497 - DNA, 2300 bp, Homo sapien
atccctactcactgctcaggcacacgcagcaccagagcagcttgccccctgacaaggctgctggggaggcttttatctgcgcctcttccgcttgagaggtgggctccctagatgggctaggtatggaatctcagatcctccttgtaggaaataggccccttttggccatatttttgtgatttctcagtttttcccaaaatacatgcattctttttgtaaataatggatcctgtgcttttttcagcattggcttcaaaaataaaggtgctgaggtgatgaaaatgttctaaaattgatcatggtgatggttgtaccactctgttaataagctaagaaccactggcaggtacactttaaatgggtgaatcgaatggcatgtgaagtgtatctcaataaagctgataagaaaaaataaaaataaaaaagaagggacttgccagacattagtattctacatcattctatttgttgccatactgtgacttagttgcaatcatgccactaaaaaccagccttctacgtggaattgtcctgtggtttggagcattggcctgtttaattgctgctctccaaagaggctctttatagatccataggtagttagagttctatttgtttatcttcctctgttttgaatgcaagcccctgtataacaagggagcatcatagctctccttttgccattcttttttttttttttttttttttttgagatggagtttcgctcttgtcactcaggctggagtgcagtagcacgatctcagctcactgcagcctctgcctcttgagttcaagtgattctcctgactcagcctcttgagtagctggaattacaggtgcctgccaccacacccagctaatttttgtatttttagtagagacggcgtttctctatgttggccaggctggtctcaaactcctgacctcaggtgatctgcccacctcagcctcccaaagtgctgggattataggcatgagccactgtgcctggcgtccctttgctattttctaagttctcgctgcactcatttattattgtgtttttaattagcatcactattcagaatttttatatctgttgacttacaaatttctccacctaattttaatgtaaaattaactaagttttctttaattctgccttttgttccttttgttatacttggtagtcccctagtcagtgcctacagcagagggcaaaagagaatgagttctttttataataaaataattattcactttgcatatgaacagttttgccaggcaatgaaaccagatgacaagctgaaatctgaatccgaaatcaggttaggatcgctcaaatgatttatggattcacttgtttttgctcagtgactcttttgtcttaactttcaaattagcttgagaaaaacatttttaaggggtactacatataacccattcagctttttctcaatgtatgtcatacaagatcaggtaaccaatattaaataacagaaattccgattaattcacctgaacaaatttagccatgaaatacaaatggaatttgaacaaaccttaagaggcagatattccacaggtgagggaagaaacaacaggagtcaaagcagagaggaattctagcagtttccagcctttcttcctctgctttaagcttctgcttacccgtaacagtgacattgggtctagatgagcttaattttaatatcataagaatatatagaaataccctattttggactttcttttaataatcctcagcaactttcatgagacatacaaatctaaaattttaaaaatcagagtaaatagtttgtttgggcaatgatgataaaaatgtgtccatatggaggtctgtgatgcgacactgttgtttaactgaactcctcggggtgagtctgctgcttttcctcgcatataaacactgtaacgtgcttgtggattcacttgtaaatattttgaatttgttttatagcaaatagtattgattgattaaatagcatattaaatagtctgtattctttgttttgtctttagatgatgattttctggaaaagaacattccaccagaggctgaagagctgtcatttgaagtgtcttattcagaaatggttacggaggctctaaaaagaaataaacttaagaaatcagagattaagaaagaagactatgttttaactgtaagcaaaacctttcatgattattccaggaacttcctgtgacttcataggacaaaactaagatttctttttcttttttttttttgagacggagtctcgctctattgccccaggctggagtgcagtggcgcgatc

SEQ ID NO: 19498 - DNA, 2300 bp, Homo sapien
aatgcagaccctacctttacacacttgtgcctctataagccacatatcagaagaggggactgcaaaaagtcacagtcatgagaggaagtgagagctcatggaacagacaataaaaacacatcaaaaccaattcaagaacttctattagtacatgatgggcaaagagagctatatactttgttacccccaaagtctcattatttatatccagaatgttatatccaggaggcctaatagagaacgatgtaacattggtctgtttgccattcaaccaatgcatgtgtgaaaagtttatcttgtggagtcctgaatactctgtgctgattacggttggatgcttgatgagcagggcccaggcagtttcagagctaaaaaactgagtcatgcagaaacagactttttgtaccaggtgacttggaccgttcccaaacaaccatcccatgacagaggacaggaagaggaaaggaagaactctaggactcacggagtgccttctacgggcctgacactatactagatattctattaataatgtaaggtggaccctagtgattacgtccattttacagctgaggaaactgaggcccagagaggctaagtaacatgtccaaagtctgcagctagtgggaagcagaaataggatttgaaactaagtgtgtccaacttcaaaacccttcctggtccctaagcagtctgcaggttagagggcaacatgtggtggtcgagggaaaagagagaagcctgcaggactctggtttcagggggagcccctccttatcttaaagagaggcatgcaagagaggatgctggcccctgcatctcctcatcgaagccagctccttctgaggtttggctcttcccatgaagaactttgcataggatttagcacatagtagttggtcaataagcgattgcagtttttgtttatattgttgttatgtgttactattatatgaggacttagcctcagaaagaaggtaaactagctaagcatttaatagcacaaggcatgccccaagccacatcctatattttgtttcatttttaaattcttgaggttccaaggagcaattattgaatgaataaaagaatgaatgaatgggcagatactttgactaccccaaggaagctccagtttaggaaactcctatggaaaatgtgaacttaaagctttataatttaaatttaagtgtttataatttaatctatggggttttttttgttttacttcagcattttttttcaataccactctttctgagggcaaagtgaacctgtggatattatataagaataatcttttgcttctaaaaggtcttgctgctgaaattcttcacaatatttctggattgttgaaggatttgctgctgttgttgttttagtgtcttttgtttcttgtgtgaaaatagagaatatgtcagtatcgttgtcttcaaaatcatagtaggattgtttgcactttctctgtatttgcttttttaagaatttggaatcatttaaatttaatttttatggtagaataactgttgtctcagcaagcatatataatcagtttaaactgggagattactaaaagtctcttaaagtgtgcagtatgggatagataaaccttgatttaaagattgactgcccaagaaggaaaaaaaaaacatatgtttagagctctcctgggatatacctaggtgtgtttcctgttatgtgtgtgtcacatttattccaattaagggccatggtgtgtgcattccatgtggtgcctgacatgtatgttgtttgacaatattgggtgttccttataaagaaggcagtttccacagttgcaatggcaatgttatcatatactttagactgctgttttgcttctaattagcatagcagtgatctgcacattgttctaaaccacatattcatatttctaggatgcagcatgctccttagagatgttttccaaagaacacgttctactgcatagatttagagtgtccaggtggcatttgagtgaacgcataataattttcctttgccataaaaaataaataccttcactgtgtgttttagaaatttaatgttcagaaaaccagatttggcttaactgaagcaggagatctgtctgctgaagacatgaagaaaatccgccatctctctctgattgaattgactgccttttttgatgcctttggaattcaactgaaaaggaacaaaacagagaaagtaaaaggacgaggtaactaagaagactgattgcttctggctttaacactttgacacagtggaataagataatgcttttctaattctttttt

SEQ ID NO: 19499 - DNA, 2300 bp, Homo sapien
gatgataaaaggactgactgcatatgaaattcctttaagcacctttaagaagaaatcatgtttaaaacggagatgagcaaaggagagcatttttatctttccatttgggtcatgcagagctgtaaccaaaccataagctggaaatgtggggcccagatcaatgtactgaaaagcaataataatgaaaataattctttacgtttctggagtttcaggggtatagaaagagttctagaattttcacaagtgctcttacatagaccatctcattttgccatgatgatcctgtgcagccggcagagcaggtgtgggtatagagcaccagcccctgtatcaggtgctaaggatccgatcctaagctgaacaggcatttgcccaccctcacagggagtggagtaagtgagatatagattaagttttaaaaatgtatcaaaactatatgtgggggacaaaacacagcagacatctggtacacatggctgcaggggtaacagctgccaggagccaaagaagacctcagcccgagctggggtgcctggctgtggaagtggtggttcttggggcgggcagagtagacccgctgcgaaggggtggggccgtggagccggaagagagaacggcgggggcggggccagacgcagttggcgtgtctgttggtgaggtgggcggggtcagcctgcggtggaggggaagggccctagagccgtggggagaggcagcccgtggcctggagcagtggttggtgacctttggagtggcggttgggcggttgggcggttgcatggggcggcctgggactcgggggcggggtcagtcatataaggctgtgcccagcgcttttggaagcagtaagtccagcccgaggctaaggtgagagcgtctgccgggacagtgtggctggacccacgtggcaggtgcgaggcagggtcactgcggatgggagagaaggcgtagaggcctcaggccttgtggggtgtcacctagagatgccccaggagggctggggggccggggtgtttccagtgaagccagttggcatcctggccgctctctccgagtggaaggcagagggaaataattgtattcacgcagggtggatcgggcggaggccgtcaagctagccggaaggggctgtgctgtcaaccagcgagcgcaggtggcctggtgtagaccccgggaggctgggcggggacgctgggcggggacctggttgaggacctgggcggggacactgggtggaaaccctgggtgggcacgctgggcggggactctacagggctctccctctgggtagtcacattcacttgttgagttgggtgtccatctcctctgcatgtggattttactgacttcttataattgtccttggtagaaatcagtgatagtttattcagaactggggatgagctcagcatagctgacacaggctgaaaataattcctatagttaagagagctgaggaatttccccagtccatgctcggagagttagtttgctgaattggtggctttctgaaagcctctgctcttctggcatgtctgtcgtcataagacaatatttctgcctgtggtacatatacctctgtgggatccttaggtgagagaggagtggcatatgatggagggttctgagagcatcagtatgtctgcctctgctgattggcttttaccatttttattttgaggaggtgttaaccaccgaagggaggtagaatgtttttccccaccagaggaggcagcgaccacgtctcctctatggaggcattcaagagccgtccagctgaagcagcatcactgtctgaggtaaatacctggggttcaccatcttgcaccaagaagattaaagacatggacacatgtgagtgggttgaggagcggaaattttaataggctgaagaaaggagagaggagagcagctttctctctctttctagagagaggcatccaaaagggaaaaagccggcctgaggtggaccacagcagacttgataggcaggcttgaggaggcggcgtctgatttacacagggcccacagattggtctgatcaggtgtgacgtttacatagcgctcggggaaggctggtcgtcccaccctaatcttattaaacaaatgggctttctacttggccagtaccatcttgtctgctccttactatacacgcgggtggcaaagacaggagaagatggagccaccgttttgaacgtgtctattcccaggtaacctttctctgttggcacaaccaccagtattagcctatgcaagcttccagcttgcttgtctgtgcctgcagcttgatttta

SEQ ID NO: 19500 - DNA, 2300 bp, Homo sapien
ttcattcatgaaaattattctaacttgggtattttggagctagtgtgctttttggctgctaatacaatgttataccaagtcctacttcattaatcattgtaagatttaaggaaaagatgagacaaattccgtgagccactaagttagacacagaggatacccatgctttggtcttaggaaacagccccaggtgttgacatttgttagaaaaaatgcagggtggtagattacaatcaaaggggaaaatactctgtggtgcacagccactgacactttaagagaaatgtaaaatgttcaacttccccacttctttagggccttattgaagctattcagaaagagagaagagatggaaagagagaagaggagggtgagatttgtagatttccagagatgaagagatgacagacatcgagggatgtgaaacactatctcttcaggctgactctacttttattaggctgttcttgcattgctataaaggaatacttgagcctgggtaatttataaagaaaaaaagttgaattggcacacggttctgcaagttgtacaagcatggcaccaacaactgcttggcttctggtgagggcctcaagaagcttacaatggtggtggaaggtgaagttgtggcggtgcggggggcaggcacatcacgtggagagaatgggagaaagagagatagagaaggcggatgtccaactctttcaaacaaccagatctcaaccaagaatgaactgagcgagaactcatcaccaaggggggggtgagaaaccattcatgagggatccacccccatgatcccatcacctcccaccaggccccacctccaacactgggaatcgcatttcagcttgagatttggaaaggacaaacatccaaaacacataatcagtcatcattcctatactatagcaaccataaatattgcatcttattcagcaattccaattggaaatatttagtaccactacccacaaaagtttctttgtacttatttacgagtcctgatgtttttgttagaaaaacattgccacctgtttttacccagccaggtctcagcctaagtgccactgggtccagtttctctcatcttctgagcagttggcctaaagtgaccctatgttttccttttttctttctcctcttcctcttccacaccagtgcaaacaaacctccagccctcgcttgacggtcctacattgtttcaaccaggcaagcatggcacatttcatacctaaagattccaatccacaaatggattttcttgtcattactgtatgacagccaataaaaaatccaggtaaaacattagagatagatgataaaaggactgactgcatatgaaattcctttaagcacctttaagaagaaatcatgtttaaaacggagatgagcaaaggagagcatttttatctttccatttgggtcatgcagagctgtaaccaaaccataagctggaaatgtggggcccagatcaatgtactgaaaagcaataataatgaaaataattctttacgtttctggagtttcaggggtatagaaagagttctagaattttcacaagtgctcttacatagaccatctcattttgccatgatgatcctgtgcagccggcagagcaggtgtgggtatagagcaccagcccctgtatcaggtgctaaggatccgatcctaagctgaacaggcatttgcccaccctcacagggagtggagtaagtgagatatagattaagttttaaaaatgtatcaaaactatatgtgggggacaaaacacagcagacatctggtacacatggctgcaggggtaacagctgccaggagccaaagaagacctcagcccgagctggggtgcctggctgtggaagtggtggttcttggggcgggcagagtagacccgctgcgaaggggtggggccgtggagccggaagagagaacggcgggggcggggccagacgcagttggcgtgtctgttggtgaggtgggcggggtcagcctgcggtggaggggaagggccctagagccgtggggagaggcagcccgtggcctggagcagtggttggtgacctttggagtggcggttgggcggttgggcggttgcatggggcggcctgggactcgggggcggggtcagtcatataaggctgtgcccagcgcttttggaagcagtaagtccagcccgaggctaaggtgagagcgtctgccgggacagtgtggctggacccacgtggcaggtgcgaggcagggtcactgcggatgggagagaaggcgtagaggcctcaggccttgtggggtgtcaccta

SEQ ID NO: 19501 - DNA, 2300 bp, Homo sapien
tgaggtttcagttacctgcagtcaactgaggtctgaaaatactaaatgggaagttctggaaataaataatacataagttttaaattgggcatcactctgagtagcgtgatgagatctcatgccatcccactcggtcctgcccagaaagtgaatcctgtctgtgtccagtggattcacgccatgggagccatgtctgcctatgtccagtggatccacaccatgggagccatgtctgcccgtgtccagtggatccacgccataggagccatgtctgcctgtgtccagcggatccacgccatgggagccatgtctgcctgtgtccagcagatccacgccatgggagccatgtctgcctgtgtccagtggatccacaccatgggagccatgtctgcctgtgtccggcggatccacgccataggagccatgtctgcctgtgtccagtggatccacgccatgggagccatgtctgcctgtgtccggcggatccacgccatgggagccatgtctgcctgtgtccagtggatccacaccataggagccatgtctgcctgtgtccagcggatccacgccatgggagccatgtctgcctgtgtccagcggatccacgccatgggagccatgtctgcccgtgtccagcggatccacaccataggagccatgggcccattggtcactttatagctgtctaggttcgcagatcgactgtggcagtacagcggggcttgtgttcaggtcaccctgattttactcaataatgccctcgaggcacaagaggagtgatgctggcatattgttataattcttctattttattattattgttaatctcttcctgtgcctaatttataaattcaactttatcatagatatgcatgcataggaaaacacagtgtatatgacgtttaggtactagccgaggtttcaggcaaccactgggggtcctgaacgtatcccccgaggagaaggggaaactactctacaggcacagactctggagccagaaggcctgggttcgaatcccggctctaccatttaccagctgtgtgactttgagcagatgcctcaggctccctatacctcaatctccttatctgttaaatggagataataacaattccttcctcataggagaattatgaggagtaaattagggcatctgtgtaaaaatctttgtgtcaacctccagcacaatagtttgctgctcttgctgtcactgctgacgatggggtgacagcggcatctgtgtgctggtctgtgaggagtggctgctgtgcatgtcctaggaggagagggcggatgggatccagaggacaagctggggctggctgggtgggctttgctaggaacaagtacccttcatctgtggtagcagaagagatagagggtcaggaacaaaagcaggggctggtctttttggtggtggacggatgaaggagctctttcttctcaacgaggcaagtcatcagctggggtgggaagagggactgcggtgcacagggctctgagctaagagcagctatgaggaagtagtcatggagaataaaaaccatgaacatattagagcaatgcactggctccccatgtcgtttggaggctccatctgagattgacggctatgatatccagctcaaaccagctaggaaggagacatccatctccttggccttggtctcccgtgtgggttctggcacagagaaggcggaatgttggcttttacctgggctcgcaggagtgggagagagaaagggttaggggattttgcagaggacacctgtaacactggcctggaacctatctgggggatgaattgtgatttggggctagagaagaggggagatagtggtgggagggcattagggctagcggcttagaggtctccatgcagctgagaaactgcaggagtggggaggcacagagtggagacaagaagaaaggggtgtgctaataggaggcttttaaagtcgagactgtgagagggatggatacctgtgaagaagtcaagggtatggccacggaagaggctggctgaggagggagcagggaaagaccttccacagatcacagtttgagcacagaaaggtcaggtgttaggcagctgttgaattcacagagagtgatggcaggagctgcagaagacagacaggagcccaggtctaagggggtatgacagggtggcacagccaatgacaacaagacgggcagggcatggcagagactgcaggcaagcctggcaggtgagctggaggacctcaggaggagagaggagcaacatggagtccgggagccccaagctccaggcc

SEQ ID NO: 19502 - DNA, 2300 bp, Homo sapien
taggagtccctgaaatttgcaagaataaaacatagcgttgggtttgaatacaatcataatgtcagagctctggtttagatttttgcacaggtttatgtttattcccccagttgtctgttcattcattcattcattcattcattcattcatgaggcatcctcatgctcctgaaagtcatgggtttgtggactcggtagagcagaaacgtttctgtggagttcccagctgtgcccgggaaagtgccagggggacgtgcgcaggcacaggacacagcacaggagctgcagagtgaaagtgcatgtgacaagcgtagcccacaacctcctggcaaggggaagcacgtaaacaagaaatcagtgtttcgtggaggtcactgtgcagcgcttgggaactagagacaaaaacgtgtccctgaggcagcccagtcaaggctgcaggaggaggcgatggcatcggagctgacctggggggtgctcaggaatggccagggtctgacatggggatatgctaggctgggtgccattgcaagcagaagcttcagacaagaaatattaagatagcatgtttggactctgagtcacagtgaaggattggcactttggttactctaagagaaatatatacatggtttttaattgattttcattgtacagttatcagatgacttgggttcatggactggtttgtgatatcctaattttgaaaacactctcttgtttctacctagacttttggatttcaacagtgcagttggccatgagcaagtcgacctggacacctgctggctgtcagaaaggcctaagctggctcccgatgcagaggacagcaagctcttgccagagccccgggcttttccagtaggagcggcttcctttactatcagtcaggtccagtcagcaaaggagggcctaggacagagggagttaaaatggggccttgctgtaaaggtgcctgcgaaagctggagctggagctggagctggagctgtgctaaaaatcagagcggggacagggagggaaagggtgcctcaagcaactcagatgacacggcccaatccatagattgtaggccccaacacccaggccgcgcattgggctgatgtataatatgcttttggcagagcttctataaggactcattatcaatttacatttagccaggaaagcatgaaaataagtacttcatgtaaagccattgtgcacatatttgttgctttaaaaaaaaaaaaagattcaattcattaggaaaagccagttctggccaaatattttgaatggcagccattgctatttttcatgttctccccttttgctttctctgtttccctggtttaaagtgtgcactctaataatttagaagatggcagaagcattcaagagcaggaccttctgagcagggcgaggctttgagttcggggcagttttcatggtagcatctgcctgtgctgaagcagaaaacagcatctgggacccccatgacttgggcactcttaggacagcccgcagatggttgcgtggggttcaggggcccttcccgcctggctcctcttgtctgcatcctgccctgtcagtgtggacctaggttcacactctgaggccctgcaaaacatgtcacctgtgggcacctccagttttccagtgcctggtccgcagctcgtctcggcagctgcatccttagggccattcccaaaacctcgggtcacggcgggggcctagggggacagcaaggcctttgccccttaagcctgatgaaaatttgtaggagagacttcagtgtccttatgaatttcagtgaagccgagtgggattaaggtgacagacagaagctctaagtgctttcttcagggagataaagcgctggcgagtgcatcatttaaaccgaagatggagtgagcgccaacaggcactggtggttgttgctgttctaatgggattgcttcgtagatggcccttcatggcggaacacgcgtgtgtcagtggggttcgggctgcgggtggcggctgagtgtccctgtgtgtctcttacaggaacagtgtgtggtggatgcagctctggagtacgttcccggcgctcaccagtttggtctcacacaaaacagccatttcatcttgccttttaatcagtcggctgtcagaaagaagtaggtatcattctaacatccttatgcggcgtctcattgctagatgtatgggggtgttctgcagccacagagtcttttccaaaagaacctgcttttattttatgatgaagtgcttgatttgcaaccaaatggcaaagagaaggaattcagtgttggtgca

SEQ ID NO: 19503 - DNA, 2300 bp, Homo sapien
gaggggacgtcactgctcacaatgagaagatcgttccatggctgtatcaaaaacctgatcttcaatttggagtaagtgtacctgctctctgcatgttcttgcactttctgacctttcatggtgagtgctaacactaatctgaaatctcattgtactgtttgagattgaaaactttgcaaattcccaaataatgagtgaaccccattgttctatcatgtaagtctccccagatggattttattggattagaatgttagacagatctggtcatcatactttaaaaaccatcgctgaacattagctctctgtggctgtccataaagagccgggattttaatatatttttgacatgcatttgaaggaacatagggattttgtgatgtaagtctcttgctgtcctgagagcattgctttgaaggagctgtttactatggggctactagcagcttcaggttatcaatggcttccccaaaaacaattactgtataattaagaaccagaagcctttgggggtccaaggcaggcagatcatgaggtcaggagtttgagaccagcctggccaacatagtgaaaccccgtctctactaaaaatacaaaaaattagccgggtgtggtggcaggcacctgtaatcccagctactccggaggctgaggcaggagaatcacttgaacccgggaggcggaggtgcagtgagctgagattgcaccattgctgcactccagcctgggcgacagagtgagactctgtctcagaaaaaaaaagaactggaagcctccattccctgtgtggagctcatgatgaggaaaagaactgacatgtgcccatgagcagttcattcctccttgctcaccctctgcctctggacagggtgctgatgggacacaagctgtgctctgctctgtgggaccagcatctgcccaggaacacctggaagtgccctgggcatcaggaaattgaagctccctcctggctgggtcactgacttgtctagtgaccttggacaaagacttggatctttcatggtcacagtgtccttatctgtgaaattacctcttaggagtccctgaaatttgcaagaataaaacatagcgttgggtttgaatacaatcataatgtcagagctctggtttagatttttgcacaggtttatgtttattcccccagttgtctgttcattcattcattcattcattcattcattcatgaggcatcctcatgctcctgaaagtcatgggtttgtggactcggtagagcagaaacgtttctgtggagttcccagctgtgcccgggaaagtgccagggggacgtgcgcaggcacaggacacagcacaggagctgcagagtgaaagtgcatgtgacaagcgtagcccacaacctcctggcaaggggaagcacgtaaacaagaaatcagtgtttcgtggaggtcactgtgcagcgcttgggaactagagacaaaaacgtgtccctgaggcagcccagtcaaggctgcaggaggaggcgatggcatcggagctgacctggggggtgctcaggaatggccagggtctgacatggggatatgctaggctgggtgccattgcaagcagaagcttcagacaagaaatattaagatagcatgtttggactctgagtcacagtgaaggattggcactttggttactctaagagaaatatatacatggtttttaattgattttcattgtacagttatcagatgacttgggttcatggactggtttgtgatatcctaattttgaaaacactctcttgtttctacctagacttttggatttcaacagtgcagttggccatgagcaagtcgacctggacacctgctggctgtcagaaaggcctaagctggctcccgatgcagaggacagcaagctcttgccagagccccgggcttttccagtaggagcggcttcctttactatcagtcaggtccagtcagcaaaggagggcctaggacagagggagttaaaatggggccttgctgtaaaggtgcctgcgaaagctggagctggagctggagctggagctgtgctaaaaatcagagcggggacagggagggaaagggtgcctcaagcaactcagatgacacggcccaatccatagattgtaggccccaacacccaggccgcgcattgggctgatgtataatatgcttttggcagagcttctataaggactcattatcaatttacatttagccaggaaagcatgaaaataagtacttcatgtaaagccattgtgcacatatttgttgctttaaaaaaaaaaaaagattcaattcattagg

SEQ ID NO: 19504 - DNA, 2300 bp, Homo sapien
accattcaaaaaagacatttgtgaaagtccaatagtcaaggtaagacagcttgcagggagtggggtcattagatgtccaaactgggccattcagcgtagtggttagcaaatgtccatttgtagcagtgctctatctttaggtcaagttctttcatagactcctcttatgtggcacagagctgcagccattcagttgctatgatgagcagccttttgtagagagagccacttctccactgtgccccttctctttgccaggtatcttagaaagtcccagggaacacagtttgcaaccacagccgcctcctgatcttagaattgaatccatttaaacctcagcggagttggtcacttgcgaagtcttaccttcctgccaagacggagccaggactggaagctgtctccagatcccatcccagattcatgccctgtcatgctgggaccaggactggggtgttcctgtagcctcggctatgtcctagtacatctggactttgcccagacggcccagtgtagacaacgcaggaaaggacagaagcccatatcacagatgttctcagtagaagggacttaggtgtcatcaaagccagcctcctcgtttacatggaaagaaattgagatctagaaaggctgaaatttgtccaaaatcatatagttgcttaatggtccatagctcattgttcaacatgagaaaaaaaaaaaatgaggtgtggctgtaacaggaaaccatgttattgcaaagctctcctgtgaagagctggtacagaagagtgcagctgggagatgttcagtggtctccatattttggaaattagagctggactacattatagcctgacctcagccaggagtgtggagacttctggtaagaaaaatatgatattgacttgaacattgagaagtagagtttcggataatcccagacttcaccaaatacagttacttcctttaggacaaagttcatggatatgcaacgtaaacaacagccaatgacttcctttgttagcagtcagatcctggcaaatagcattacctgcacttgtccccatgggaagcaaacattctactctacatggagactggattataatctatgtgctgcaatgcactgtgcactgtctttcttataattggcctgtgttttctgtaggtagccatccaagtagccaaactcactaagtttgatccctttctctagtcctaaggagagtaagagagtatttgtttgacctgaagttctcactatcaatattgctcttagagggaggccaagacatttctgcagagtaacacatggaaacaggtattccagaagtatagggttccccccaccccccgccctttcttgttttggggggcaggatcttgctctgtcacccaggctggagtgcagtggaacaatcatggctcaatgcagcctcaaactcctgggctcaagcaatcctcctgcctcagtctctgggactacaagtgcatgctaccatgcctggctaattttttattttttgtagagacagggtctcactatgttgccctggcttgtctcaaactcgtgggcttaggtaatccttctacctcagccttccaaagtgctgggattacaggcataagccactgtgccttgcccagtggctttgtattccttctttcaaaaatggaatttaaaaacccaaattttgtgattgttctcatgcccttccctacaggagaggtgtcaccaccaaaagctttgtgggctgcatcaagaacctggaaatatccagatcaacctttgacttactcagaaattcctatggagtgagaaaaggctgtttactggaggtaggaaacattgttattaatgttcaaatgagtttccataagtgtccattgatttatcaacatcataacacaacaaaccagtggggatagaaaagagatgatggggaaatcagcagtgtcctccccacggaaggtttggccgcagctaggaactcaccatgctgttccatctcctctgtgtccagcccatccggagtgttagcttcctgaaaggcggctacattgaattgccacccaaatctttgtcaccagaatcagaatggctggtaacatttgccaccacgaacagcagtggcatcatcctggctgccctcggcggggatgtggagaagcggggtgatcgtgaggaagcacacgtggtgagtagggccagtgctcctgagccccaagctcaggaaattacttcgggaaacaatgagtggaaaatgactgactcataaacatttattgtcaccgtgttcctggttgtttatggatgt

SEQ ID NO: 19505 - DNA, 2300 bp, Homo sapien
ccacatctcatgagggagccctcggagaatcagggaggtctggtgattcttccagactcacggggctgagcgctggggagggcggacgctctcctaattccaggctcccacttgaacctgcgggtgatggtggcatttccaaggctggaacagagctgtccacaaagtgctgtgatgaaccgagctttcatttgtcctgggcccttaccaaggcagagacccacttggggaacaggcacctgggccgactgttgaggcacatgtgcctctggtcatagtctggaaactggcaggggctctgggagaagttcagggaagtgactgacatggggacaagccttcggtcatgttcagtcatcatttcatttgaggtccccctcttcgtggccacctcactccagcaggccctgtttggggagagaacccagtagcagagcccccgcgttcttgagagaggagggctcacaggctctgggaagggagaaagcccccatgtttttgggagaggagggctcacgggctctggagagggaagggccatgcactgaggaccaagacaaatttctggagttttgtttgaaacctggctttgtgatttcttggggtgtgtccttgaacaaggtactttaatctttgaggctcagcttttcataggcagaaatgaagaccggcccatcgaggacctccgaacactgcagaataatgagagaaaacatctgttgtgtgccaggcactgttctaagaactgcctggggcagccctcccagagaggttttatggttatccctgttttatagctgaaggaaagggcacacagagaggttaggtgagttttccaagttcacacagctagtatgttggggacctgggatttgaaccctagtagtctagctctagagtctctatcctccggcacatgcactgtggttggccaagaggtagaacaatggaacatatggctaggaagccacaggcttaagaattaaagaattaaaccatagttgaagaatttatctagagtgcatttcttttaagttataattcctcaaagagaccacatgatggaaatttttgaaaaagcaagagtgcaggtagttatagttatacatttgaaacctcaggtttcacaaagcactattttttgttttgttttcttttatcatccatggaaacgattttactgtttggttagactgccttgcttggaaatgtggcactgagttttgttgttacacctctaactgggaacagttcaaattcttacccaaaaactatcctcatccaagtttcactctcaagcctcatgatattccagaaaattatttttggaacataattatgatctgttccagatgaatggctttgcgattgaatagtgagtcaagtcagccttttgctctgttgggggagaagaccagaaaacacactcacctgaaaatgccctgggccgtattatatccctgtttcaacctacgtactcatctctaagtatgatatgggtctttaagctcatcctgcagatttttgaggatgtcagtgatgattgttttgtgaagtgatgcttctggtatatgggcacatacttgctttccatcataactctagtttccctaaggtattagataaaacctcatcagcaaagtgaaaatgtcaatataaaaattattctgaaggcaccagagttaagagaggacagttatattaaaggagattagaataaataaatccagttgataaactgaaatatttatagcagttatcctcctgtaaagaaatgtatttttaccacaatgaatactgcctacattaacattattttccttataaagcagctgggcatttgtcttgcatcttcacatggcaagcatatttttaaatattatcatctacacttgttatgaaagtatggaactaatagctctacagtgatctttgtgaaggagaactcagtaagtgtgttcttggttctttctaccctcctgagaatggattctatttcatctcttctgctttgcagctcccagaatgaagacccttccttccattttgacgggagtgggtactctgtcgtggagaagtcacttccggctaccgtgacccagataatcatgctttttaataccttttcacctaatggacttcttctctacctgggttcatacggcacagtaagagtgtttgtgcggccctaggccctactgtatacacacatttagattgctatgtggttgtttatgtttaatgaggatttactaattaaatatgtacatatgtataccatacaatttttatgagcatat

SEQ ID NO: 19506 - DNA, 2300 bp, Homo sapien
ttattgaattcttttgtagtttagcctaaaaggcatttttttcttaggtgttgcaattatagttaaatttgtgtgactctgctattgagataaagccagacttttatctgagaattgcagcagtatcagattctgctgaacacaacagattttaaatttatatctatatcagaaatataatgcaaaggatggcagtgtagaatcatgtcgctataatcgaaacctaagtaaatgtgatccatttttttttaaaatgacagttccaaggaaagaagaatttctttctgtgaacaaaaaagaaatgcaagtgcttcttagttaagaatcagaacattttacttcgaagcattgtaatttgtttcctccattcttcctaggaatctttattaaaagaaaatatgcaaaaggacctgggaaaaattaagcttgaaggtgttgcagaagaaacggacaacctgcaaaagaaggtaaattctttccataaccaaccaaccttcctcctggtccctcccatcagccctcctgagcagttgccttggggctgtctggaaggttctgattagatcatgccagcctcttcctcccacgagctgtgctccaggtacttaatcatcaaattggttttgaccctgccagtttctgtggtttagtgggaaaaggctcccgacttaatgtctgttgtcatctctgctgaggacagagttgggcagtctcttggctctgactttcattttctcctctgaaacaaaggtggggcggggatgaaaagattgctgaggtttcttccttctcctaaattcattcagtaacgaagtacacggtgagcccaaaagcacggactgaacatcagtaatgctctctgcagcttgctgggtggagcagggagggcacagacctcatgatgaggcatctgtgcaaacttcaggcttcaggctggggtggttctgattttagggccctgaatggcaagtgagcttgtttttctgtcatcagggaattatttattctgtttagcctgtgccagaggaatggcatttagtgacctaaaaaagaatctccccttctgcagatggtgaggaaggattattgtcaaatttactgttttttcatttatgaattttgtatgtgtgtgtgtgtgtgtgtgtgtgtgtctgtactgtgatggtgtatctatacatatggatgtctaatctccatcaacacatgcacacatacacaaacatcaccctaggaagtatagtttggctcctgttaatttagaattaacgatgttttggaaagagttgaagggtttaagtttgggtttaagtacctcatcaagcaaacatttggttggaaataggctgattaaaataaattctctgtatccgttattctctttggtcttgactagaaaacaccaaactcagactgggttactctacattcttggaaattacaaacaacctttcctttaacaaagagtaaaaatcccagtagaaataacagctgaggacagctaagtgtcagcctctgggctgctgacttcctggctctcgtcttgtgtagttctcgtagcagccctgggaggtaagcgttgctgtttcccaagtgttacagacaatgcttggagatgtctgggcctgtccacagcctggagaatcaggtctaaaatcagcttgcctgactccgtgttcttaactcctagagactaacatctcataggccatacaaatcagtaaggtttactttctatattctgtatatttgggttttaaagtgaatcgagggccctcacagtatagccactaggagaatctgtagtttaatacacaattagcctgcttttaaaaacatacccatcttttcttatgctgagtgagttgtaaattatttcattaactacttagtccatttctaaccccaaaatattaagctcggcttgcatgataatgctcatctttactctatattctggaatatatgttgttgcttataagcggcaacagtggaatattacaacttgcgtattatttaaagtcaaactaattacttaaagtcaaactaacctgagactttatttttccaccagctcactaggatgttagcgagtacccaaaaggtgaatagggcaactgagagaatcttcaaggagagtcaagacctggccatagccattgagaggctgcagatgagcatcacaggtagtgtgggcagtgtctagtttgaagtatctgtgcttatctagtaagaagtcaccattgctttattaaacatatgaatagatgtatatctcttgcatcgggtttccggaaccagag

SEQ ID NO: 19507 - DNA, 2300 bp, Homo sapien
ccacttgcctcccttgaaattacacacgtgagatccctgcttgcagttcaaagataaggtcccattgacctcctgcctgaatttctaggaacccaggatatggggagacccagaatatggggacaccccttgtgattcctccagtgtggttttttttttttttttttttgagacggagtcttgctctgtcgcccaggcgggggtgcagtggcgctatcctggctcactgcaagctccgcctcccgggttcacaccattctcctgtctcagcctcccgagtagctgggactacaggcgcctgccaccgccccccggctaattttttgtatttttagtggagacggggtttcaccgcgttagccaggatggtctcgatctcctgacctcaggtgatccacccgcctcggcctcccaaagtgctgggattacaggcgttagccaccacctccaagtttgcttttgatcaacatcctctgtgatttcagcgtggtgttgtaaaggactatggactagaaaccagacatggggtctagctctagaccagacatttgctgacactgagaactcacttccttatctcctggcaagcatctcatagagttgtgaagatcccaaaagataatctatatgaatgctaggtctgtgtgtgcagttatttcagtgcataaatgcttataattctgcattttaatagctatgtgcctaatactataatatttgatcatttattaaatactaagtttacttatttaataattacttagtaacattttaatagttacgaacgtctgcattttaaatttagtactgtatggagtattcactgaactatattgcatccttttaaaacggccaaactatcattttgttccatgatttttaaaaattaatcgatggctaagtactataactaagttctactcactagatgtgtaaggaagtgtcctcagaaaaacaggaattgatagagttgtcaaatagattcacacaagtgagaggaaattatcttcctatcaagaaaaaaaaaccctgcaaaataagatggtgggatgataatgagatattgtccctgtatatttatattgagaaaatgtgaaatctacaaagtgttatgaataccttttttttcttttttgagacagagtctcgctctgtcgcccaggctggagtgcagctggtgtgatctcagctcactgcaacctcccactcccgggttcaagcaattctcctgcctcagcctcccaagtagctgggactgcaagcgcgtgccaccacacccagctaatttttgtatgtttttagtagagacgaggtttcaccatgatggccaggctggtttcgaactcctgacctcaagtgatccacccgcctcggcctcccaaagtgctggaattacaggcgtgagccactgcacccatccaatacttttgatagaaaaaaaaaatcagaggaaattaaaaattctttatcggggaccagacatagttttaaaataataataattataataacagcagttgaagttgcgtgtcaggagcgcgtcctctctctccagcagtaagggtatctaattataataattaagtccaagtgaccttgccttctttaggcaaacaaagtcgggaacaagttgcaactcattttcagaaaaaatcctcaagtcctctgcccacggcggaaagggcggcgggtcggccgagcctgggtggcttcccgaggggtcgcctctcgcccagctcctggcaggggcgcgtgggtcctggcccggggactgcagggccgcggcggggcgggcagggtcagctgggcacatagtttctcggaatccaccctcccggacccccgcagcccagtttctcctcccctcagcccaccttctctgcccacctcctacccggagccggggaggcggccgcggtcagcccggcctccccgacttggggtccgcgtgcgccgggacccagaggccaagctgggcgcccccgggggaggggtctgggtggcggggccaagccggggcgggacggggcggggcggggcgcagccgaggggtgtgtccgagggcggctggagggaggggcggcaggactccaggagcggcggggccagggcagcgcggactcgcgtcccgtggagcgttccaggcgggcgcgcggctttctccccagacccaccgagtggcggcggaggcgagatgcgcgggggcgtgctcctggtcttgctgctgtgtgtcgccgcgcagtgccggcagagaggtgagcccggcccgggtcctagggtccctgtcccccgcaggcggg

SEQ ID NO: 19508 - DNA, 2300 bp, Homo sapien
gttgcagatttgaccatcctcacttgctgatcttgaagacattgcttcctttctgagatttcaatgttcatttcacaattaaagataaggttccataagcacatagttgggagaagtggcaggacaatgtaagctcatattaacaagcaaatgattaatatagagacttctaaagagcaggtctggtaagtatctagtaagtggacttcctgaagtaagaggagtgttggttgccacactaaaggcaagtcttctagtccccaaatttgccttgggaggatgacagctgtatctttcttggttctggtgtacagtggagaacagggtcaagatgagtgtggaatccatttatttttttacgtgtttataagcactagaaagcagtgagcactaagcagaggacccctcttgcggaaaaagtgcaggagagctcctgggtgcctctgtatcaccggtttgccttctagccagaatcattgctagaaccctgtcactcagttactttggttcctaatttaacctcttcccaagccttctattgcgttcagttagctaggccaggagcttacagctgtctggttggtgctggctcaatgtgcttattccctggaagatagaaggatcacttacaaaaaaatttacaattaaaataaaaaaattattttttgctgaagcattgtaaggtttttttaattcactcagacccaaaatcgtaaaactaaaatatttcaagacattacttgattcaccccccacttctctttctcccctgtttctcagcactttgcaccagatacagaaaccacgggttatgtccaaaccctggttttggtgtgaccaccgccttccgtgtactgcctgcggctcgcttcgggcccacacgggacaccgaggcatgatgaggacgcagaacagcagaagcgcgccctgcttcccgggcgccagtgctcggggccagcggcgtgtacccggcgggcccggccgggagcgggctggcgatcgcggggctcggcgctcccggctcccgcgccatctcccggcgcccgccaacttcgctccgcccgcggcgtagagaagctcgcagccctccggagcctcagcgatctcctggctcgcttttcccgcagccgccgagcagcgcaggcccggcgactccgggtgcagctggccctgtgcggtgacatcgccgtccggcgccaggctcgaagccgcctggccgcgcccgcggggtcgcaggccgctggtcccgcccggccgcgctcacaaactactcgcggctcgtgacccgggacaaacttctggcggcggcgcagcctcttccacagtcaccctccccagagccagctaccaaaatagaagacgcggccggggcgaggaggtgggcggggggagcccggtggccgctcctccccgcgcggctgacgcccgcttcggcggcggtagtggctgtggccgcggggccgcccccagccgagctcccggaggcgctcgggcgcgggccggcggggcacgggcgctcacgccctctagcgggccgcggcggcgccgggcggccgtgacgtgagcgctcccttcagccggcctgcggggcaccgccagtcagtcggggagcaagagccccgcgcgcagccggcgcgggctcggtcatcggcgcgccgccgcccggggctgggcttggggctgcctgtggagaggcggcgggcggaacgcgcgcggccacggccacggccaccgccacggccacggccggcagctcgggtcccgggtcccgggcaggggaaggggagaggcggcgagctcagcaaccggaaccgagggaagattttggctccgcgggctcgccctccgctccctctgccagcggcgccagacgccgagtggggccagggacaggggaggaggacccaggaccctgtgcccgcgcccctggagccgctggagttcggacttctgcaactgttggcactttgggggcttggcttagcgctctgctgtttacccgtctctcctcgctgcctcggaaccaaagctcccggccccctccgccctcgcgcgcccacccaccgccgccggggagcggcccggcccgcactcagcaccatgaggggacttgggacttgcctggcgactttggccggacttttgctaactgcggcgggcgagacgttctcaggtaagcgggaccgcctctgccgcccccgaggcgcgcgggccggcgcgggacgcccgggacgccgacagctccctggtggtagagccctaaggctggcgtcggggccgggcggggggcgcggcgggcc

SEQ ID NO: 19509 - DNA, 2300 bp, Homo sapien
acgtaaagaacatgactcctgactccctttgttttcagatgagagactcaagaccccaggacatgaaatcacttacctggaatggcatggtcaataaaggcagattatggcagtggcaatgtattaagaggagtatcaatgggaattgaagatccaagcaagttaaatatgtgggtggagggatacaaaaacgttgaatgagattctaacattttaggctatttacaacagcacagtgagtcaggggagggtccagtggaaagcgactggagacacatccggcagacaggcagaaatgtcagtttcacctcaaagttgtggcagaagtagtctgagccaagaagcacaggcattcctggggtcagcagatcagggcagaaaggtaagctgggaacaaagtgacattgaccttgaacattaggcaagggcttatcttcgaggctgatgcttcccagtcagtgcttcccagccttcctcattaccatggcacatacagaaagcaaatatgtgtgcatctcactggggtaagtgaaaagcacagtgtctgtccttctgcggggaggggggctatgtggaatggagggggggggttcacctggagccatttggtgcatagagagctctgttctgccacaggcagcatccttgttcctaccccaagggggacttgcttccatttgatcatttttggcctttgatgctcaactctggatgttgaaatgcatagccgcattgggagttcagttttgttggagacagaggctgtgaaggaggcaattctaggtgggtgtgtactcatacgaaagcaaagaagccaaatgaagtaacctgtggtcatgagatagcacgtattttttccagatttgtggggaaaagaacctgtgctgaaagtgaccaacaggtggggaggataaggtaggggcatggcatgagagaggtaagaatgtcagattttggagcgttggagggtcttaaatataaaacagaaaacttctattggctctaatagccagtaaaaagtcattctgaacagctgagtaaagactgatacgaggaatgttattctatccgcagctgcacaatattcaccagaacaaaaagaaaactagaccaggcatagccagtgagcacacaggtggtttccaaagttagggtaaagggttaattctacaaagtacttcagaggaatgtgaaagatgttataaaacagtctttaacgagcttgttttactaagaggcttagaaatcacttgagtgttcttttttttaaaacaaatgaaacaacagaatgtaaaagcgaaaagaggatataaacttaaatttagcttatcaaaactaaacttaaaccatggtatttccttttatagttattaaagcgataacagagaaaaatatcctttagtcacaacactatcctgtaattcctattttcctagcaaaacctagatattatgtatttgtggatttttatggaaacccttatcaagtagaataccagatcttaaaaccaaaaatgaataagacctttgcttagggagtcaaaaaaccaagttaaccaacgttatgtgtcattataatggtagacagcaggcctcttaagccatttgcaaacacaggcttttatcccacttgcttaactgaattttttaaatgcttgtcaaagcgaagacaggtctggccttgggaggcagataactccacttaaaaacacaattgcttaactccagagatttctgcaaagatttttggtttttcaagatccctaacatggaattgagaatatatatctacactttataaaccacaaggcagtagatccatccatcactggagtgagtctagcagcaagcctcatctttatgcctgtgacctgataagcacaaaccatacaccacctcctcacactgatcggctcagacaggagcaaatggggccagactctaattacccttccagagggccccagtcctacagaggtcaggacatgcacttcccacagggccccaaggaatacttttaaaaacacacccataatctcacttaaaataaaaacgttagtggctcacatctctgcctattccaaagtatacaaggaaaccaggaaggttctggattgcagggagaaaggcaattaatgagtgattactatttaaagacaaaacccctgtcaaaacagcttgaccaaaaaaaaatgtgagttttttttgttgtttttttttttaactcacaacttgcagtagtgctgccagcaaaaatagtgggtggtaattctgccagctaaaagggtgccgaaatgcagt

SEQ ID NO: 19510 - DNA, 2300 bp, Homo sapien
attagttactttgatagatattcctggtctaaaatctatttctttttattttttgtaagtattctttctgtctaacccctctttaaaataaaaagttatttaggagtttaatgatttggggggaggggcagattctggtaatgtgatgaacgagatggggaggagcagtcttgcaaacctttggtttagtagagaaccaaaaccagtttggaaggggatacaggtctctttctagccatatgtatttgactgaacatgtttgtttggaaaaactagtagttttgtaaatcatccattgagagccagcaagttatctctacatttgtgaaagaaaaaaattgaggtggatatgggtttcctttttctatgtgtgtccgtattgttttgattgtatagaggtagatatttttcttcattttgactgaaagtaaagtcagaattatatgtatatctatacatatatatgtatagatatatttattttctacattttaagaggaagcagcgtgttttaagagtgaaagaaaataagctttgaaagcagacacatcttgatttgagtgctagttactatcattagcttgcttatataatcttgagaaatcttttctttctcgaagccttagtttgcccatcagctaaatgagcacagtacatcctatatggtagggttgttgagtatgagtgttaagtgaggtaagttaagtcaacacaacgtagtaagagatcagtaagtatcaaattccattctcactcactatatgtaatataaataggtttaaatcaacagagtgagtttatctgtaactgcagactttctttgccataacacctttaaaaagttttaaatgcttaaatttactgttctttcaactgccagtttagtgttagttcatatcattttgttttggccgtatttgctaatgttattggtggagtcataccattttctgttggcttcatttataattctattttttttttggctgtctacacattatttcattttgggacctgctacactgttggatttttggctttactcaccttttccccccttctccacttttgacccatctcctcctatttcattttggcaccagtaaagtaatggttcatgtgtatgctggaagcctaccccatacatctctatgggtgcagtattcctttttattgtgttttatttttcaaaatgacaagcttatatttccagtatgtgaaaatgctttagaacttcttgttgaatatagattagttgacattttaagtcttagcccatgttgtatggttgtgttttggttttctatttcttctttactcttttcatcatataccttgtagtttttgtcatcagtgaatgatttttgagaatcctaatgtgcacagcattctgctggatcttgtactaagcagtttaaagagaccctgtgcaattacccgacatttcctgtgtgcttcttataggcagaatttcatagaatacaaattatcctcttctaggtacttgaatctaaaacaaatatggacacacagagcaagaaaatagctgaacagtgagtatgtgaagagtaaaccaacagacaccaggattattcaccataggccagccttctagctcccaagatgttccctccctgccagtcttcattgtctctcagtattgagatgtcagcctcctttccatattacctggaataattgccaagcagtcatgccacttgaaaatgaggtaacaagtcctttgattgaactggcagtcccactccctgtcatagcatccttgtatcagtgttgtttattcatttcatggtctgttctctcaagaaataagcatcaggagtggacagtgatgtttggggggatcccaaggcacatgggaggcagatcttacctctttctgaggaggccacagagagctggatagtccctctgtctgctccctggtagctggaatgtggatctgtgactccatgcagccaactggaagcttaatgcagggaatgtgaactttgaactagttagagattattcactgtgaggcttttgcaaagggcacaggctggatgagtggccgtgagcgtccgtgttcctgagcagactgtgctgtggcccaatcctgtgcgtgtctcctcttcaggctcctgccggagcatgcttctctaatcttaccatttatcactgacccttcggtgaaactctcttctgtttaaatttaccagggtacactttgtaatacttgggaccaagaatttgaagatagtaatcagacaaatcaaacaactagtagtagtggagagaca

SEQ ID NO: 19511 - DNA, 2300 bp, Homo sapien
caagcttccaggagatcccgctgcacgtaactgagatgaccatttagaagtctgatccacagggaccttacatttatcagcaccagatattgtcttcaaagtgtaggattggaatttctgtctttattccaattttatactttgaagacaatatctggagctgataaatcctttatcttttttcattataaaagagaatatcaccaaacttagtgataattctcttttataatgcatctttattgatattttaagttagaggtcagcaaactttttatgttaagggccagataataaatatttgaggccttgtgggccatatggtctctgtcacaactacgcaggtctgctcttgctgggcaagagcagccataggcaatacattaacaattaagcatgtgttccaataaaactttatttgcaaaagcaggtggtaggcctgctggcccatttgaagataaagtatagcataatcaaattttttcctcatgactaaaaataatagttacaaataaacactttacaaagcagaacatagagatcatataaaaatccttcctggtatttataatatactttttacatggtagacttagcttctgattatagtttgagttcctttttatttgtgaatacctggctgactgacatagctattttcgagtaactttttgttcatattgtttacctttttggatattaggtgctctgtttctctttttctttttctttctttctttctttttttttttttttcttgagacagtgtcttcctctgttgctcaggctggagtgtagtggcgcgatctctgctcactattgcaacctctgcctcctgtgttcaagcagtcctcctgcctcagcctcccaagtagctgggactacaggcgcaagctaccacgctagactaatttttgtaatttttttagagatggggtttcaccatgttattcatttgatcttaaactcctgagctcaagcgatccacccacctcagcctcccaaagtgctgggattactggtgtgaaccacggcacctggcctgctctgtttttctataaaacaatttcatttttctcaaaaggagaacaggtcagactctcctacagataatgcggaactgcataggagtattggttggagcaacagtagtctatgaccaaacaaaaatgttatgtgtataaaacttggaattggtaccaactttgtaaccatcttagaaataacattttactgtgtacagcttattataacagtattcaaaattgcataatacgtcatattaagaaaattatctctgtaatgcgttaatgcactgggagctgcctattctctgaccaaactgttagtttgttaatctcacttaacaaaactagaatatgttcattaataatgtgtgaaagactgttacaccatttttaactcagttgctgcagttgtctagttgtaagcagcactgcttgcatggtgcagagggatatttcaaaatattatgcagcagcagttttgggtttaattgtctgcagatggtagatgatctattttccttactcgctgccacatttctaatagtacccaggctgttccatgtaaattagtaatctttcatgtaagcctgtccttaattttccaatatttttttgcatcattttccagctgtatcatgttagaactgatgttttaattttctattttttttaaatatctgtgtgtcattaatgttaaccacttaaacacaactgctgagctgtgcaggcaaactaagaagccagcctggtctgcttcaagactcttaatcatttctttgttcacatgttaaccatgataactatagcaaaggcaattcgtagtttctattcttttccaaccaatacttggagatgcattttttattctcttaaagtgaaaaaataaagttcctgaatggaaagctgcatgaaatttagatatcagagaaatttttctacataaaaacgtttttagtgaaagagtgtaatattcttctttacaaaagggatttagtaagaagagaaaacattgtgatttcaacaatagaatgttgaaaaacctaatacgttctaaaagcctaaagtttggatcaccagaattaacaatgaatctttcagcaccacactcaatttcaattggaaacactgctcagtcttcacctttatttaggatgaatgtttttggttttgttttcctttttttcttcttcagttgatctatccaagatctcagccaaaccttgcaactgtgtcatagttagaaatccaactgcctgactagagcttgtttaa

SEQ ID NO: 19512 - DNA, 2300 bp, Homo sapien
tccctttcagaagttccaaggtaagcctgccttaggctgccttagatcaggaaaaggtcatcactacagatgtaacaagagctgtcagatgcttgcttttattttcaggtgaagtcctatacctctgttccttagtgctattactgttagagagatgggaacaggagagagtggaatgagcagtgtttacctccttgaaggaaagtgctatgccaatacaaggaggtgctgcgcaggtcagcagtgcgccagcatactggtttcgtacaactcagaaactatcctgtttgcacatagcatttgctgaaaatattcagctgtctaggactagtgcccagtagagagattggcagaaaaacactcattttagctggctttcaaattatttttcaaattcaacacgaagtcagttaaggaagaccattagattatgtcaaaaagcagtttggaaaacatttatcatttgtagggagcccagcactgacgtttctaaattgtgtgtgacgttgacatgttcccatatgtcacgatatgttccttacttcccttgttatgagcttgggttagaagtcactgttcttttgaaccttgatgtcacctcagggcagtttgctagcactcagaaattcaaaattgcctaaagtgcgtggtgggatgtctatctgtatcataccgtgggcaaacgtctgacttgaaggcatcaaacaggcaaacggaagaaccatgaaggatgctaagttttgactgtgtctgggtagccaattgggagtgtattatgtagaaagccaaataaatgcttatttcaagcacttcaaggtaaaggacaatatttaactctggtttgttttgagagattagagtagtttatgcccataagaaatattcagaaatagttgttgagtgtgtgagtgaacagcagggcattaaataacattatagtcatggtctttatgagcgttaggccaatgttctatgtaatgaggtaaattatttaaggttcttataatgtgttattttaggtaaggatgttgctatttactcagtgttttttcacggaagatagtgtgctctacagattccgtgtcactaagctaagcatctatgaagcattattgataatcactcagttgactattacatacaaatttcaatgtggtcatcaactcttaaatttctttatagttaaaggataggaaaactgacaaaaaatgttactttttatcacttagtagaatttcatgagtcactagtttagaactttcatttccattcacaggacaaggttaaaagaaacagaattaagaagttgcttaggagtaggcttttctgtttattgggagtcggtattggacattcataaatttataatctgcattatgtttcagcgatacgttaatgctgagttcataggattaatcaggccacatgctgtcctgtggcttcactaatatactcctcagtcacatcagcactttctctttcacaccacacacaaaaagccttacggagcagtgggtaagcagtcctaacaggcaaatgttcacacatagtgaaagagaagtttagtttttctgtcatggttgctgaacaagataatattctctaattctttgataggaaaatagagccaaggcatttgactgccgacacactctcattggaactccatgcaggacttcaccagtcattagaagctcattccaggaatcccagcctcgaagggatcatggagaaggtgggatggagtgacctgagtctgatgggtagaaacagccacccttgctctctcccaccttcttctgtgtggacactctgcctctggaatttttagtaactgggtacctgttggaagattagttccttttgctaggctatgaactagagggagggtgtgcattcatttcactaaagtaaaattttgccttttctttgttgttagacaggatcttactcccatcatcctggctggagtgttgtggcacaaacatggctcactgcagcctcgacttcccaggcccaggtgatcctcccacctcagcctcccaagtagctgggacctacagacgtgtaccactatacctggctaacttttgtgtttttttgtagagacagggttttgccatgttgcccaggctggtctcaaactcctaggctaaagcgatctgcctaccttggcctgccaaagtgctgtgattacaggcatgaaccatcacacccggccaaaattttgccgctgatttttagaaattgaattattattttagactgaagttgtatctttttaaaatgaaagccatacc

SEQ ID NO: 19513 - DNA, 2300 bp, Homo sapien
cttgggacatattcccaggggattaggggcactataataattgatttaaaatagtgaatatgcacttacctgtcctccagaaacactgcccaacctctgtcatttagttcattaattattctagtggcagaaactacagatctaccttatggggaagatattttattttgggcaagaaggtcttcagccccacaagccatgccacatgcatctgcctattaagacaggcggtgctattaatcagaatggaccaaattaaaaatcttgagattacctttgcagatgcgtcttgctttgtaaaatcacagtattcctgaaaagccatgcataaatcagtttctttaatcccttacatttatatagtgccttatggttgcagcagactgcagagattgttagttgcttttttcctaacaatgctagaggaaaggaggggccactactctcattctcatagaacagaagagaaacccacagctaagaaatgttctgcggcggagcacagtggctcatgcctgtaatcacagcactttggaaggctgaggtgggaggatcacttgaggccagttcagggtctcacactgttgactagcctggttaacaaaccaaaaccccaactgtacaaaaaatttttaaattagccaggcgtggtggcacgtgcctgtggtctcagcggctcaggaggctaagcaaggaaaatcacttgggcccaggagttccaggctgccgtgagctgtgatcgcaccactgcactccagcctgcgcaacagagcaaggctgtctcaaaatcaaaacaaaacaaaatgaaagaaaaagaaagaaagaaggaaagaaagaaagtaaattccgtgatggtaagtgatggatctgtgtttcaaataatatagagggatcatattttacatattctcagaattcatattataaagatccctacagtgactgcacagttaagaatgctctcatagatgtaaacttccaatctacactgtgggcaacgctagatttttacaaatcaggtttgctgtgtaacatatgcgtgtactgtgcattactaaacctagttctaaatacagcacagctgaaattttgtgggtaacgtgatcattcggcaaatgttgccagcccctatcatattcagaaccctgtgttctgagatgctcaagttcaagctgaggaatttgctaaacaaatctctggcaaggaatcagcagtgattttctgtatccttaaatccttccaaacagaaatggcaaaacatacgacccgagtccataattcctaaagtttcaatcttctcgcactgtttgagttttaactcgcttattcccccaaaggagtatgccatttacttaatttaaaaattaaacagcataaaaacttctgaactctgagtgagacagcgatcagagttaaaaataactgatttcgcgcgtttccgtgcaaaatgggagacagacgtgacggagagagaccgagcagtgccacggcccggtagagggtgcgggggcttgcacccgctggtgtttgtgagagagcgctggtgtagacgcgaacgcagcgcaggcggcccggcggcgcggcctcaggtcggggcctttccagcgttccagctacaccgagcgcgcgggggcgaaaacatgtgcatggtgtttggggactgtgcgcatgggagtgttttcactgtcaaccagggttctttttcttattttgaacccattttcatgatgcaccggaatgctgaagttcaaaattgcctacggagaattttaagactaaaaccacactaagtttcttgtgttaactataaatgcgggtcagagtgaaagccgagtagggaggagtgaaaagggggaaaagggaagagataagaggaagaaaagatgaaagagccggcggaagagggagggaagcgggggcgggcaggcgagcagaggcagggaaagagcggcgcgggttgcgggaaagctccgcgcgcagtacccaaccgaggcccgggcgcgcggtcctcccgccggcagggggcgcccacccgcccgcctccggcccctcgcggccagccgccccgcccgcgcctgcgcttcctgcccctcctcgtccgggatgctgctgccgctactgcggagtagctgcttcccttcctcctctcccggcggcggcggcggcagcggcggaggaggaggaggaggggacccgggcgcagagagccggccggcggcgcagttgcagcgcggagcccacgggccgccggggccgctccagcgggcggaagccgagcccggggccgaccccccgcgcgc

SEQ ID NO: 19514 - DNA, 2300 bp, Homo sapien
tacccccaggcgagtattctctttcccagggatgttccttgctgagaaaaagaattcagcgatatttctcccatttgcttttgaaagaggagaaatatggctctgttccgcccggctcaccagctgtcagagtttaaggtgatctctcttgttccctgaacattgctgttatcctgttctttttcaaggtgcccagatttcatgttgtttaaacacacatgctctacaatttgtgcagttaacacaattatcacatggtcctgaggcaacatacatcctcctcggcttacaagatgacaggattaagagattaaagtaaagacaggcataggaaatcacaagggtattgattggggaagtgataagtgtcgatggaatcttcacaatttatgtttagagattgcagtaaagacaggcataagaaattataaaagtattaatttggggaactaataaatgtccatgaaatcttcacaatccacgttcttctgccatggcttcagctggtccctccgtttggggtccctgacttcccgcaacaatagaatagtagtcatcacagattatgcatttgattagtaaattccatcacagagtagcatggcagcagtgaaatcctaactctacattaatatgaagacagtgttttgtcattaaactgtgctgctttaaaccagatagcaaatatctgcgctattttgtgcgtcttgtgtagtgtcacttgaaattgcagtttccttgcagctgagtgttaagccactgtcttcaagttctccatcatgcagaacctgcttcctgggtcaaggcagtgtctgagcttcctttgactttggaaagcaaatcatttccagaactgaaagtgaaattgaattaagtagctttccttcagggacatctgaaattatgtgttatgtgagaggttaagaattgacatggagtagtgctctctagctttgttttcttgtgacattttatattcatgcaacttctctcctagggcaggagggctgcctccctggccacaccctgccccagggctgtaaacatgccttttgtgtggcattggtgtccacagtgttactaattataaaaatcggtcacatgtcttccacttcccctcaagagcctcatctgactgcagcacctcattggtgcccagagacgggcagtcaggggcatggccagggccttgccctctgcagccaccataccactcacaaacatgggcacctgctggcccggggagctgggatcgtctacaccctgggtcccaaggaagctgtcaggaagtcgttcctgtagggaaggtgcctctaattctaaattcagccagcatcccttttgtttcccttagttatgaaaattgtgtaataaaatattgttgtgaaatatttacattttgtataactggaaggcatataaggtagcatacacaaatgaaaacttggttttaaaaatatatctgaagctttacaggctaaattgaaaaggaaatatacatgatggtttgcttagtaatattaaaatgaataaaaattaaagttgggtatgttaatttgtgtaagagtaaattttaaaatcttctcactgttgatcatataatgttatgtttatatttacctaaaattttcatgagtactgaaatttttagtacaataatttctaaattcagactaaggctatttgactaaagttgattaagtttgattaagtttccagtgttccatataagaattttccctgagaaaacatccttttaaagccacttatttgttgatgtagttattaaatgtaattttaaactggtttctatgctgaactgtggtagttataagttgtgttatgaacagcaaatactagaccgatcactcaggataagacataacatgggctgaccttcccagtgtggactgaagcgtgagagatgggaggttatagacactggtgcagatactgcttttccttggaattaagtgatgtcaggtttcgtggggttttctttttttctgataatgataacaaaatacacaaataggattattttgtatgacaaattgcatctttgttgtttttgcttcacatttatttgttttatttacaggtgttgacttcaaaatcaaaactgtagagctaagaggaaagaaaattagattacagatctggtaagtgggagagtgtgcacccagtaatgtgctgtgtgtgtttaacagtccatgtacttgtctaataaaatgaactgtttgagctgatttgcctctcctactttctcctcttttgctcattttaaaattaaatggaca

SEQ ID NO: 19515 - DNA, 2300 bp, Homo sapien
atgggcaaagagcgtaactaagggaggaagaatgaaatggattggacttacggaatggttgattgcaagttttctacatggaatattccagtgactcttttcctgcaggaaggttttgaacagtgactcatatatctactacaggccagccattttgttgatcacataatactcaaaataagatttttatcttctgaaatattttatttaaaagatgaaaaccttttccttcattattgctatgcagcaggtaaaaaggaagtgttagaatcatgattgtaatttgtattactgttttaaagtaatgcgtggcttctttaggagtgaggcacagcccttgtgctgctgctggtgtaacctgctttgttgtgggcgtgttgtcgtcgtttcactctcatccattgagggcatagaaggcgcctgtgtagctggaaacggtccctcaaggaggcgcagtggattgtgctatgctaataatagatagctctgctccgattttctagactggcatgaaagcattgccattcggttttcataggaggatcttgttggaagaagtgcattatttactatagattcctaaaagctaaaagtaccaaaagctgcaggtgtctgttacatttttacgtcacgttttatgtcattgccacatatttcagtttgttgattacctgtggtcagaaaaaggaccatttttctcttctctgtactttaaagtatttctacatgaatgttagaactttatgtaagtagctaaaataaaacatgttgactaggatgtagtttgatgaatttatatccaaatggtgtcctagaaattatttacagtgaacttggagttgtgttgaaatggacttgaagccgtgaaatttgcctcttacctttaggcaaacacagaattgaaatgcttcatataagggccctttgttctgcctgtcggaccagtccactgttgggggactttgttttaaccagcgttcttaggtcagcatcattccttttgttctctgcttggaagagggggaatatttcataccctatattggcgtgtgccctgaaaattagtaattaaataatttaagtggctatattaaatacagcaaataagaggctttgaattctccaagcgttgttgtatcaccaaactgggaaaacagaattgcaggaatttttcaattgcacaaaaaccagatagaaaaatcagaataaggtggcatgctaactgtagtaaacgatgattgagctgacgttcataacttgcaaacctctagaaatccgcaccttatcattacagtgaaaactcaagtttatggggaaaaagagggaaatattaggattctgccttttcatagaaaggtgaaagcatgatcagtgcattgatgtaatctaattttctgaaaaggagagatttgtgtgggatttttatggtgctggcacacggtagatatttaagaaatacttgctgaatggaatcaacatttcatttattattctttggccgtacctgatagtagataatttagtatgtaagggaaataaatcaagcaaaggcacttttgagaggaatagaaaataaaagctttctcaacccaaatattttgggagtgtggaatcgtctctcaaagaaacatgcttttctacccccagccttcagagccaggcccaaacagtggcatttaaggaatgggcttaaatggggagtgctgaactagttcatgtttcctcattgggatttttgtcaactaaatcagtttgctcatttgcgttaggacgattgcctcaggttttgaattttgaggtttctatcctctttctttacattggacttaaagtcagtagaggcagctgacttcttaatggtgagcttcttaatgtttctaagattcctgagtatgctattcatgcaaaaacattttaagctacatcaaaattgccttttactatccctgttctttgattgtttttattaaaactcctattatctgtaatttctctggttttgtgcctccagtttctggattcttaagtcattgaatgtgaatggaagtgcatgtgagttgacttatactgaaaaccagattaaaattacctagaataaaagtttattaaagtatgtaattcctaaaatgcttattgaagaccttaaatctgattgttatttaaatttgtggttcagcgatattgtgttaaccactgatttcagagtagaaaaaatgcttattatttttaactttttaaagaaatggggaatgttttgtaacagtactcaaatagcacagaatatttttcaacattaaaaa

SEQ ID NO: 19516 - DNA, 2300 bp, Homo sapien
gacgcgggagccgggcgcgcgccgccagcgccgccgcggcaccggtgaccgcgagcccggagcgcgaggtccggggatgcgagcggccgggagccgccgcgctgctgagccgggagaactcgatccgcggtgacctcagcgaggggcgagcgcggcggcggcgagccccgcgggaatcctcggggccggggtgcggggggcggggacggcgggagcgcggggcgcagcccgggcggggctgggacagtgatgagagagcgcgcggggaggctgcacgccgccgccgccgccgccgccgccgtcgtcgtccggagcatctgctgcctgagctgctgccggcggacccggccatggagacactgaacggccccgcgggcggaggtgccccggacgcgaagctgcagccgcccggccagcaccaccgccaccaccacctccacccggtggccgaaaggcggcggctgcaccgtgcgccctcgcccgccagacccttcctcaaggacctgcacgcccggcccgccgcgcccggcccggccgtcccctcctcgggccgagccccggctcccgccgccccgcgctcgcccaacctcgcgggcaaagcgccgccctcgccggggtccctggccgcgcccggccgcctctctcggcgcagtggcggcgtcccgggcgcgaaggacaagcccccgccgggcgccggggccagagcggcgggcggtgccaaggctgccctgggaagcaggagggcggcgcgcgtggcgcccgcggagccgctgtcccgggctgggaagcctcccggagccgagccgccgtctgccgctgccaagggccgcaaagccaagcgcggctcccgggcgccacccgcccgcaccgtcggccccccgaccccggccgcccggatccctgccgtgaccctcgcggtgacctcggtggccgggtccccggcccgctgctcgcgcatcagccacacggacagcagctccgacctctctgactgcccctccgaacccctgtccgacgagcagcgcctgctccctgccgccagcagcgacgccgaatccggcacgggctccagcgaccgtgaacccccacgaggagcgccgacgccgagccccgcagcccgaggagcgccgccgggcagccccgagcccccagcgctcctcgccgcgcccctcgccgcgggcgcctgtcccgggggccggagcatcccgagcggggtttcggggggtttcgcggggcccggcgtggcggaggatgtccgggggcgctcgccaccggagcgaccagtccccgggacccccaaggagcccagcctgggcgagcagtctcggctcgtgccagcggcggaggaagaagagctgctgcgggagatggaggagctgcgctcggagaacgactatctcaaggtgagccgcgcctcggccgcaggtgtcccggggcgcccccggagggcctggctgcggcggggacccgccaacccctccttcccgggcctgtccagcgccttctccctcctgctctccacggtcctacccccgcattgtcaggcattggcaacttaagcccaaacttctggaaggagaagcaagacctgtgggaccccgccagttcgcaacccacttctcttttctcgcgtctagaactcttgcgtctcttcgctgatacttttacttttgttgacctgttggggcagaggaggctgtaatcgttttggggacatcagcggacgcccccatccccgctcagaacgtgccagcctcacctgtaggaacaggtgatccttcgccagggagctctagccgggccacgtgcgggcgtggcggttcaggataatgccactggagggcccccggctacggacccgcttgccccttctcctgcaattacggaaagagctgggggctctcagggtctcctgggctccgacatcccgggtagagggggccgcgccgttttcggtgagcaagctgaagctcagtagaggtccttggagtgtggcccgggttgaggagcaacggtgttgcgcgggccagtcctttgtaagcatccaggagccggctttctgtgtcaggagaggccacgccagcactttctaaggaatcgcggcgcctgctgcactctctgagtattttccggcagggcctgcgggcagtggcgtcttagtcgccttagcactgggtgcttaatccggctccatcttttctccacggagggggcctggtgctgcagacggggttcccggggtcaggacgatccaggtgacttgagagaaaataaggggagttgtattgacaccaactgtt

SEQ ID NO: 19517 - DNA, 2300 bp, Homo sapien
ggctctccagttgcaaagtctgaaagctagagacattttatacctggaagctgtatcttgcatcttagggctatattgcattttaaaaacttttgtcttagttgccgataatcccaggcattaatgactttggcaggctttctggaaagaaaagcaatcacaaaccattctttccatgaacagaatggccagagtcactgtatatttgtatgtgtggatatacatgtacatatacatatacagatattgacttagtgttgaacatttagtgattattgcttgtattgaactgatttgtattaatgactcagtgaaacaattaacctctttactcagaaacaagcattgcggttaggttctttctcaaagtctgatccattagtttcatggatggggtgtgaatcaaacttgacgttgatttttgaagattcagaactaacttcccactctatcgaaagagtgacaaccacaaggctcattttaaagctttcagtctccagttgacctcctctaggagtgggtagtgcaggggcacagctcccatagggcgtcttcaaagcctcagtgatcaggcatcagtaacaacctcctgtttgtggaaggtttgcagaaggttgtcaagcactgtcctgaaagagctgtgttctctggtcccctgaagagcccaaaccacccattctgtttatgtgtgttcagctgatcagctcctatgctcagtccagtaacttccagttccagcagatcttcccacaaggaccaggatttaccaggagagatttccatggaggaaaaaagaaatgaaacttggttacgagttcacaacattttcagtgttaagattgatctttcttaagacacattaggacatcttatacttttaatattttcatcattggtatagaaattctgtaggagcacttaggagccaagaagaagaacattttatgcatttgactactgggaagttggtgaaggtttcttctttaacatctgttctccttggtagcctattgaaacaggctccagatgagtcctggtcaagtgagtagctcgttctcttgatgggatagtgtaggcagagtggagagaacctacatgctggattgggggatgagttgccatatctgtgccctttccagtagaccattgtgtgcaggtaaggttgaccgaagcatcatcatcaccccattttgtgccaacccttatttttccataaggattcacatttttatttgttgtgtttcttgtacttaatcttacctaggataaacacatcttcaggagatttctttttgttcatttttttttttttttttttttgtctgaggctcggatgttgggcaccttgttctttattgttagtcaattcctgtttttaagaataaatacaggattagcatgagtggtaaaaatccaggaacaaagggaatagcaggacgagaatggacaattagggtgtctgagtataggagagatttttttttcttgaaccttaatattaattgaataaagtaaatgggaataactgagtgcatgctattctggaggcatctgaaactatcaattatgaaactagtcaagaaaatccctagaatgtttccttaatcttcctccttccaaattgttcctcctttaaatcttgtgtaacccttcagtagagtgaatatctcatacctgcagctacatctgtgggtttgggaagaagctttcatcactgggctgcaagactggaacaaagcgagcgtgcagttgtgtctgatgttagtcgcctttctgacttggtgtttgtaagtgttcactggcgcacctgtgtattcattcagcaatatttattgaggacctaccgtgtgctccatgctgctcgggatgcagagaggagaaagacagacaagcttgctcccctctgaagcttaccttgttagtgtaggtgacagacagtaagtaggaaaaaataccaatactattagatggcactcagaggtgggaagaaaatagagccagcaagagactagagactcgggctgatgagggtggccaggggaggctttgcatgacgtcagattatgtgatggaatgagctctgcagagatctggagcggggagtgttttcagaagtgggaatagcaggcgaggtcttgaggcctgaagaagcaaaggtgcgagcagtctcagaccctgtgctagtcgtgggcagggagggagtgtggccaggaggcctggaaagaaggaagcccctggagggtttgagtagggagtgaggtggtctgatttgcacattaaaaggattactctgctgggtg

SEQ ID NO: 19518 - DNA, 2300 bp, Homo sapien
aaggtttccagaaatcaaggtgatttgagggctctatggggaccttctgcctgcatgagggggtgcagataagcacgtataacctccagcgtgtttcaggacccttcagagatcttacctccttccccaatttttcacttcaacttgttggggaagacccccaggggttggtcgtattaccctgagccttccttgtcatatcatttttccccttccgtggggtttgtggtgaacaaggagggaccaggcagagtgggactgcctgagtccctggtccacacgcctgtttgagccaaaagcttcccgcaccatgcaggcaactctgcccctcgcctgcacctcctggactggctccaccacatcaaggcctcaccagctgcaagtttccacggatgctggtcacagcaggcggccctgcccccaccttgtccagcccagtctcgagccccaggctcaagaagggtggagagtggggctgagtttccttgcagctggacaatgctgccctctgtgatctctgctgctgtggatttctctgctttagaggtggagatgggatcatttagatgatttttgacaatggacagacactggctctcaagttaacaatggggctgagggcactcccctgttttctggtcccaagcttttaagtgtttacaatccatttccattgatagatattttagcttaaactccattccttcatgggaacaacaaagacctgtctatgtatttggatttcttacaaatctgtgtttaacaaaaattgaaaaggtgcttgtgtttgctgtacttttgaaagttctaagaagctggggttgtttaaaagtaacatgccaacttctggtacatactaggtacttaataaatatttcctgaaagaatgaatgaacaaggccaggtgtggtggctcatacctgtaatcccagcactttgggaggctgaggtggtggatcatctgaggtcaggagtttgagaccagcctggccaacatagcgaaacctcatctctaccaaaaatacaaaaattagctgggcatggtggcacactcctgtagtcccagctactcgggaggcagaggcagggggcaggagaattgcttgaacctaggaggcagcggttacagtgagccaagattgcgccattgcagtccagccagagtgcagactccagagcaagactccatctcaaaaaaaaaaaaaaaaaaaaaaaaaagaatgaatgaacagataaacgagcatgcttttcctctagtattagtattaaacacaacgtatgccttttacagcccatgtattctgtgtaggttctttcaaaaaatacgtcattaccccagcagcgatgatagcatagcccatttgcctcagtagttgtgagtagggcagacagccttacttcaagttagtcacaggattgctttttatgtctacctaacccaaacccaaccaaatccttcatgtgataagttctcagaactcaaagaccatgtgacatttatatgttattctcctaacgtgcaaagaaggaaaaagactctttaccggctcctttacccaatactaattgtgtttcagacaaataagaaaattaatttcagggagctagagcatggtgatttatcatacacaaaccagtttatatataataaatacactttttaggtttatgatttatcatatacagaccattatttcatttgaccctcacaacgacgttgtggttaagtgagcattcctgctttagatacaaagagacaggttcaccggggctctgtgatgagcccaggtcccttagacagtaggaggggcaaagctaggactccgggcagcatgtttgaccccaagtccagcaggcctggttttgtcctcagctaagagatgacagtgggcgtgtcatcctcccgaggacgcacagatagcgccagggcaagctttccctgtggcagtggctgcacacttggtcgtaggtgttgggctgagccttcctggtcatatcgttttccccctttccatggggtttgtggtgagcaaggagggaccaggtagagtggaaggaggaaagttgggaggcgccgagggaggcatttctctttctgccaaatgatgagtgtgcgaccagactgcggcagagaacgagccatgctctctgagtgtaaaagctgcattgtgagcacacgtgacgatccgaaggagttaattctcccccgggggctgacttgttccacagaaggggcgacaggcctggagagcagtttgaagccttttcctccacgagggctgtgggatttgactcccgca

SEQ ID NO: 19519 - DNA, 2300 bp, Homo sapien
aatggcaccttttaaaaacatccatctagtttcttttaattttctatattttaacaagagagctaaaaatctccatagtgaaaggccaggtctagggagcgtcatttcctagaaggggaagcagtatgaatcaggagttttaagcaaacatccctcattctgatgttttttattcacaaagacatttcacacagaaaagaaaactcaattatgctgcaaacacatcctattttattttattttttaataaggcatgttctggagccactttgaatctccacagtgcttccttttattagagaagctggatgtggatctgtcgcagagcctgggtcgggagaggccgccctgtccctggtgtgaatgtcactctgacagccttgttagtttggtctttgaatatgacattgtgttaaagaattgtacaatggataattctgggggcagaactcttaaaagccttttaatgagaatatccctgaatttgctgccaacaattgctttcccatgaggctctaatggaaacagtacacaaagctcccataagtcagcccagcagcccggccagagactcacacagaccccgccggactaactgggggaaagacaacatggacaccttcatgcagactgaggcagggctggagctggaggtcctgccggcagctttctttgctcccttctacatttcccttgaaataaccacggattttgccctcaggccaaccacgactctacctgtgtggatcccctttagctctctgcccgtagctcctcaggggtgtgggagggggcccaatagcacacctagtatcagcgacatcaaagaagaaacttttccaaatttaagcagaaaaaggatttgttcctcaagctgcacttacaaaatgcctctgtgtcttctgccttatggatttttatatttgaggaaagaggaaagaagataagtgattattttgaaagattgaggcattttggcccgaccaaaactgtgactactactcatagttgtaccagcagcagcagttgtaacgctaaagaggagaaaaagaagtgcattcttacacatgacacatgttagcagattgcaaatctgggcagtggaggagccctgctgctcagacaccaccattcactaaacctgggaaaggggcggcctctccaaggccggcattcttataaacagccacagccagagcaaactgaagtcagaacccacggacacccactgacacatcaatgcaaccacgcaaaaatgaactgctaaaaaaacacttcaggacgagtgtttctgctgcctgctcttctcaggagatattagcgagatgctcacactgtgcactggactcttccctgacttcactccctggggttcccatcaaatgtgagacaatcacatttgttaagagagagtggtgtgtagaatggtttggaatgtgcgaggcaccttaaaaatagtcctgaatgagaagtagccatgcacggacgctggtcagatttcaggtataaaggagaccaggcctgtgcccagaggattgagtttctgggtcagaaatctcaaagagctcttctcctcagtgcctgcttttatccttcaatcaaggaagcacacaaagcactcacaatcccacgtgcctcagctgtgaaatgccagccacaaggaagttacgtggggttttatgccaagtatttgcactcatgtgttggcctcatgtactgcttttgaaataagtggttgcaaaactggccaggacaaaatggaaccctccagaaaatgaagccatggtcatggtgatggaattgtcctaatagaggagtagcattgctaggcactctagtgatggccatgaaaagccttccttttctgtttgtgtttgagattgtgaagttatcttcttaagtgtgggaagtaatttgtaagccactttctctggaggtagggaagttagcctttgtcaatcagtgtgggatgcagctctattggggaagacatggacgggagttccggaacactgacgtggggagaatggttacaattgtcaagactagtgtctcagcagcctcggaaacaagtgagggtggtggtggtttagataagctgctttaatagggagatcaagatgaatttgatgtataatcagaatcctaggtaagtgaacaaaaaaagggttttttttagaatcaaacctttggggattgggtggtaaagggaaatatttatttttttagaagacatttatgtgtcatgtgaaacttttctccaaatgtatgtggttgtatgcagttgtgtggcagtagag

SEQ ID NO: 19520 - DNA, 2300 bp, Homo sapien
gttgaattaactaaccttggagctactctacctctggaattgtttttcatgtgagaaaatgaacccagtatcctttaatctacttgttagaactcctgttacttgtagcgaaaagcactctcaccgatacacatagaaacaagcataattctgacctaagacaaatagaaatgagcataattctaacccttttaggtaggcagaatatttgcactatgggcaagattttcattcagacaacaaatatttattgaatgccttctacttgccaagtatagtgcaagttgctgaaccaaacaatataggaagggcaggtttctccatccatggaggttataatctggtcgtaaatgtagtagtgaaagtgcgggcaggcatattttgggacggtatcttgaggactaatctggattgggagtcagagaatgccctaataaaatccagtaaaagcatgcattacagattcaaaaagaatccatataatgtctatctcatccatcaagtatttgtgacatgttttggctttagttgtataagaacagtaagtatgtgcacaatagtgttaggtgtataagtatttttattttttattttttatttttgagacggagtctcgctccgtcgcccaggctggagtgcagtggcgcgatctcggctcactgcaagctccgcctcccgggttcacgccattcccctgcctcagcctcccgagtagctgggactacaggcgcctgccaccatgcccggctaatgtcttgtattttcagtagagacggggtttcaccgtattagccaggatggtctcgatctcctgacctcgtgatctgcccacctcagcctcccaaagtgctgggattacaggcgtgagccacgcgcccggccaggtgtataagtatttaggtaactttataacaaaatacatttacattaagggccagactgtcttttccttttaaagggaaatactgaagctaatttaggagaggcaaactaacataaaatataaggcaaaggagtgggaaccaaggcatttggtatctatttctagctcactgggcagcagtcctctgtgtcttgaattctgtgatttgcgaaatatgattcataggggttgcaatggaatatttctgagtttttaaactaatgagggataaatttttaaaatccctgtgctgctgtgaatgttctagaaattattcacaagtttattatagcaaagaaaatgggcaaaaggaagggggtgggtacaggacgtgacactccagaaaagaaggcagtgacgtaaaaaatcaagaggaagtccacaccaggaaatagtgctgtgcacattagagctgttactgaataaatacttgttggaatttccagagataaccaaacaaacatgaagaaggaagtgggtttttttttcagctttattatggaaaatatctaatatgtacaaaagtaccgagaatagtaaataagaacgaccatgcagcttctatggccttacttaacggccaacttgctttatttttcacctcccgctccccactattctcaagcaaattccagacatcataccatttaacccctaaatatgtcgcacatatctctaatgcaaaagattgggaaccaagacatttggtgtctatggctagcacactggatagcagccctctgtgtcttgaattcgtaacatgtagaataagatttatagtgggttgcaacccgactttatttttaactaacagcaatataagaggaggtggctaatcctcacaaggctctccatgagggaagctcacccctataaatccaggcgggcgcttcgttacccaggagcccaaggtgcagctccgggacgcttcttttcaaggccgggacccctgcagcggcccgtaggacacctccctttccgagcacggactggtccccgcccctcccccgggaagtctccgcccacagggccccagcagcccccgcgcgccctcgctccctcccgtcagcccccgcccctcggcgaagggagcggcgtgccgtccgggtcgcctaggcctggggtcgggagcgcgcacgctgtgcgccctgggcgcgctcgggattctcgcctggcgcggctggggaaggtgaacagtgtggcccgccatgttcttctccgcggcgctccgggcccgggcggctggcctcaccgcccactgggtaaggaggctcaagctgagcccggcgctgccgccgcccttctcttgctctccgtgtctcccttagttttgggcgcaggagagccctgggctctgcacgggcctgcaggcggcggc

SEQ ID NO: 19521 - DNA, 2300 bp, Homo sapien
tgtatttccaactggtaagacctcaagcacactgtaggtttaaggaggatatggtagttgtctctagaagcctttttttttttttttttttttttgagacggagtctcgctgtctcccaagctggagtgcagtggtgggatctcggctcactgcaagcattacaggcgtgagccaccacgcccggcttaagcattaccatttttaaaaaagaaaggtccaaaacacttgacattatccttagctattctgacactgcaagtatacaaaaaataattgggtgaagggattggaagtatgattatgtactctgcagtggtatggatattacaacttagaaaaaaggataaacccttttgtgtatttaagaaattagctgtagtacattagttttgcattagccagctttaatgcatgaataatttatattaatctaatcctcgatttctcaaagtcacctgtacttgaaacagactattcactagtaattatgctttttttttttgagacaggctgtgtccccaggctggagtgcagtggtgtgatcttggttcactgcaataccctggcctcagcctcctgagcagctgggagcacaggcaggcgccaccagcctggttaattttcatatatttttttagagacagggtcttactatgttgcctggctggtctcaaactcctgggctcaagccatctgcccgcctgagcctcccaaattgctgggattacaggcgtgagccactgcgctcggctataacgattatttttaagtatgtctttaagattttttttttaattgagagaaggtaaacaacagttaattttccaagtggcacaaaaaagtaacaatgaaaatgtcctaccctggagctctcctgactttctcataggcgactgtttttttctttgtatttcacatcataaataaccaagttaaatgtaacactattccacctctagccataaggtgctctttttctagtcttgttgaccctaaagatttgtaggtgggagaaatcaggaacccaggaaaggaaaaactcctgatctttaatgcaggtttatgctttacatagtaatttgatgggacctcgccgtccctgtcaggtctgaatgtcacttcatctgctgtgatcacacctgaaccctcagttcatcaagacgttaaaggacagtgtaacataaacttgtaactgcatgcactaagtcataaacagacgctgttgttgcagattaacctctacgtaaataacgcgcccagaagggagtgagtacacgctgctgccacgctgcgacggtcaattttcctccggcacccttcctagtacctgagcagctccctctcaaatccccaacactacgtgtgggagggtgcactgaattcctctttaaaaaggccactggaaggcgtggctgggaggggacgcgctctagaccccctggtgccagggcaggtgcacgctaccgcgctttcggggcggggcccagggccccacctgaggcggggggccgcgggctctgggcgtaggtgcagcttctccggcctggtgcggggccagacggccgccgccggcttagcgggggaacttcgcctagtcctcgggctgcggtcgcagcgtcattttgcctgagttggatcacgctcgtccacccaccccgtgtaaaaataacaggtgaataccctatgtgggggtcctcatcgccgccatttccagaagcttccagtcacagccactgccacggtcgccacaaatgctactgcagagcccgcttgcccagcagcgtcaccggcgcctgccctgcctcttcgcccagcctttgattccccctcctttgtcggatagtgtctgcggcggggaggcggtgacactagtccgagtggggcgtggagaccgaccagcacgaagggcggagttccggcccgcacccctccgccgcctgccgcttggtacgtcccgcttccccgccctgcggctcgcggagcctggctgagcagcaggaggggcgggcgccggggggcggggcggtcacgccgcccgtcccgtgcccgcggtagtcacgtgtccgcgggtgtcacgtgctcgcgtcgcagccaatcgcggggcgacgctgtcctgggagcgaggaggctgtggtgagagacggaccgagaccggagatgttttcaagcccggctccggcggctttacaggcggctgcagcggcgacgaagacaacgacagcgacggctacgccgaagcactcgttccgggggtgaagcctcctgcgccggccttgcctcgggtccgtacgggtgaggg

SEQ ID NO: 19522 - DNA, 2300 bp, Homo sapien
aagattttttttttaattgagagaaggtaaacaacagttaattttccaagtggcacaaaaaagtaacaatgaaaatgtcctaccctggagctctcctgactttctcataggcgactgtttttttctttgtatttcacatcataaataaccaagttaaatgtaacactattccacctctagccataaggtgctctttttctagtcttgttgaccctaaagatttgtaggtgggagaaatcaggaacccaggaaaggaaaaactcctgatctttaatgcaggtttatgctttacatagtaatttgatgggacctcgccgtccctgtcaggtctgaatgtcacttcatctgctgtgatcacacctgaaccctcagttcatcaagacgttaaaggacagtgtaacataaacttgtaactgcatgcactaagtcataaacagacgctgttgttgcagattaacctctacgtaaataacgcgcccagaagggagtgagtacacgctgctgccacgctgcgacggtcaattttcctccggcacccttcctagtacctgagcagctccctctcaaatccccaacactacgtgtgggagggtgcactgaattcctctttaaaaaggccactggaaggcgtggctgggaggggacgcgctctagaccccctggtgccagggcaggtgcacgctaccgcgctttcggggcggggcccagggccccacctgaggcggggggccgcgggctctgggcgtaggtgcagcttctccggcctggtgcggggccagacggccgccgccggcttagcgggggaacttcgcctagtcctcgggctgcggtcgcagcgtcattttgcctgagttggatcacgctcgtccacccaccccgtgtaaaaataacaggtgaataccctatgtgggggtcctcatcgccgccatttccagaagcttccagtcacagccactgccacggtcgccacaaatgctactgcagagcccgcttgcccagcagcgtcaccggcgcctgccctgcctcttcgcccagcctttgattccccctcctttgtcggatagtgtctgcggcggggaggcggtgacactagtccgagtggggcgtggagaccgaccagcacgaagggcggagttccggcccgcacccctccgccgcctgccgcttggtacgtcccgcttccccgccctgcggctcgcggagcctggctgagcagcaggaggggcgggcgccggggggcggggcggtcacgccgcccgtcccgtgcccgcggtagtcacgtgtccgcgggtgtcacgtgctcgcgtcgcagccaatcgcggggcgacgctgtcctgggagcgaggaggctgtggtgagagacggaccgagaccggagatgttttcaagcccggctccggcggctttacaggcggctgcagcggcgacgaagacaacgacagcgacggctacgccgaagcactcgttccgggggtgaagcctcctgcgccggccttgcctcgggtccgtacgggtgaggggggcgtggcgacaggaaaggaggaaggaggggcgcggtttcgagcttgtccccggcgccagggaggagatcccctcagttctgcgctgctcccgttccccctccccagagcaaggtaggggacgcgccctgcccgccccccccggtcccgacgcgccgcccgcccagcctggcccgagccgtagctcgcctgacagtgacaggccgttagtgccccccggcgcgggtccgccggggccccgcccgccgccgcccctcccggcgtcgcgaggagccgcggcgcaggtgggagccgccaactgggcgggggcgctgcgcggggcggggcgggggccgggcggagggccgcgagctggcctcgtcgcgggcgcccctcaccgcggctggcggggctgggctgccgccgcctcccggaacatggcggggccggaggagcgtgtgcgtgcgagtgtgagtgtgcgcggccgagagggcgccgctggcgtgcggcggtcggacccgcgggggcgggggcgcgcccggcccgccgcgcgttcccgccgccagccgccgagcgtgcgccgacgccggggagtctgccgcggccgctcgggccgggagcgtcggaggtacccgggtcctgggagaggtggatgaaatcaagaaggggaaattgctgctttagtagtgtccggggaaagagcagccactctacagttctgtcttaaatgccagtgtaaaataaccttgccgcattggacaggcagttcccgtcatcgtttttcaagtacccacttgtgat

SEQ ID NO: 19523 - DNA, 2300 bp, Homo sapien
atcactgtgcccagccgcagagtaatcttttaaaactaaaaatcaaattatatcaccgccctgcttgaactttttcattggtttcccattcaaactaagctatgtgtatacaaagcagaattaatggaaaagacacatgaagaattttcaaaacatttaaaatcctcttagagctagaagactgataacatgcagaactaagtagttacaaaaaagaaccaatacagagtatgaacatacatgggttgaaataaagaactcttcagattaggtatataatagataagccaaagaatgaattagtgagctagaagaacaagtagagaagacagtcccagaagacatcaggaagggattagaaaaaaacaaaatattaaaagttaagagacatacagaaactagaagtgacaaaatccatacaacagaattcctgtaaagaaaagaaaatgaagaaaacaaagtacttgaaaaaaatgaccaataatttttccataaagagaagaaaatggagaaaacaaaatatttgaaaaaatgaccagtaatttcccccaaataagaaaaggtgaaagaactcagattaaattgtctggaatacatcctgggacacacagtaggctcctgacaaattcaatatttgataaatgagtaagtaaacatgaatccaagggccaaaccaggaaaatgaactatacacagacacattacaacgaaactgaaaaagacaaaggatttcaaaatgttctagagaggaaaagaaatcaaactgccaacagaacttcccccaaagtaacatcagagataagaaaacaatgtagtaatattctcaaaatgttaaggggaaactatttaaaaccaaaatcattactcaaactaagctattggtgatactaagctatcagctatacctgagggttaacgaaaaatattttcagacatcaaatggctttagaaggacatgtaaataccctgtttgaaaatctgcttttgagtaggcactcaaataatagaaataaatctatgggctgggtacagtggctcacgcctgtaattccaacactttggaaggctgaggtaggaggactgcttgaggtcaggagttggagaccagcctgggcaacatagtgagacccgtctctacagaaaaattttttaaaaaagaaatacatgaggacattatgtaacatatgggagtaagagtgagtttataatctaataagtctatttcatacaaaaagaaaaaggacaaatatgtaaaagaatacccctatcaatcaacaaggcttttgggaaagggtaggggtcaaggagagggaaaaagcccacaggaaagtgagaaagcatttaaaggacttatctggcttagagggaaaatatacattaaaattaaaaaactgtagaaaatgaatagaaatataggtctcaataaatcaaatggatgcctttgaaaacaaatgaacattcaatctatgtgacagaaggcagaaaaaaatttttttaagtgtggtaaatagaatgtagataacttccaatatatatatattactacaataaatgaaactcactaatcaagagtctgtaaaagtggataaacagaatccagcaatatactttaaaaaaaaaagcagaccactaaagaagaccaaaaacggtgaaaataaaaagacaggaagaagatatacctggaaatataaacccaggctggtagatggcctgttttttaaggacctatttatgaataattgagagtcctcctggtctggacttttactcaaagagcccagtcttggctttctgccattcctgggccaatggattccactactacattaaagctcacacactaaaggtatctttttattttccctataggataaagcttcaacttctgttctctgttatgactgtgttctttttcatttcaggcacctgcagattcccctttctttaagtgttttatttttatctagcttttccatatttgaaaaagaagggggcatctccagtctacccttttgtccagaagtccctaaaacatgtactttagattaaatacaactgagagcaaagtccaaattatttttttctttttgttttttaagtattgagaccaggtcttgctttgttgcctaggctagccacaaactcatggcctcaagtaatcctcctgcttcggcctctcaaaagtgctgggatgacaggcatgaaccaatgcacctggcctaaattacttaatttcatcatctatattatgaaatgataaagttcaataaaaaggctatgagaagtaactaaaattatac

SEQ ID NO: 19524 - DNA, 2300 bp, Homo sapien
ttaaaaatagagtacgttgtggttactcactcctaccttttccacctccaacatgggaaagtctgtgaccaaattaaagtcattttgccatgtaaaaactttgactgtttctgtaaaattttgactttgactttaagtctgatttaatattttaaatggaaagacatttattaaaactgattttttaaaatagcgtgaacctttgtccttaaagtaaattaaaagaccaacagacaaaaagtaaaagtctttcatctccaatcacctcccctcaagaggtgaccactgttaacagtttcttatctttatttatgtagcttttctaggcataaacttacaaatacgtatcttttgttatgggttaatttttttttcttttttagtataaataggagtacactataatactgttctgcagttggtctttttaagggtgattcttagtcaactctctattaatatgtatagaattagaatggaaaacttttgaaatatcaagcagtttgccatcatacagatatacttggagtttgtggttgttttattcattagataagtctttagattttaagaaattcagcaagcaaattctcttcacaaataatttgactataaggattacattaaaatttattcattcaacaaatatttcttgaataccgctgtggtatatgagaagtcttctaagcagtgatgagtaagatagataaggcccttttctttgggagtgtaaatttctagaaaaacttctgtaggaaactattaccgagacaatgtactttaaaatccaaaaggtagggccgggcatggtagctcgagcctgtaatcccagcactttgggaggctgaggcaggcagatcacttgaggccaggagtttgagaccagcctggccaacatggtgaaaccctgtctctactaaaaaatacaaaaatcagccgggcatggtggcacacgcccgtaatccagccactcgggaggctgaggtggaagaatttcatttcttgaacccgggaggtagaggttgcagtgagcctagatcaaactaccacgctccagcctgggcaacagagtgagactctgtctcaaaaaaaaaaaaaatccaaaagatgaaccttacactttttttttttattgaggaaaggatggtattgccttagagctctaatcgtgtcaggttttaaactggtaaaaattattttccatatatttcttttctcttagagcagttccttttatatagttgtaaattttcagaattaattaacactgtatatatgtcttgaatccttaattaagaaaccagtttttgtttttttgtagttttgaaattggagaggagactttgggcatcatctaatttaactttttttttttaaatatagaaactagaacaaatatcaaaatatgagaatcaaggcaaagcagtttttaaaggcccttttccagactacccttattttttgtagctcttctctttcattttcatagtaaaatcgttatgaccttgatttgcacataatataagaacagaagaactccaatgctttgtctgagtcagaagtgtggactccagccttcaatttcacttcctctaggtcttagaataatagcataacatacctaggaaaaatgtttcatagttcatcacatcattcattaaggaaacattttagagtacgtatttgatactttatcattttaaaccaattttatgaattgacaaaacattttttttaattggctaatgatatttgataaccctgaagggaagatctctgtgtatttgggtcattaacggatcatccaagtcaaggtttaggttgttagggtgagaaggcattccttgtgtttcaggagattagcatattaccaataaaaacatttaaataagtatacagaatatttagcctagaacttctgctaactttcttctttcttacagattccacaccaaatcatccatcacaaacaacgcctgcccaaaagaaaactcccagttcttcatctcgacagaaagataaagttaataaaagaaatgaacgtggtgaaactcctttacacatggctgctattcgaggagatgtgaaacaagttaaagaattaataagtttaggggcaaatgtgaatgtgaaagattttgcaggtaagactagtaattcaatacctactattcaggcactaaaatttaaacagatcctggttacaatttaatctacattcttttattcattttgctgaaatgaaagagttctaaaaatactctttattacaaaacttttggagttcgtacataaaaccc

SEQ ID NO: 19525 - DNA, 2300 bp, Homo sapien
caatattcatctgcaacactaattgtcatagtgtgatctggggctgctagggagggatcccaagacattttcaggaggttgtgagctcaaaattattttaattttaattctaaggcattatttgacttttcaccctcattctctcacaagcagaaactacataatacatgatactgcaacagtttgaatacagaagcagatataaaaacagtggctattaagtttgatgttaaaggcaatagcaaaaatctaaaaccacgctgttcttcctactgttttaaaatatatacttatttttcattaaatatttgttatcatataatgggtttgttatttttaaatgaaataatgaatatgtaaaaaattgttttaattttgaaagtattaacagatgtagcacacatacacaaaacctctttggcatgctccataattttcaggagtgtaaagggattccgagacgaaaaagtttgagaacctctgatctgcggtatcactttttaatggctgaattagtgcattgatcggaagtttcctaattcacttaactagtatataatgccaagaataagattcttatacttaaatttgggtatacccttaattatttctctaggataattttcaaggatgatttttaaaacccatatttattgtacaaaagtgggctaacatcagtaatgcaatccacccccagccaatcagctgttttcattctgtttccttccaatcaacaaaggtgggtggtaggcatttacgatttaccagcataagggtttgacactaggtcatcatttccaagggaaggtgccccgcggacggtctggtctagcgggctctaacttaatcaccctggaatcttctttaaaaagcaaattccggccgggcactatggttcacacctgtcatcccaacgatttaggagaccgcggtgggaggatcgcttgagccccgaaatttgaaaccagcttgggcaacatagcaagacctccatatctacaaaaaaataaaatattagccaggcgtggtggtgcgcgcccgtagccccagctactcgggaggctgaggcgggaggattgcttgagcctaggaggtggaggctgcagcgagcctgatgttgtcactgccctccagcctggtgagagtgagaccttgtctcaaaagaaaaaaaaaaaaaagcaacccagagttgtgggaaagaactgagtgtcattctcaatgtttttaacctacgtgctaaccgcgcaccttctacctaggctgcgcgacctccgcgcccggatccatggcgccccctcttctcgactcccgatgcagagctccgatgcagagctcagcgccagccactcacaaggagcctggcaagttttatcgaattggtgaacgaagttcgaaagctctacccttggagatccttattcagtaggtctgaggtagacctaggaaacgcgcattttatataaatcctacctctgacggcaaacgacaaggggttcacgtgccagctctcctcggcgacgcgctaggctactcagcgccccgagcctcggcctcgcatcgctagaacccggccatggccgcttccttacagggcagctgtgaggagtcctgaggaattttagtacacggcatatcctcagcgtagtggctagcacatcacaaggctttaatcttaacactgttgatcttaacactgcaactgagggggcccggagaatgggcctgacaggagggtctgtcggaacctgagggactggggatcccggtgcggagaagcgcgaagggaaatcgcgttgagcagctggggtgggtgcgcctgggggcgtggcctgcgggccggcgggcgggcgggagcctgcggtggaggcgtggcacgagggaggggcgaaaccgggtggcgcggagggggcgtggcgttgggaggggcggggggagtgggcggggccgagatgggggcgtgcgcgctgacaggagcgccgggggagtgagagacgcctcctggcgggagctggcggctgtggaccccagcgggggcggaggggaagaggggagcaggggcggggagcaaggagccgggaggagggcggcgggcgggcctgtctctttaaggtgcccgaggctcgcgggcgctgcgctgaggggacggcgggaggcgcggcctggcctcgcactcaaagccgccgcagcgcgccccgggctcggccgacccggcggggatctaggggtgggcgacttcgcgggaccgtggcgcatggtgagtgggagcggctggggggttgtgcagcctcttggcctcttgg

SEQ ID NO: 19526 - DNA, 2300 bp, Homo sapien
atttttgactggcttgccatttgccccacctgggactgtaacctcaggtaagcacagctgtgggtttgccctgttcatttccatatgagtttgtcacttttagttggcaaagccttgggtttttgaccacccgccccaaattgagtccatccctttggcagcaaagctgctagttttcttggctattcctacccacactggcaaaactgcagttctggtgcaacagggtgggagagaagcagcctcaggccagaaggccacagacatctactgtccctgctagctgtttctgaagaatagatgtttctcaaattgttttctgtatttgtttgatttccagtgctctgaaatggttgtttttgccaatttatccaattttatactggttttgtgtgcagagaattgctgactatgccacacagacatagctaaaagtcccttccacagttttttacgtaggaacctgtattagttaggacctttcagagtcatgtaaaagaaattcaactgaattagttaggacttttagaattttaatatgaactggcttaaacagtacaggaaatttgtggttcacaattctggatagtctgtaagatggccttgctcacaatcccgaatagtctataggatagtccatagaatcaaacaggtgaggtttgatactgcagctcaaatcatgccaccaaacacaaggttcttctccatctttcccgcattcatttgacagtactgacttcaaccccaggctctacttgttgctgtccctctaaactcccatccctctagggtttccccttataggaggaaaacggttgccacatttccaggcatcatatacttacaccatgctagaggagcaaggaagctacagtttactggaagcctcagccccagtctttgtgggttcattgtttctgactgggcttgtgaccatctctgctgctagagggaatggttatgttgcctggcttaaatggaaggaataaatgctcaagtggcagccaacaaatacattcaatatccacacatattggctccaaataataaatcaatgaatgagtgggctcacccacttaggctcacatgctcacagcacttaaagagctccacaaaccatgccctccaaatgaaaccacggtctacattctgccagctctttctccctttccatttctcctttcttctctttcacaccctcacctttggctaggccactcgatgttgcaagaaacacgtccatcagcaattgcctcagtagaaaactccctctgctcccctcctgcatccacatagcagcttcaggcaaggcctccataaggcccagcgtggatcagtgcctgccccttggccgaatcagtgctgtcacaggcagagaattgtcactgccatgctcacctgcccaacccagtggtcagagaagactgttctactgcgagaggagccatgagaaggcttttccgaaagtcaaagaccaatggctacctcagaccatcccgtatccactcgtgggaggcccctgaatgaatctaaggccccaggggttgaactttactgagtagggagcgcagagtactagggacaaatttaccgcccgctttgaggaaagctgatgtgggagcagagagcaagatggatagcagcggccaatctaaacgggcaacgaagtgccacagagtgctgcacgtaggaatgcgagtgacaggtagggtcgtctattccaagtccctcctctcccctaataaactgccacatttcagaaaacacgaagactgctgaagccgtttccagccttcgctacgcattagcagagcaactcaacaagcctgggtgaaaggcttctcgaagaaattcagttatctctactgccagccaaacacggactgggcagctttcctcgggggctgctcggtaactgctgagccgggggcgcgctgaagccctgcagaagcccacacccgcttcaggaattccgtggatgttcccgacagaggtttattcccgcctatccctacaggcccacggcgctctttcctccaatcccacacccagtcgaaggcggggcagccgccccacccagcggccagccgggcggcccccagtctggtttaactggttggaacgactaaagcacgctggcgcaaggaaagctctcaacttcgggagctgaggcgcaggctggccagagcgtggagaggaaagccctttccatcctcaaggccgttgcaggagatgcccgcgagccaccttcgccagcaccacaccggggtaagccgtccgtccccgaaacccgcaaggcc

SEQ ID NO: 19527 - DNA, 2300 bp, Homo sapien
ttttagaattttaatatgaactggcttaaacagtacaggaaatttgtggttcacaattctggatagtctgtaagatggccttgctcacaatcccgaatagtctataggatagtccatagaatcaaacaggtgaggtttgatactgcagctcaaatcatgccaccaaacacaaggttcttctccatctttcccgcattcatttgacagtactgacttcaaccccaggctctacttgttgctgtccctctaaactcccatccctctagggtttccccttataggaggaaaacggttgccacatttccaggcatcatatacttacaccatgctagaggagcaaggaagctacagtttactggaagcctcagccccagtctttgtgggttcattgtttctgactgggcttgtgaccatctctgctgctagagggaatggttatgttgcctggcttaaatggaaggaataaatgctcaagtggcagccaacaaatacattcaatatccacacatattggctccaaataataaatcaatgaatgagtgggctcacccacttaggctcacatgctcacagcacttaaagagctccacaaaccatgccctccaaatgaaaccacggtctacattctgccagctctttctccctttccatttctcctttcttctctttcacaccctcacctttggctaggccactcgatgttgcaagaaacacgtccatcagcaattgcctcagtagaaaactccctctgctcccctcctgcatccacatagcagcttcaggcaaggcctccataaggcccagcgtggatcagtgcctgccccttggccgaatcagtgctgtcacaggcagagaattgtcactgccatgctcacctgcccaacccagtggtcagagaagactgttctactgcgagaggagccatgagaaggcttttccgaaagtcaaagaccaatggctacctcagaccatcccgtatccactcgtgggaggcccctgaatgaatctaaggccccaggggttgaactttactgagtagggagcgcagagtactagggacaaatttaccgcccgctttgaggaaagctgatgtgggagcagagagcaagatggatagcagcggccaatctaaacgggcaacgaagtgccacagagtgctgcacgtaggaatgcgagtgacaggtagggtcgtctattccaagtccctcctctcccctaataaactgccacatttcagaaaacacgaagactgctgaagccgtttccagccttcgctacgcattagcagagcaactcaacaagcctgggtgaaaggcttctcgaagaaattcagttatctctactgccagccaaacacggactgggcagctttcctcgggggctgctcggtaactgctgagccgggggcgcgctgaagccctgcagaagcccacacccgcttcaggaattccgtggatgttcccgacagaggtttattcccgcctatccctacaggcccacggcgctctttcctccaatcccacacccagtcgaaggcggggcagccgccccacccagcggccagccgggcggcccccagtctggtttaactggttggaacgactaaagcacgctggcgcaaggaaagctctcaacttcgggagctgaggcgcaggctggccagagcgtggagaggaaagccctttccatcctcaaggccgttgcaggagatgcccgcgagccaccttcgccagcaccacaccggggtaagccgtccgtccccgaaacccgcaaggccaccgactgcgcaggcgcctgcagagcactggccctcggcgcgttctctcgcgctcttcttcagtctcctcagcgagcctggggacgaagggggcgcggtgcctcctgggtgttgtagtttgcttccttggcgagaggccttcgggctggctggacgccggggccttgggaactacgcctcccagcgcgccccgcgcgagagcccaggtcgcctgcccttgacggcttcagccgtctgagcggagaggaggatccgggaagccggctgcggcgggaggagggaatgcgcgtgcgcgctggaccgcctcgtcccgttccgtcccaatcattgtaaacaggcagaggctgggcggggtgggaatggggcgcccgaggccggcctggggcgcagcgcaggaggcggctccggtggctgcggcggcagcgtgagcgcgaggaggcggaggctgcggcggggcggacggtcgcgcggcggcaggcacaggtcagtcgcagggagcggtcgcgtgctagggtcgcggcga

SEQ ID NO: 19528 - DNA, 2300 bp, Homo sapien
atattcaggacttcctagcacattctgtccttagaacgtcccttgaagatgtatggtcaaagtagtcagttcacactttggcttttttccctgtgtgattgttttccatctgatgcacagttaggttggtttgcttccgtttataaacttacctttaaatatttatagagcagctattgggatacatttattttttttctctcaacaaatactgaatgcctactctgtgctgtcacagcgtcacacgcagggcttacacacgtggttaagagcataattactgccttaagcggggccatggcaacaaggatgtcatatgaataaagggggcaagccctgtaatcaggctgtgcccggggtactgtggggtttagcgtggctcattgataggcacaaggaacaaagatttccagacaagatggtgattcctgaaggcaaatggaattattcagggaaaaataaacttaataccaaattttaaaacacttaaatacagctactacatttcctcttcagaagaattaaccatattgcttacagtctgtttttaagcactctagtaaaagaaatactgtctgtaccttgtcctggtaaatatttttattttgttactttagcttcttcatattgacaaaagaagagaatatctttatcaacttcaggagtttttggtgacagataatagtagaaattggcggtttcgagctgaactggctgagtaagttctaacagtttattagattatgttttggaggggtatatatttacttcatttttacattttctcagtttcttcattactttgtgtagatccaagtttctatgtggtattctagccctttaacgcttcctgtaatatgtgtcttactgtcagtgaatttcctcagcttttttattttttcttgaaaatgtctttagttcatctttatattatttttatcatggtgaaatacacatagccaaatttgctgttgatgacatttagtccattcacagtgttgtggaaccattccctctatctagttctgaaatgttaacctcccgaaaagaaaaacccatgcccaataagcatctactatctatggatttgcctgttgcggacatttcatgcaagtggagtcatataacacatggccttttgtgcttggtttcttcatttaacaatgttttcagttgtcctccatattgtatcctctagctgaacctgccttcctttttgtggttgagtaatattccattgtatggatataccacattcgtttagggcattcatctgttgaggaacatttgggttgggggtgtggtcttttgtgaatagtgctgctaggaacgtttatgtacaagatttaatatttgaaatctgttttcagttcttttgaggtgaatttgcaaggccatatggtaattctgtgtttaatttcttgaggaactgccaaaacttttccacaacagctataccattttacattcccatcagcaatgtatgggagttccagtttctctgtctcctcactaacacctatttttctactaaattttaaaaatatttctaaattggccaaataataattgtgcatatttgtgaggtatgtaatgatgttgcaatacgtatcggatagtggtcagataagggcagttagcatatccatcactcgcttatcatttacagctgttctgatgggcttggaacagcacttcattgtggtatgatttgcatttccctaatgactaatgatgttgaacacttttccataagcctgtcaaccatttgtgtatattttgtggagaaatgtctatccaagtctgttgcacatttttaaattggattatcttaagttgtgttgttgagttgtaagagttctttatatattctggattatagacctcacctgcattttcaaatgatgtctttgctgagtatggaatgtggggctgacagtttgtctttcagtatattaaagatgccactccattgagttctggcttgcccacttctgactcaaaacacacgcctcctcttctgccatatagtgccggggtgtgagtccatctagtcagggtcaagctgggtttgcgttttgtgattgctgtggttacgttcagtgtacttggggcttcagtttttctcgctgtgggctgccactaccattgtcgtttgctgagggtggcagctggggtaccagtggtcttctagtgtgagtattccacccggcgtttagcggtacctgcacccctgcgtaatgggtgggacctcctatctgtgcttggtctcgggcaggacttcctacagctcctcctgg

SEQ ID NO: 19529 - DNA, 2300 bp, Homo sapien
attaacagcctgatccagggtgagtgaaagatctgatgtgtaagtcagatgtttggaatcaataaatgcttcaaagagtaataaagtgatagtaaatgtttctagggtcagatgaaacactatacaataaacagtggtggaaatatgttgccaaaaacttgcttactttgtaagacatttgtttgaaaaacctgaatctaagaaactgagagaactttgaggacaggaacgaagttctatctttccatttacagtttctggttcataggaggtgctcagttaacttttgcataatcaatcaatcaatcttaataccacaacagtttaagacagcttaaaacaaatgccactgtgctatttaagggagggcaaacaaactaatggttctgagatttaataatatataggactacttctttatagtttgtcaaactatgcaaaagcttttacaatatttaacataactccttccttagccaggaatgctctctttcccctaccatatcattaacataatttaataagctctaatattactgaagatcagcaatacaagtagtattgcctggacattaagacatacctcattacaatggaagaagaatcaaggaattgaactacctttaaatagctattgcagtaatgctacacaccggtaggcggcaaacatggccttgataggcacactgttgaggtcagtgaagttttactggaacacagccaagcttgtccatttatgtaatgtctacggctgcttatacactgcaaaggccgagtgagtagttgtgaaacagaagaaagtttaccagctcgtcctatacagttctctgcaaatttatagtttcttactagacccatttcagattttaaaacagaagttatgtaacagtcttcagtataaacaggtaattttttaagtatgctgatttcaaaaatgaaaaatagataacattccccacccaccatcatcacttttgtcaaagtcctggcagcacctgttttcaaaaaaactgacagactttgcttgctaggaagacaggtttgagtgattttcttcctttacaaaaaacagtacctcaggtttgtttggctattcagcaggacagtaggagaacgggcaaaaaggtaaaacaaggcagcagagaagaaagaagaactgccaaatcaaaacaccaagaaagcaaatagcacagtatcaagacctacagaagaaaatgtccattagcatcatgacaagggagggaaaagacactatggtaactcaagcattatagcagggactgtttcaaatatttgtactaaaattacttcaagtgcataactgtaaaagtttgtgtacatttcccgcatactagtaagttaggcttgaattagtttttcccctaaatatatattataataaatttttaaaatttaaatttaatagaaaattttcaatgcaaaaacatttaaaaataaaaatcacagccgactctttaagctttatttaaaactttggtttccttatgagactgatatacttaaaactgatatactggctaatatactggctttctcctttaactgacagattacaatcaccattgacaaagaatccaagatgcgcaactaaattatttgacagaaaaggacaataaaacatattcctaaattaagttttactccttaaaaacaaatttaaaaaaacccaaatactacacagtgtgtaacaattaccctgtatattgtagatatcaatgaatgattgactaaataatgtactaaataaacattttttaaaagtcataatctaccatttagagtttcctatgtgcgaggcatctagctaattgtgttacatgcatctactcattcaatatgtaaccaaccaaagagatacttaacaaacaaatgcgcttaaagtaaagctctataaaaatattcaccaatttttatattcaagagaaatagcaaactatcaaaaaataacatttgttgcagaatagtggaaataatgtttaaaagcagtaaaattagaaaacaaggttttaaaattagaaaatggtttcaaaattatacctatttttgttttctactgacatctcttctgaacttttgctttcttctttaaaatactggcctgagctagatggattagcaaaagtagatatgaaaggtcccagagactgaaaagctgcttggcgaacctaggaagataaaaaggacaataataaaggaatcattttgaaaaagaattatatacgcacacattatgtatatttaataatctactttcaaatgccgaagtatgtttaggataa

SEQ ID NO: 19530 - DNA, 2300 bp, Homo sapien
tggaactgaagctttgcaaaaccaggacatggttctgatatgtatgagctttagttcacagggtgctttgcaaggcgaggactgaattttttcttagcaatacagatatgctaaatctagatctttcctggggatagttttccctttgaacagtcaccaattttttaaattgggaaaatgtaggtttttgtttgtttgtttgttttgcttttaaaattaccaggcaaaatgatgaagtagtagtaagatggaaactgtggacaaaaatgaaattgttaggattttctgtgggtttactgggcatgcagtatttattggttgtttttattgattgtggttaatatctgtctttgtttcctacttagataaataagatgaaattaataattggctatgaatgttttctgtcatgtatatagtataatgatgccatatcatattttatgtttcctcaaattatatacttttattatttaatttaactgaaagaggcttacttgatattttcagtgtgtgtttgttcttacttattttagataatgtgcaaaatggctcccatggttgggaaggatattacagagcgtcttatcctccctaggttttgtgagatgtgctgcgattgcagaatgtttcacgttcgaaaggtatttttttgtcgttttttttctgctgtttaagaacatagttctagtggttaatgtactgatacatgatatttaaaagattatcttagaagaaccttatgtgtaatattttgaaatgtcaatgatgcttttgttgtcaggtctgtgctgccaattttggagatatttgcagtgtagttggccagcaagctactgaagaaatgttggtaagtattgcagatataaaggagtaaacagtgtgtgttacaaagtagtacataaagtttgaaatgcacacatttactccaaagttttattaacacaattccatgaatataaaccagaaagataattttgaatttaggagtttaaatatctgtaatctgggcatttgaattatctttttgatatttattaaaaatatggatatgtttcagaaccattgatctgttttcacctcttccatttctgttaagcaaatcaattcttacttattcaattgaacctttaattttattgcaaccctcaagaatgttgatgacatattaaatctatagcaagttagttttaaatagtacacaagatgcctatacttgatgtataagtcaccatatctaaagagtttctgaagccatctcttatgcaaaataattaagttcaggggcaagctcttgtaaaacatttaagctatgattgttgggagtgcttttgcatagccagaaatattgcataagacaatccagtatgcttttgcatagccagaaatccgacggaccaaattatcagcactttttattaatttatcagtgatctttcatgttgggtagggttttgattatcacttttgtgaaataatacatttctgtccgttttaaagcaaacataattttgactcataagaaataacttaaaatttaagatatattattatatgttatatatttataatttaagatacattattttttatacttttaggaatagacagtaaattagatgtgatttattgaaaattgttgagtataaatactaatagatcctactttttaagacaatccaacatttaaaacactgaggctgggcgtggtggctcacacctgtaatcctagcactttgggaggccaaggcaggtggatcacctgaggtcaggagttcgagaccagcctggccaacatggtgaaccctcatttctactaaaaatacaaaaattagctgggcgtggtggcacacgtctgtaatcccagctacttgggaggctgaggcaggagaattgctggaacccaggaggtggagtttgcagtgagccaagatcgcaccacctcactccagcctgggcaaaagagtgagactctgtctcaaaacaaacaaacaaacaaaagaagcgtgaaagcagaaaatgaaagcgaagtaactgatgaaatctgctatctttatccaactaacaagactctttccttttcacatagctgcccagatttttccagctttgttctgataatgtatggggagtccgaaaggcttgtgctgaatgcttcatggcggtttcatgtgcaacatgtcaagaaatccgacggaccaaattatcagcactttttattaatttgatcagtgatccttcacgttgggtagggttttgattatcacttttgtaaaataatacatttgtgtccgttttaa

SEQ ID NO: 19531 - DNA, 2300 bp, Homo sapien
ttgtcttagtgcatccagcggctgaagcacagttggcacgctgtagattttgtgttgttgcggtgagaccaccagttagaataaagagctgatttgggccgggtttggtggctcacacctgtaatcctggtgctttgggagaccaaggccagaggattgcttgaggccaggagttcaagacccacctgggcaacacagtagaaccacgtccctaaaaaattttaaaaataaattggccaggtggagtggcctgtgcctttagttccagttacttgggaggctgagatgggaggatctcttgaggccaggagttcgaggttacagtgagtcatgattgtgccactgcactccagcctgggctacgtaaggcaagactggctctaaaaaaaatttgctttttaatgaaaaaaaaaaaaagagctgatttggctctttcttcccccatttacccagaattgctaaagtggtagatactgacaaggtatcttagcagggcagaagtctcatggtttgagtcagttgggaccaattgctgttgatgtgaatttctaactcctttgtcattctgagtgtgtcagctgaattcacataagggcattcaccaagggaggaagagaaaggcctttagttttaattattttatagttgagaaaattagacacatactcggggttacggggtctattctgatttttattactcctagaaatttcatacagattataatctgtctatcttgttagtaatatctgactgaattttttggaatagctatgtgtagaacccattttattacacagatttaggaatctcagaggatctgattccttagtctcttaaatcttcagtggcattaaatgccaacacattgtccttggtcaagactacaacgtagaaaggaacaagctaattaactacttagaattccctctcctaagagaccacatcgccaaagtggcaccatgacacagcttggtgttttgttggtcactttaggagaacaccattttggaggccttgggtggagctggagatagagccatggaggtagaatcgtgtcggaaaacctgggtttagccccattttgtacttgggcgtttgagctaatcgcttaagtcacgtaaaacaacaagactaataaagtctgggatacagactttaacacctcaagtgctgccaaaagtatttagaagacaaagcgaatcataggcacccttcaccgagcacctcctagacatcaagaaccatgctaggttccctacattcttcatttaatgccaataaccccacgaggcagttatcaccttcattctacaaatgggccccactcctaccaattaactggctgaatcaggatctgaccccgggcctgccaacgctcccgctggtggattgcccgccttgtcagctcgagttggcaggacgtgggagtaaaaacccggcgccccagccttcaccgtgctgcacgaggaagctggctaggcaggcatgactttgtcagtcaaccatcccgcagccgggccctgggctttgttagcagccacttggcgagggccccgggcgggtggggaggcggcgcttcctccaagaggaggtgggaccccggccccgacgacctcggagccgcccccggccccggatcgccgacgacgtacgtgcaggcctggggatggggcgctggctgcgagcggcgcgcccgccgagatggctgcggctggcagggcggtgggcgaggccggtgacccaataaagcggccgggccgcgggaggccccgcccggccgggttccggcactcgccgcagggtcccggccggcggcaggttgcgcgcccccgtccgcagcgctcggcgtgagggcggctcgggaggagggtgtgagcgcgcgtcgccgggccgggacccggcaagcagcgggaaaggcgggaggcgggagcgccggtcgcccgggagccgcgcggaggggcaggcggggcggggcggggcgcggccgggggcccgggcggccgggagccgcgccgcccgcggcaggcccgggccctcggcccgccccgcgcgcgcgcccccgccagcccggccctcctcctccccgccgcccctcccgcgcgcgtccaccggctccccggctcgcgccgctccatgtagccccggctccccgggcggccgcggaggagggggcgaccacaagatggcgggtacgtggccccctgttctccgggcggcggcggctcctcgagcccacccgccctccgccgcagccctgagtggctgccgggccggggccggcgtggggtcccggcgcg

SEQ ID NO: 19532 - DNA, 2300 bp, Homo sapien
tggcacttttttaaaaagtcgagagctgcctctgacgtgtcactcttaaaatatgtctcccagcagtcatcttcctgccttccagggctagagctttgtaggttaccttagggtgatcatggggacctggttttcatgaggccatgtttaagctcaggggtgacctggctgggaagagggtataaacccatgaacacgagtcagttgacagactaggattgccactttgtaaagaagagcccaagacctgatcagaatgagacacaaatgaggtcatttttaacagaactaggggaggggagaaggacaaatagactggggcgattctcagggagggaagggctggatacgagactcttttgggagagcctagaaacgacgcaagcgtcccagacacccgggctagtggagaagagagcagaatgagagcagtcatgaaaaagagtaagggaacacaagagaaattcggtttgcctatttctgtctgggcacagttctgcccttagcaatctaaggcaacttcacaaagctccactcactgcacgggatgtagaacacagtggaggcttccaccctggtttgactggcttttgggaatcaagctggaaagccaaaaggacatgtttcactgtggaggtgccctcagggctggcgaaggccttgggggaggtgtctttgcaactgtgtaggggtggttttctgattagcaaatctgagggcagggagatattgtgatcaggactgtttgattctggggaagcctctttttaccctgcccacatagaagactctgctttggatacagagtcaaggacggatactgatacaatggacctgtaacttgtccatggctgccttttgtacagtttagtccatttgagtaatctctacaagcctgcacctcgagggcaaacttcctgctcttctggggaatttaattgtgaattgtctgtttcggggcccattttgactcctgtattccaggacttatctctttggaggccttgatttggaatttcccattggatggggctacttgggtactgggtagcttcaacctggcttccgtaagaacaaagccagatgatcacggtgggtggtctgctaggagaatggaaatgccattgattaaaattggaaggttaagagagaggcctgagagtttgggataggagatgaagtttcaaaaaatcagtttttaaaaaaacatttcccatctgaaatgccagtgaattgttcagatagattacattgaaaaggctgacatttctgtagcagcaacgaatgaagtcatccgagtggatgaggtgctctaggccatacatggagaagagaacacagttacccaagcctccccgactgtgtgcggccacagactctgctcatttcccagttaggaacgatgcaggggtctgctgggatctccacgtttctacctgtacctctgaggactgggtttctgcccacacgagttgcaggatttgctctactgagaaaaagacttttgctccagaaagcaagtttcccgtttcagacacggacagcgagttttgcttctagaatcattttcagctgcatacagaaaaatgaacttggctgagctgaagagccacacatatgttaaacggaagctcgggtattaggaacgtcgagaaaggcaggccgaaaagttagcccccttctcctcacccctgtcctcacagcggccccttcagtggcctgactttttctgcgtgggacccagaatgtcgcttgaggatgggacccccgcagacctccacgcgctgccacgcaaacggcctcggccgagagcattcgctttccagatgagaatggcatcttcagggacccgctggtagtggggccaggtctccacagggccggtccagtccttcctacccacccgggccctgcggccaggcggggccgggaggggcggatgccggagggcgctgggggaggccgacccgcgcggggctggtccgagggcggaggcaatccgccggcgacgccgcaggtcccgggtggctgacgccgtccgggggcgttcctgggagctgggggccggcgaggctggacccgacgcgcccgggaggagccggccggcggccacgtgacccaccgcggcggggccggcggcccagaaatagcagcggcggcggttccgcccgcgggcggcgcgagcgaggggcagaggcgagagacgccggcggggcgcgggcgcggcggccccggaggatgctgctgagccccggcactgcctggctgcgagcacatgatggcgatacgggagctcaaag

SEQ ID NO: 19533 - DNA, 2300 bp, Homo sapien
tttttttctttttttgagagagtcttgctctgttgctcaggctagagtgcagtggcaccatctccgctcactgcaacctctgcttcccaggttcaagcgattctcctgcctcagcctcctgagtagctgggattacagacatttgtcaccacatccggctaactttcgtatttttagtagagatctaaaatcgcatttttagtagagtagcacatctgattagtatctgtgctggcaatcaacctggagaaaggaggccgggacacaggcatctgtcctcttgcctccacatctactgggatggcaggagtgatgttttcacttctgcctctcagcgatggagttcctctgtgtcctcatccactcccttccaaacagcagggaccctgtacaagatagggtcccaggaagtaaattaacttaccaatgagcaagggccaaagatgctgcccactttgtgctaataaaatctgctcatgatggtttctgcaaatgatgcctatcctccccgcttcacctcctttctcctaacactaagaaagaagacattgcccagataagtgcctgacgtttattttcatcctctgctttaaaatagggcaccatgaaaaacagtcctgtcagctgtggaagccgttggcattggagagtgaagacaacctcccgtcctttaaaatatcacataagaaaggcccaaagtctcccagtgagagagggaagagctttctttggcagtaaccgaggaaacggagtggaagcatgagctcttcctggaacaggattcatatcatcaagaactacggatttgctgggccaggcatggtggctcacgcctgtaatcccagcaatttgggaggctgaggcaggtggatcgtttgaggtcaggagttagagaccagccttgctaacatggtgaaaccctgtctcgactaaaaaaaatacaaaaattagccgggtgtggtggtgaatgcctgtaatcccagctactcgagagggtgaggcaagagaattgcttgaacctgggagatagaggttgcagtgagtcgagattgtgccactgcactccagcctcggtgacagggcaagactgtctcaaagaaaaaaaaaaaaggaactatggatttgctaaggccaatagtctctctaccccttagtaaaatgtgttttggtataaaaatccagataattgaaccattgccattagatgtttcgaggtttctattgacaatgtggaggtcttatcatttagatttcaacacttttatttttagtttttagagacggggccttgctctgttgcccaggctagagtacgatgtagtgatcacggctcactgcagtcttgaactcactggctcaagcaagcctcccacctcagcttcccaagtagctgggacaggcgtgtgccactgtgcctggctaggttttgtattttttgtagagatggggtcttgctatgttgcctaggctgatctcaaactcctgggctcaagaaatcctcccaccttggcctcccaaagtactgagatcacggtgtgagccaccatgcctgaccactttcaacacttatattgttggggtgaaactgaaacatatgaggatttgttcaaagtacatgtagagaaggcaaaattccacactgattcttcctgccttggactggatgtgttgtgcagagtgagggtggaaaatgagccagtggtcctgaactaataaaataagtctccctgggggacaggtatttggcttcccattccacaggatggggtagatgtggcttatggaaccaggattattcacaaagaggttgttctcctgtatgtaaaggctggaagagccgtgtacttggatgtgtctgcatgggggagggcacaggctgggctggtgcgcctgggaggtgggggaggtggggaaagaggctgtctagcaggagctgaacatttgacattgtgggacactttgcagaggaggctaacatggtttcgaggagatacttaggagctggtcacaatgggtgagtcgtaaagagaatgttggagctgggggatcctggagaaagatgataagatggttgattcacagaacccaggctggacgggacttgtggcgagcagtccagcacagcctcacagtgcagagcatgagctttggagcctgcccccaccctagctttgtgaccttaagtgagctacatagcttctcatgtgtaaactactcatcataatggttctgacctcagtggtttgttgtgttctaggaaatgatgccagtgaatgcgtagtcccagcctcagcacaggg

SEQ ID NO: 19534 - DNA, 2300 bp, Homo sapien
accttcacggtgaatgttacagctcttaaagatggcacaaacccaggccaggcgtggtggctcatgcctgtaatcccaacactttgggaggccaaggcgggtggatcactaggtcagtcctgtaatcccagcactttgggaggccaaggcgggtgaatcatgaggtcaggagatcgagaccatcctggttaacacggtgaaaccccacctctactaaaaatataaaaaaattagctgggcatggagacaggcgcctgtagtcccagctactcaggtggctgaggcaggagaatggcgtgaacctgggaggcggagcttgcagtgagctgagatcacgccactgcactctagcctgggggacagagcgagactccctctcaaaaaaaaaaaaaaaaaaaaagaaagaaagaaatgatggcacaaacccaaagactgagcagcagcaagatttattgtgaagagcaaaagaacaaagcttccacaatgtggaaaaggacccaagcaggctgcccctgcaggctggggtggccagtttttattggcttatttgtccctgcccatgccctgctgattggtccattttacagagtgctgattggtccattttacaaacctctagctacctacagagtgctgataggtgcgtttttacagagcactgattggtgcattttacaaaactctagctagctacagagtgctgattggtgcattttacaatcctcttgtaagaaaagttctccaagtccccacccaacccagaaatccagctggcttcacctctcactcccaggaatttcagggctgaaaacacattcctcgtgggtggcacaatcttctgtgaatgccaggctagcaattccagcaggctgttcctggatggaccctaatacctggatcgcacatgaaaacttggatttggtgcctacttctagactgctgtttcgtctcgtttattttctagacaaactgtgctgctccatggcagtagcatcaatatgtcttttgtttcgtggcgctacctagggatttaaattcaaaccgtatcacaaaatacaataaaggtttatttacagcacattggtttcatttgacgttcctgtaccggactaccctggcaatcggctaaagttttgtcagcaagtttgctgctgggatttttcttatttggttcagtttactacagcctatcgtaagtgatgcagatggagttagtttctaacatgtgaacgtgagaactgttttggtttgggtccatcattaaaactgaagaagattatttgggttcgatggtgtagatttttgacttttatttctagtttctgtgtgctttgtcatatttccccttgcttcctagacgaggtgtgtttccttatctgattttgcatcactggagagaactcaggaagcaggagaggctgaattggataccacggggaatgcagccctgccaacagaggactggatagaattagagcaaacggacacatccccccacgcctgttctccacagggcagattttattaatatatttctaacattggggcctcgtttcagtcttcaagttttttcttttttagcgcaaactagacgcgctctgagagccaaaattagcgtccgcgaaccccaccccattgcctccaacagacctagctctcctttccaccctcaaacagccgttactacagttcccagcaagcaccgcgcagggccgcaaagggccaggccctcggcgaaggccccgccccgcagggggcatgccgggagttgtagtgagtgggcgcttccctactactacttgtcccttccactgggcattcccacttggaagagtgtgatgcgctgccagagcagtttctctagttccgtactcggagctcaaggtgacagaggactgcgcttccagccctgcgctgcgcatcgcgtcggtcccgcggacctttgccccgcctccttccacacccgttcccttgacagctgggctgcgctccgggccgcggcaagccgcgagcgcgcaggcgcagcagccccgcgccgcgctaggccggcctggagggcgggacaagcgctagaagctcccggccgggggcgcgcacgtaggcacgcagaggccgtcacgtgggtcgccgaggctcgcaagtgcgcgtggccgtggcggctggtgtggggttgagtcagttgtgggacccggagctgctgacccagcgggtggcccaccgaaccggtgacacagcggcaggcgttagggctcgggagccgcgagcctggcctcgtcctagagctcggccgagccgtcgcc

SEQ ID NO: 19535 - DNA, 2300 bp, Homo sapien
tagagggatacaatggagcagaaaatctcaaattcagtagttaagtgggtttattatagataattctacgttttactcgcaagttaacatgtcctgttaagaatttagttttgaatgggtgaggtgtatttcttttgatatattatcatcatctttagataatttatatttttatgtctagaaagcccactatctgtattgacaatttataatccctggtgggcagtatcgtgaaatgtaaatactatttcagaattcgtacaactcttgtagagtttgttgatgaaaactgacccacagtcattttaaaaatcagtttaaaaaattattttaccttagtttggataattggtactttttaaaattggggagaattaaattaataaaacatttaattctaaaaacttacataattatgttatgaaaatacataaatatgtaattaaaataattaggcattcactatggattaggattgttcaaaattaaaattttgtgacatgtctttttgtcatgttactaagaaattggatctttattttaatctgtgattgctactaatgttaaagtcctagtcaaaatagtcctataacattttacatttttaagcgtttgtagtaattatgggtttgagaatgttaagaaatggaatttgcctttaagacttctagttttatcagttcaaaacgtatctccagccagccattttgtggattcatgtagtgaaatggacacattggagttttcgtctttactctcatactagttttatggtggagtttttaatcagatgcttttcaaaaagataatggaagctcttggggttgaagaagcagcaagggttgtatgttgtaaatggaatgattagtttgaccatataatgaaacaagcagttcagaagatcatactttgtcatatgtatgctttttttttaaaaaaaaaatgcagacctgttagttatattaaaatgctttcttttctataactggttctctgcctttctatgcttgcttctaattttcactcatttttatctccttcctctcatcctagttccaaatttttatttattagaaaatattttactactaacaaactttaagcatagcataaaatcattttgcttcttagggcttgaaataagtgtcttttaatgactttgtaaaattttaaaagacatgcttattcttaagattgaaataaagaaaagagagcctttataatagttgtctttgattccagccttctagcttttttaaaaaatacataactttaaacgaattgtttttagaacgatttaaaattacttttggaatacttagaactgtggttattgttcccaactggaacatgtttttatgttcttcctccaaattaacaggtatttattttgttgtctaaattaatctgcataatttttcttcaggcttttcttcagcaaaatggatcagccttttgggttctttgttttgtaattttatgttgtttgggtgcagaaccaaagcttaaaaactttgtatctagagcatatggcataataaacacttaacaaatatgtgaatgaatgaatggattgaatgaatgaacaaacaaaattgaggtgaagcaaaagcactgatgtcatagggtgtagggtcttcagatgtagagatttttgcagttggcctagtaaaatgaacttgaagattgacactggtttgcagacaactgggaaattctgttattttcagcaacgtattaacaacatactgtaaaaatacagttgtaaagttcatagatccaaagtttcatagtacttttttgatagaaatcatacatgtttatggtagaaattttgtgaaatacagggaatgaagaagaaaatatgacttgtttttaagtctgccacctcgagaaaggcagtgttagtagccatttgggatatttatgcctacaaatgtcagcacttaattaaaattgaggttatatattttcagttttgaatccttcgttgttgagaatccaattaaattttgttttctctttaatttttaaactttacaggccccttcacagatgtagtcactacaaatcttaaattgcgaaatccatcggatagaaaagtgtgtttcaaagtgaagactacagcacctcgccggtactgtgtgaggcccaacagtggaattattgacccagggtcaactgtgactgtttcaggtagcaaatcatgttctgaatttatgtacatttgaattttgaccttttatgattatgtttttgtttaataaggtttcatctggagggagggaaataattcttat

SEQ ID NO: 19536 - DNA, 2300 bp, Homo sapien
ttttgacaaacagccctggagaaaagtctgtttacacttggaaagcttcaagtcaactcaaataaagacagccttgagaatgagatcttccagggaaccaacagaaaggtcaaatgctgacaactctctggaaataggcctttgaaggcactccatccctattctgccccctccagtggctgctggttttctctgtaattgaaggctgcatatcttcaagactaccatggagaccaggggataagggtatgtatggaaatagggcaaattaaaacatcataaaactcattgttcttatgaagattcagacatttttcttgagcaaacacttctcgagttgctgcaagcctttggttaacttccagagtcctgaaaagttgattctgacagtttttgccactgttctcattgcttgtacggaggtgggaatttttgaagatccttactccctcattttcacagatgtcactctcttattttatttaattttaattaatttagatttaaatttaaatagccacatgtgactagtggctactgtattggacagtgtaagtctataaaattcaatatgaagtcaactagcccaatgaaagttaactccaatatagatatatacaaatacagtaaactcaaaatcactatggaggaggcaggccatgcattatctccattctgcagttgaggaaactgagttgagagtcaagacgtggaaaagagaagccgagaataacctccagctgctgaggaggcctgggcacagttgctgatggggcatgggtgtcctcaaccaccagccccactggaaacctgggggcagatgacacaactgctctccagcagtcaagtggaaggagcctgatgtctcatcactgccatgtgccaggatgctccagcttctctctaatcctctttttttcttttttttgagatggagttttgctctttgttacccaggctggagtgcagtggcgcaatctcggctcactacaacctccgcctcccaggttcaagtgattctcctgtctcagcctcccaagtagctaggattataggcacccaccaccaggcccagctaatttttgtatttttaatagagacagggtctcaccatgctggccaggctggtctcaaactcctgacctcaggtgatccacccatctcagcctcccaaagtgctgggattacaggtgtgagccaccacacccagcctctttaatcctcttattagtcatcctataggtggccaggaagccaaacaaaatggaaatctgctgaatttaaaacaatctgatgcccttattttttcagttcaataaattaaaaatatatggtttggtttcaaactgattcatgggagtttaggattaaagattttgttctcctggttggttgggttttccttgtttcctttttcttttaatcttcttttaatgtcacgctcccatttatgattgtgtaaacaatggatgtacgatttctgcactcggcacgtgagtgcagctacctctagtatcagctcatggctctctgcacttccagtgcctgggagacatgcatttgccagaatccattacattgtcccaggcaggagtgccacagggcacccagacttcccaggcaccagctagtggcaaatcacatcaagcatttgtggcatttgtttcaggagagcacactgcagcagggtgaggtaggaagcctgtcccaaggtatccactaagttagacaatccagggaaaccttggtttactaatccagatttcaacctgccaaaccagctccagtgcaagactaccaagctcgctttgtatcagctttcaagagactcggtgcaaaggaaataagtgatgatgtgctcaaacagagaaacccatcctaattcccaaagacaccttccccaggaagccttccctgacccctgggctgaactgagaatgcctcctctgtgcctccctgtccctgagcacaaatagcagggcactccacatgctatttgtaaattacacgttgccatgttggcctccccagtcagacagcgagattcttggagacaaatgtcttgtcttcattaccctagcactagcaccagcaccagcagggggccttagatgctccctgtgtgcaatgatctgtgtgcatatcctgcctatgtatagatgtcctgggctcagtacacacttgttgaactcaacccaggatggctatgccaggacagagaatgtggcttttaagggaccctaacagcccatctgaaaaaaaaacaaaaacaaaaaaacttgatccttgatttaatcatg

SEQ ID NO: 19537 - DNA, 2300 bp, Homo sapien
tcccttccgaacctaagacagcaaagtgctgtctttacctaagattagtctttacctaagacagcaaagtactcacaagcatttcagactctggggatccacacaccccagaatacaagaactttctgggcagaattttgcaaagtctcatatcccttccagcccctgagtaagcaaggtcagcaatacccttatctgccagtggaaggagacgtccctcctcaagggccctggaacccactatggcttcccgatggccactttgaaggaggccactcagctccatctggtgctggctgtaggcaggggccctgcagagaggtcctggaaccaaactggagggtggctgccggctttgtatttcagttaaaatgaacactgcatttgaaatgctctggtgattttgtttaaattctttaaactattttttctctcttagctccatcttccttacctccacttaacctacatgctggcaatgggaaacggagggaagaaaattcattttctgaaattgtatatatgaatttttgtccttgaacgatattttcaatgttttgacagatggctcaagcttccaaaatctctacgctcacattgacttgatttttagagtcacattggaagtgtctggcaacaagaaagaatgtttgaaattagtgatattccagcaaatgcaggctgtatggtttgagaagtctctgcctctcgtagtggtgcatgtgtcttaggtcagccatggcatggggaaaaagaaccttatctgcacctgtctgcagggcactgagcaccgcttccctggggctctctgtgtctctcaccagcttcctacctgcatcattttccatattctctgtcctctggagtgcctaaaaacccaggctgtggggcgatgctggctccaccactgaccagccagtgactttgtgcactttgcctaaattatcttaacccttgtttgccgggtacatagtaaaatacccagccactcttagccgttatgaatttcagtgtttctgtagattctaagccaaatgagatgtaggcacagatatcaaagatgacaacatgaaagggttgtaggtgaagttggaatggagatcaaagcaaaatttccaacttcttttttctttttcttttttgagatggggtctccctctgtcacccaagctggagtgcagaggctccatttctgctcactgcaacctccgcctcttgggttcaagcaattctcctgcctcagcctcctgagtagctgggattacaggcgcgggccaccactcccaactaattttttgttgttgtttttagtagagatgggatgtcacggtgttagctaggatggtctcgaactcctgacctcatgatctgcctgcctcggcctcccaaagtgctgggattacaggcatgagccaccgtgcccagccaacttctttttcttcagctgagactttgggatgcactcggggtgagggacagtgagggctgctgaagtcagttctccaccagccacaaggacaactgtgactcgccctacccctcatcaagcatagagttcccaggagcctaggagagagggcactgagcctccagaccctggccagactctccccgaggtttgcctcccagctggaagcagaggtgtcaaaggaaggcttatggctggaaagtatgttcgagatgagagagaaaaaaagaaaccgagacagagacaggcagagagagtgagcactaggccgtgcatagaggggccactaacagggtagacgctcacggcacaggtgagcaggagcgcaagcggccagagatgggggcccccttcccctgctggcggctgtgttcgcattcttgctgtcttctgtggctgagagtaaccacacaacagtcctcagccaagatagcctttccctgtcttcacacagacgcaggaacccccagggatgagtgctcaggaagggagtggacagcagaaccctccctaggacgcggaccctcttaggcaggtggcatttgtcagcccgggtttccttcctccccaccctttccatctttctcaggctcctcccagcctcttccatattcctctcccagccccgtgctgacaccccagctgctctggcaaggatgggcagtgataagaggagccccgagcagggaggctggggcctgcagtttcacgcagctgtgaagtgcaccggatggagtctgtaaagtgctgtgtgaagcttgctgcagctgagtcccatgggcggaggaatgggagacgtgccgcagatgaggcagagccagcctccccaggt

SEQ ID NO: 19538 - DNA, 2300 bp, Homo sapien
ggcccagggaagccaaaagattggatgcccctggtgtaagacagccccctttgaattctaggcatcccctgtattaagaactaatgagtatattaattccagtgtgtatctagccatctaactttgaccttggatttctctttgggggtaaccttttcatgaaatgcctttcctcggtgtttaagaccttaaatctccccacaatgagcaggtggttgtctttgagaactatgtgagaaaacacagcattttgccatgtaattaggcctctggggcacaaggctctttacagttataacacactgcccggctgaggctgtgtctgtcaggagtgccgctcctctgcgtggtcttcgggtcagtgtgtagactgatcgcgttttggtgaggaaaggacatcttatatgctgtatcggcaattacaccctgtctatgaattgctcattgctgaacatgatttgaatttcaaaggatgcaaaagaggacactggagctcatgaaattctcccttttcatctccccccaccgccaccaaggtaataaaaaattcagtgtcaagctaagcagctgaagcaattgttgagacgggaactgcaaatcacaagtcaggctctgtctcgattctgattatatttctcatgatagtttaagatctgaaacctactttttccttagttatcaatatacagaagcaaagtaacttttgggtccccaaatctgcacagtaacatagggaatgggatatatttctgttggggaagcattctttatttttaaatgtcaaaggaattgggtattcagcaggacacctaaggaatagaatgctgggtgttaagatccgaaggcaaaaacactgtccttatgattgtgccttcagaacatattttccacttctcggttaaatagacatttacgtcatacgcctgcatttgaaagctaagttcctgtgtggggccaggagagcaccaacatgcagatttcacattcctacaagtttgcaaataaataattgtgcctgtgttgagagtgtcaggtgcagtgaagtctggggagaaggggccatagtgttctatatattcattcattcttcaaaaaagagtgattgtgttcatgcccccagtacagtcctatacacgaaggatacaacagaggcctgctttcctgggagagacaagaacagatgaatacagaaaagagcgtgcagtgtcagtgcaaggcgaggactgagaaccgggcgatgcggctgcacagctgggtcagtgtggatgatcgggaaggggctgtctgatgggctggcccctatgctgagatttttctttctttttattttcatttaagatggagtcttgctctgtcacccaggctagagtgcagtggcatgatcttggctcactgcaacctccgcctcccaggttcaaatgattctcctgcctcagcttcccaagtaactgggattacagacgcctgccaccatgcccagctaatttctacattttcagtagagatgggatttcaccgtgttagccaggctggtctcggactcctgacctcaagagatccacctgcctcatcctcccaaagtgctgggattacaggtgtgagccactgtgcccggccctgagatttgaaaagcaaagagagcagctacacgatgatcagggaagatgagttggatgccaaaaatcccttgccctattcgtgttggttaaatcagggaacaagacttgcagggcaaggagcagcgagttaaggctctatgatgagggaatgctggcaacttgaaggaaaagcaaggtcacctgtgagcttcaaagtggcatggagacgaggcagggccacaggtggagggctgagcctcggggtgaggagtttgaattctatgagggatgtgaggaagcctttacagggcaagcaagggaagggcatgatacactaaatgttaagtgaatgcctccggctgccaggtggaggaaggattacagagaagctggggagaaccagggagagctgctagactccacgtggtgggcgtggtgggcgagtaccagcagaagccgcctggacagcaaccggaagtgcggtggctctggtgggcgtggtgggcgagtaccagcagaagccgcctggacagcaaccggaagtgcggtggctctggtgggcgtggtggctgagtaccagcagaagccgcgtggacagcaaccggaagtgccgtggctctggactctgggctgtcgtagccaaacacgccttcttggccgagtggtggcattctgcctgccccctgtgggcatcattgagat

SEQ ID NO: 19539 - DNA, 2300 bp, Homo sapien
aaacaaaaattgaagcaacttgactgtcaaaatgacaccaaattacagctgacctgttggttttatcctttttttaataacaaaatcaaaaaattaagcacatacatgacctaactgttcttctaatatgtgatgaataacctaaacatttttccattgctgtcaacctatttgcttatacaaaaatgcaccacccctaacactctcttagccatttgcttgtttcaaatattctttgatggactaaaaggcatcaaatgactaaaagacattgaaaaactaaacaccacttcatatgtgttcttggtgacaaggcttttgttctgcataaccaaccaagtatgctgtttacatcgtttccaactgcccaacattcgtgaagaagtcaaattcttggtttaaaatgaaaatttgattggcccttggcaaacattcaaatcttacaaatcatagtctgctacccaagcctagcaactgggatgagagaacgatcaggtacaaagtcaggctcagaaagatgtggcagagcaagactaacacaaaataatgcctgcgctcataggcatcgttttcatgatcttctttttgcccacacaggtattctttcatcttcaagatttgcaaacaggagcacattaatcttcacaacatccgtgtgagctgagcagctggtacatcttatgatcctctgtattaatgatggaaagatgataatgatggtgataaaaattaagacacatcaaacagcgtcagcactatcacatcaaaacacccatggatttctcaggttaaaaaaaaaaaaagaaaagtggaaactgtcaaatgtattctcatctattttactattataccgttgctaagatccaactacttttgaaagtctaacacataaggagttgaattattgcattgttcaaaggggcagagaattctcttgggaaatcaggcatttattttaatcttttttttaaatgaaaaacactaacggttgcgtcaagaaatgttctctagactccactgggtctcctgtctgctctttatcctagtgtggagaagaggtgacattaaccttaggagggggaaaactgctggaagaggggaagggctcaagcaggcccttggcagaggagggaccttccaggtaaatcagatggccactgccttgtacccgcattggagaacgaaggaccccaggggaaactcttcctgcctttgggtctcaaacgcccatgtagtcccccctcccccacaagaccgcgaacacaaataaaatcagctttgattgtggtgattcaatttgctctggaagagaagaggactcggcgaaggggcctaagtgcacgttcttagactgacagggagcgtttctcggagatttctcccgtttcaacaagtcatttgcctagtggaagggggaggaaaaagtgaacgggctcctgcctcctacaccgtgcccttcccaggttggggcctatgacaaggttctccgtgctccccagaggagccaggcactgggccggggtaggcgatttgtagtgaagacctgcaccgcacccacgagggggcccagcactgacgcatcctcacccccagcaaccctccaggactctctctttggtctcccctctctcccatggctgcgcgctggcacacaccccggctcagcaggccgctttgcttggatcccacgccaggcctccagcctcgccgcccgcaccccctttgaacacctttccccaggggagtgggcggaggcggaagggtgacccgcgcattctctttccttgcgggcggggtgcggggccaaaggctcccaccccctccaaggaggaagcgcgcccggaatgggggacggggaggagagaaaggggtgcgcagagccagagggaggcagaggggcctggagggaggagaggaggaggggaggatggaaggggtaggaagctggaagaggaggggtaggcgagagaggggaaggagggaagcgggaggggagcggggggaggaggggcgcccggagtgggaggaggggaggcgttgcccgacgcgccctttcaagtctccgcgctcccccccggcggcggctgcccgggggcggtggctcggcgtcgcctcccccgaccgccccctccagggcccctcctccgtgccgcggccaggctgcccggccggcggcgcgctggaaatatgaagagacgctgcagctgcggtggcggtggcggccactgcagctcagagcggcgcacgcggcggccggggcgggacgcggggccgggcgcggagaagtcggggcgggcggc

SEQ ID NO: 19540 - DNA, 2300 bp, Homo sapien
caggaaaatttccactgagaacatttacccttactatctgcctaaaaagtatttcttaataactgctatatcactatcgtggggtttttttcccattctttctttgttgatgccaaagtaaaattaagttaaatattgtatcctctcatagatcatgaatgcaatgagggcaggcattatatctcttgctcaacaattgggtcctaggtgtgtaggcttaatgtcttgtgcagagtgggcattcagtaaacaataattcaataatgaatgaataaataagggagaatgtggaggaggttataggcttagaaaactttctgggcactttcaatggttttagagggtgatggtattgggtggttaataaatctaaactcacttgaaaacataaggctttccactggtaacagtccttttatatttaatcagtcatcccagagttgtggtgaattggaagtcatggccaaagtattttacactcctctattttcctacctcttgaatctgaacttgccttatgacatgttttcatcaataaaatgtggcagaagtaatgtgcagtgggagtccaggccttacgaagcctgaagtttccactttcactctcttgaaattctgctgccttcctataaaggaagcccaggctagacaaccaaatgaagaggggtcttgtgtgtgggtactaaataagaaagtgaggatagagaaaaaaatccaaggccagttcacctgttggcactagaaaaaatgcaaaatattgattggcaaatagatgcaggaagatcgatcgattgtgtggtgaggccaaagggaagaactcttcgaatagttatttcatattcaacaataagtgagagttggcaggcaagcagagattgtgtaggagttttgagaaggaaggtgtgaacagccctccaagtgagtgggtgagtgatttgaccatggaaacataggagagttgctcagcagcaccaaaggtcggcttaatgtttatgatcattaaaatgagtaatgttagcatcctcgtttgtttttttccagtcaaattcacttgctcaagagcagttccagagtaggtggagagctggggtttttcctggcttggagaaaggagggagagggagccaaggccgttgagagtatacgcactaaaatgatgggacatgaatttatgctgggaaaagaaggacgtgtaagagcagagggatagggaaaggtgaggaatctggtgaaggttaagtaattactagcactaggaggtatgagctggaatggaaaggggaagtaaagtgagctgtttgaaactgacactacggagggtacacagttatgagtaaggtcaagggtgtgatcccaggaatgtgtggctgcgctagtgtgggaaagatcacaggaggttggaagctgagaggctgtatagtcattgcaggaatcatccatgtggatattgaaatcaccatgaattatgaatgaagccaactgtattactggttactatttttaccagaccactgtacgcgactttagatccctcaacttcccatttagagcacttatcacggcttgaaatattagagcgattatttgggttgggcgcggattatttgacagtaatcagggtttacaagtctgtttcgtttcttgactgacatacaattaatacccaaaaggcagaatggatagaagaatactattctatctgtcatacagagaaacttcagatgtaataaattataaagccaattaaccctacaaacaggatccacagcagtttcacattaatgaaaaagcaagacttcaagagggcgggagtttttgtctgctgatcttcccgcatctaaaatagtgcctgacacatattaggtgctttgcaaatattgaatgaaagaatacgccccatcagtatctcaccgcgcctgcgctagatgccctaggtggggccagccttgacgcgctgcgcctgcgcaatgtctctttgcggggcgcaccggcaggctcccagccccgcttcgtcgcagcggcttgggccctccggccctccgtagccgctcgactgtcgcgctgcaccagcttcctcctcggcgttcccacgcctatttgggcggattcttggcgccggaggaagaggcagggtcaccctctctccacgtcagagacctgactgtggagatggcggctcagaagataaacgaggggctggaacacctcgccaaagcagagaaatagtgagtgagaaccttccgggggcctgtgtgtagacgccgggtccgtctctcactggcgcggccttagcacccggg

SEQ ID NO: 19541 - DNA, 2300 bp, Homo sapien
atggcttactgcagcctcaacctcctgggctcaggcgatcctcccacctcagcctcctgagtagctgggactataggtgcatgtcaccatgccctgctaattttttaatttttttggtagagactggttctcgctgtttttcccaggctgggctcaaactcctgggctcaagtgatacttctgcctcaacctcccaaagtgctgggattataggcgtgagccactaccctactactgactggaagtcttataaataatataaacagtcagttagtacatatgttgtatgttgtatggaatatgttttatactgtattcttagaataaagctagagaaaagaaaatattaagaaaatcgtaaggaagagaaaatatatttagtgttctttaagtggaagtagagcatcatagggctcttcatcctcatcatagtcttcacgtttgggctgaggaggaggaagaggaggaggaggaagaagaggggttggttttgctgtctcaggtggcagaggagcaagacagtctgcgtataattggaccagcacagtttaaatctctgctgttcaaggttcagttgtattctttaaaagccaaaatgaccctcaggactaatgtgtctgagagagattttgttaggtttacctcccctgttcattcagatatttttcagcagatattgtagactcggattctttcattgacttttggttttataacaaaaaaagtattgtttttattttttcactgaggtttggaaatgcattagcatttcattctgcttgagtgaatgatagcagtcttatttcatacagtgtctttcagtctgtgttattgttagtttccatagctaaataataaagttatgttttggggttggcgaaaatgagaccagttttgttaagggtatcctaatgaatttgtcaacttagcaagggactgaataggcagatttgtaaaccacccatgagatgtcagtgtggagcctaccttaagatacagcaagtcaacactaaataagttgcttatgtaaactttataactagcttttaaacggtgtttttttttaagtttatttttaaaatgtttgatttggagatattagacattaggactgcatgatcctgagatgtgtagattaatagtaagatacagaatttattagtcatggaagagggttgcaaactcagatgaactcagggtgtagaggaataactaaaatgaatgagcagctgggacgtggagggcatttggaagtgaagagcggggagaagcgccaggaggtgcatgctcatgtggcgggacagtgctgcccagccccagcctgttgccatacagggatgcaagcctgctgatgccgtagcttttgatatttttttgaagaaagccataaaacaattttcatgaaagtatctaatttaaaaatactgcatggatcaagcaaaacacacttggaagtgagatagagtcattgggctgccagtttgtgatccttggcataggtcttgtatgtagtagggacttggtaaatgtttaaagaataagaagtgcttagaaaacagtaaagagcaaggtttttggttttttctattttcatagatttcccaaaggtctgtgaagtgatgatgaactctgtgtagaaattacctggtacctttttgattgggtttaatgaagcttgattgggagagtaatcatgtgaagcatttcattttaaatatctttattgctatacaatgtatttgagtcatttactttcatgaattagggataaaataattgtatttcatatcctttgcccactttttgattgggttttttttttcttgtaaatttaagttccttgtagaaaaagaagacatacagccaagaaacatgaaaaacagctcatcatcattgatcattagagaaatgcaaatcaaaaccacaatgagatctcacgccagtcagaatggtgatgattaagaagtcaggaaacaatagatgctggccaggctgtggagaaataggaaagtttttatactgttggtgggagtgtaaattagttcaaccgttgtggaagacagtgtggggattcctcaaggatctagaaccagaaataccatttgacccagcaatcccattactgggcatatgcccaaaggaacataaatcattctatagaaacgtatgtttatacagtaaacacgtatgtttattgtagcaccatttacaatagcaaagacatggaaccaacccaaatgcccatcagtgatagactggataaagaaaatgtggtacatatacaccatggaatactatgc

SEQ ID NO: 19542 - DNA, 2300 bp, Homo sapien
ggctctgtcttctgcccacccttctcctagacaaggcaggccaacacatggaggccagacagctatgaaagacacgtctccctagaggttgtttggatggatttctttggtgcaaattcttgtattagaaatgacccatttgggttctttctctcgccacctgaacaaatagcaagccctggcgagcaagcgagctgcctctcactcccctgtgatcaggaggagctgaaggacttgcggtgaggcgaatgaagagcagcagttgttttttggagaggtttccttagtttgtagacctccctctttctaattctttctctgaaacatgtatccccttttctgtagctcattccctacatccttttcatgcaggtttccgttaggcagtccctgggggtgatgatttatgtttacacttccccttgattctttggctcaattcccttctggagtgcctgtggagcctaatcaactctggtgctctctatgccccgaacctagcttgggaaggggacttgattaggctcttagggcgactgtggtctgcaagggccacgctgtggcagagccctctgtctgcctgttctgcagaggggccctgttttccatgtaggaactcatatcagaggtcttttctctgttttcctggttgttttttcttccttccttcccttccctctctttttcccttgttccctccctccctcactgtctttgtctctttcttttctttcattttatgggctaattgtcccaagggcagcaaaacagaaactgctggctacgaatctgctgtggggctcagggcaacgtgacggatggtgtgagatgcagtcatcggcaaggttcattaatagttcactgctttgcatcagcctggttgccacgatacagcatcattcataatttagaattgctggtgtgccttctgtaatgtattatgactgtgttaggaaggcctggccccaaaagctcccggcatatgtgccagtggcctcagaggtcagactctgggcggctcctctgggccgggagagtagaatgttaaccgaggccctgggaatcaggggagggaaccctgcaacttccctcagcttactgtgcctctggtttgcataaagcttcctccatgagatggaacaaaattcatggaaataacattttcccagaaagaaacttggctgtgactgagatgtcattttgattaaaaatgtcaaaagataaatgaattacaaaaaaatagctaacagaggaaacccaattttatgtagtaaaattttcattttctatattcccacaccaggaggtatagttatgatttagcattgttttagacttggtaaaaggactttatactttctaactttagagaccactgcatcctatagacagtcaggcggctttccaggcactcttcctgggtgatgtgcctgcctagggggctgcagttttccctactctcaccttgtcatttactcactcgtttccctcccatatatcaaaactgtctcccagaggcaatccaccccttaccgtaacttcaaggcaatgtgctacctttcctggtgcttgcgtttaggcattctctctagtagctaaggatagcaaatttattttttcttctcaaaatccttttgggtgtaacacagtgggaggggaatgatcttgggtgaggtgtgagacttagtgttcctgaatgtatgccaagtaggtgactcactgcttttgctagtaagcttagaggccaggccaggggccactagttttgcttcatttaatatcatttattaatgaggccaaccagatatttccaattatttgtcacttggctctgagctattggccatcatttttaaaaggctgcaaatattctttgcatttctcaacaaactcgacctagttttctcattaggcatttgacctacacctgagaaggtgtaaatgatcaggaagtgaaagtaaaggaaatgaatatgtggcttccatgtctggagctttagtttctcagtgtctcagcacccctttttggagtggtgaggagaagcagaagcctttggggcctggcacagggaatggccatcctggctgggagagagagggagaatcagtgcttactgagcatcctccacaagatagcaaggtatcttagatatggagagatgtagcggggatcctgcagagagtagtgtgggagaggagtgccctcaggcctccctgatgtcagaaccatctgcacaggctaaacagagatcgattcttggaccttgtccctgtatcagagtctcagggcctgagccatg

SEQ ID NO: 19543 - DNA, 2300 bp, Homo sapien
tttgttgttgttgctgttttttatttttgcattccaaaatccactgtattttattagcttaatgtacaattggtgaaacaacacttaaatttcaaatgtttcttactataatgcaaaatagtattactgtgaacacctccctcatgcatcacttacagcactattataaatctaccacagggagcctctccacttaggttttcctcatgcatcttagatttcactgtccataatcttccatggaaaaggaagtgaattatgcccacctgagagagaaaggccgttcctagctctgatgcagcaagaactggccacgtgctttcacataaacactagaaatgaaggcagagcatcaagtgatttgaaagttgatttaaattaatactggtttttagaaaatctaaaattgtttcaatgcaaaaaaaattttgaatgtaactataaatctccaaaaaaatcaatatcctgctccttaaaaactgaaatccaaataaattatatattttaaagttgggttattctagataataagttgtttttaaagagaggctgacagtgagttctgtgagcaagaaagagagggtagagagaagagaggcaaggtgatgatttacaaaatgaaacagtctgggggaattttacaactttcaccaaaggctgaagtttggtctaaatgataaagaaatttcaggccgattgtggtggctcacacctgtaatcctggcactttgggagactgaggtgggcagatcacttgaggccaggagtttgagaccagcctggccaacatggcgaaactctgtctttactaaaaatacaaaaatcagctgggaggtagtagcgcatgcctgtaatcccagctactcaggaggctgaggcaggagaatcacttgaactagggaggcagaggttgcagtgagctgagatcacgccactgcactccagcctgagtgacagcaagatttcgtctcaaaaaaaaaaaaaaaaaaagaaattgcagcctctggaggcccatattatcacttgcattccaccaatactggggaagccctacctgacccccttccaacgtgtgagatgcgagggcagcttgactgtctccgaagagagagacttcctgagagtcctctctgcccagcctgagccagtggccagcacgtggcccctgctttgtttttccttgtgttggtagaaagagcatatctcagcagaagttctcacatccaaatactgcatccaaagcccaacagtttagtgatgcagttttgggaacctcaacataatacactagttgattaacttagctctttcatcacagttttgagacttagaaccctaagcaagcttatttgggcacacaagcagtaggttcatttgggtccatgagagtgacttgttagttagaattaaaaaagaagcatgacaggtacagaagaatgctttctggcatctaaaatttacaaggaaacagttaaaaaaaatacaaagtggggctgttcagaatgtaaagaactccttcaatcccattttctccttttaagtgtcccaaattccttatatccaattctgtacaaattaccaaaaatttactttctagccttttctttaaagagctactaaaaacaacaacaacaacaaaaacaacaaaaaaacagaacaattaaaattcaatttctgactgaatattctttttaacacatggagtttgtttattgccgtggagactaacatcattgggttgatataagaatattttagaacctcgtattaaaacatcaagatgggttctcttttggtcagcaggttcctcctttttctcaccttcaactctgttttaaaagtgtttgtggcctccttgggttctattaactcgattgtctaagaagctgagcattgaggtgaagtagactgaaagggtcaggattgaccgttgtggacccaatgaaaacgtggtgacattaatcaaattaagagttaaatatgttgtaaatctcttttccagacttctgaataatcactgacattaagctttttttttttcttcacagaaacttaagtctgggtgcaaaatcggaaatagcaacagataagctttcttttcctcttaaaaatattactcgaaagaatatcgctaaaatgatagcaggcaacagcacagaaagttcaaaaacaccagtgtaagtgtattttttcctactaatagagctttgttaggtatatgcagctggtacaaaatgtccatctacagattcatgtgtatgaggaatgcaacttcattctttggtaacacaaagttaatt

SEQ ID NO: 19544 - DNA, 2300 bp, Homo sapien
cttctctccctctcaaaaatgcccccaagaccatattccactttacctccacctctgctaaggtgtagagagaaacacagcacaaataccctaggtttgttcaggttattaaggctgtcaccgttgttatttatagaaaccttatttctacaaatgtagataatatgtaattaaaatatttttgaggaatcagttcacactttggatttgcgttgactattgacccaaacctttagctcttcctacccgtggtgctgctgtgccaaggctctgcctgtggccagcagttctgctgtgcaatgcatgcgagtatcacctcaggaaacacagttgcatggaggcaggttggtgcctctggcttctgaagaccttacctctcagtcacaccaggtaagatgaagaacatccagaagtgaattccgaacacaagaatgacctggaagatgacctttcccagtacagtcttcctgaggtagagggctcggtccaccaccatggttccaaactgaatgaggaccatcaccaaaaacggccccgggacctggtcctctgacagtgaagaggtgatgtctgcagctgctgagtgtttctggggaagagacaacaaattcatgcccaagagaggcaattcatggcaggaagcgccatcgccatgggtcagggcgggtgctgtggcctttgccccaacctaccccaaaggcccaaaagccgaagacaatgatgatgaagtccacagtgtcagccaggaacatgagtacatacacgtcagtcacggcgctatactccgggtggatgaggttgtaaaagaactgtttgatgggcacatagatctccagcgtcctgcaaaatggagacccccacccccaacccacttgtttcaggaagggcaggatggcagaaatgaccagacactgccatcatgccactcctctgcattcctctttccagtcaggtcccaccttcctctctctgcctcaggatagtcccgctgtggacagctcctgttctaacggagagcgtatacacatttactgccaagataggtactgcagccctctctgctgatggcaccacagccctctcctcttgcttgaagcataatagaatggtatgatgccctgggaacgaggtgttgggtttgtagcctgattcaattgctcaccaccggcgagaaccatgagcatgctatgtaacctctgtgtttagttttctcatctgtaaaactggagtgatgagaagacctgatgcctagggccaaggtgggaagtaaatgagggaatgcatgagggcgctcagacttggagtgcttggtccatgcgcgtttgaatgtgcaacgcccctgctcctcctgttttagggcctgtgtccatgctggctcccacatactcccctggccttttatctatgctttgctctgtgccttagtgtggtgtcctgttggctcttgcttgtctgtctaacctttgccctatctttgctctgggacctgccttcagttcaacgccacgttcaggtgccactggctctcctgctctcagagcctctgtccagggctccactcccagctggcagtcccagtcccatgcaccacttccatccccagcaggtggagggacctgtgtagtgtgctgggtaacaggtgtatgaccatggacaaagcatttccccaccatgcacttccatccccttctcaggataagagtgcaggtctaaggcccttccagcattgacactgtattcctctcagtctggctggacttcaccatgataatgcctaagaatacaatccatgagcccttgaaatgacccatttactctgttcaaatagaaaaagcatgtgcataaatgcaatggatataaaatgaatcacacttacagaaaaatgatttttaaaaacaagacaaaaaggggtaatttcattctgccttacgcagataacatttgtgacacgagaagttacttctctgctctgctcctggtttataggaaataataaagcccaaaaccctacaataaagcacacatgccatatgttctcatggactcacttctttatggtaaaggcttttgctttgattaaatgttcttgaagcttttccatataaagttcccttttgcctttttgcttaatactcaaaacactgcttcctttttgactgctgtttcgggtgcttgtgctgcctagaaataaaaagagatcataagatgggtggtggagcctggggtttgttcacctaaatatccaagaagcagaacccagagcccacatggtggagggatagctcaggactgtttgggag

SEQ ID NO: 19545 - DNA, 2300 bp, Homo sapien
tccatgtacgagtcagagagaagaccaggcaatgtcttaggaagcaaatgcgtggccaaagagctcaggggagagctccgtccaacagcagcaaggtcatcagggtgactttccatccaataagtcaagtcactgtaatttcttccttagtccatctgccaaaagctatctgtctccatcttaattatcagctaaaatcttattatctatacccacccatctcttccctactgggaccctcataaagctctagacaagctttcttttcttgtgtattagtccgttttcatgctgctgataaagacatacctgagactgggcaatttacgaaagaaagagttttaatggactccccagttccacacggctggggaggcctcacaatcatggcagaaggggagcaggagcaagtcacatcttacttggatggtggcaggcaaagagaggagtgctttgttcagggaaactcccctttttataaccatcggatctcatgagacttattcactaccacgagaacagcatgggaaagacctgccgccatgactcaattacgtcccaccgggtctctcccacaacatgtgggaattcaagatgagatatggggacacagccaaaccatatcatcttgcttttctaatcttgaaggacagtttgttggatgagattttgtaagacagaataccaagggttccacctgaaacagtagcctcatttgtccctgtccctgctttctcagtgccatggcttatgggatgaagatgacatgactgaaagtggcatggccagggaggaatcagatgatgagctctccctcggtcatggcaggagggactcctccgattctctcaagtccatcaacctggccgcgtctgtggagtcagtgcatgtgaccttcccggagcagcagacagctgtccggaggaagcgctccggcagcagctccgagccatcccagagatccagcttttcttcaaacagatcccaaagaggtatctgtcgacacaatatatctaggctgtagttagctcccaggtggccttgtttttctggtgcctgtgggtctggggcaagggagtgtattgggtgctatcaagagacagacattgttatgtgaaaagaaagggctttgaaatcagagaaacccgagttcaaatcctgcctcagctgtgtgaccccattacccaaaacaccttattgtatctcaggacaagggtttcagataattgtgaaaaatggccggcacactgccttgtacctaataaacgccaggctcatgataatttatttgtgttacatgcgaaaaatctgcagggcgtgtccagagtgctatcaatcacaatgtattttttaaacatatttagatgtaattgatgagaacttttagccaaactatggttatttcctagtctagtaattaattttttcccaaacaacgagtacaatcagaaagtagatatgcctcacagctgcccctcttggaatcactaggcttttgtatctgtggggctcctgtctgaagcttttgtaattatggggctcctgtctgaagcttttataattatggggctcctgtctgaagcttttgtacttacggggctcctgtctgaagctttccatgcagtggtgtatagtcatcttcagaacctgcttttgaggcagatactggcagattatgtcatattcattttacaattagagaaactagaataggaaaacagacatggggcatcctatctggaacacctgcatcctagtaccctagttagcacaataaaaactatccttccagtttatttacttctgaaacaaagattgcatagcaatccaggaaagagccaccatggggtgttaaaccccacaggcctgcgatgggagcagagttgaggacaaatcccaaggccgtgcatactcatcctcccaaacagtcctgagctatccctccaccatgtgggctctgggttctgcttcttggatatttaggtgaacaaaccccaggctccaccacccatcttatgatctctttttatttctaggcagcacaagcacccgaaacagcagtcaaaaaggaagcagtgttttgagtattaagcaaaaaggcaaaagggaactttatatggaaaagcttcaagaacatttaatcaaagcaaaagcctttaccataaagaagtgagtccatgagaacatatggcatgtgtgctttattgtagggttttgggctttattatttcctataaaccaggagcagagcagagaagtaacttctcgtgtcacaaatgttatctgcgtaaggcagaatg

SEQ ID NO: 19546 - DNA, 2300 bp, Homo sapien
taggtctgggatgacctccagggaagagcataggttatatgtgtctggcttgtaagaaaataactctaccaaagtccaagttctagggttcagtgcacacccattcattatcacagagttgggatttatttctatgatcgtccaagatttcttcttgataaactggtgcttccaagtacagaaaacattacatgaaagacctttcctttcctcgttaggtttaatttttcccaggaatttacattgctcctgaagcactaccacaaggtgactgaatttttaggtacaattggcatctcctggaatccttatcactgagaccttgtgaattcttgcacatgttgggatcataaaacaccacttttttttctggctgcagagcttcaggattatccccctcttttgtttttcagataggagcatgtggatacattggaacattggtgcacaatagttgttggttgatccaggctttcagcctggcctgcacagtcaaaggctatcaaatgcgtaagtatgaaaagcaagtgtgaaggcagaaaggcagaagagggaggatagttgtattgttctagttttaaaagtgggccaaagcacataaagatataaaagtggggtcagttttctccagatggaggctgtagaactgtagtacattgtgaatctattgtctataacatgagatgccttatgctaagcctctttgatcatcttcttgaaacttctgaaatgctgaggacttggagtcagggtctggagattggatgtagtgctgtagtaactccccggactttttgagtcaagattaggaaggattctagaagcccactcaaacctgctgttgctccacttaatgtcttggggcatcaagtaactctgacttcaggctcctcctgtcctcaggaagctcagagagcttcaagcctagggaaacagtagggaggagcatgaggatttctagagttagactcctgccaagacaaaggcagaagtgtcattgccaccaccctgcctcttgcaccagaaccaaggacgacatcacacgtggcctaccatggcacccagaatgggtgctacttggacacagtgctctctctatttatttattattatttatttatctatttttaaaaaaatatttcaagacagggtctctgttacccaggctgaactacagtggcacaatcatagctcactgtaaccttgaactcctaggctccagcaatcctcccacttctgcctcctgagtagctgggaccacagtagctgcctcctgagtagctgcaccactatgcctggctaattttttaattttttgtagagatgttgcccaggttggtcttgaactcctggcctcaagcaatcctcctgcctcagtctctcaaagtgctgggattacaagcatgaaccaccacacccagtcttttttaaaaagattaattttttttttattatgtgatttctatttcaggctatattttgccgaagcctcactgggacgttgtttttcacttaagataaggcatactattgatactccttctaataagccatgctgtgctcattattctgctggttacccctgggtatagcccattcccagaatgggtgttttcttttgtataagagcatttccactggcactgggacattatttctctgtggcctttgttggaggtccctttcttcctaagagagagaaatactcaagaggcctcccacgtaaaaagggccctcctgagccttgtagtgtgaagagttcaatgcatggtcagccttatgaatcagtgttgatattggattggaagtgtgtgatctccttgtaaataaatcaactcataagtaagtcagagcatcagaatgctgcttttatgcctatatttcccaagcctgaccatacctcagattttataaaattacaatgaaaatggatgttaattttaatgtgtgtttttctactgttactatagctgctgctaattcaccctgtacacttcccagtggggaagcaggaatcatttgggacagcatatgttttgccttcctcctgctgcaaagaagagttttcatgagttattattttctacatgttgtggctgatataaaagcttcccagattctggcatcaaggtgggtcaggccatgaaatcaggtggtttctcccaggaaacttgcctgaaataatattgcactatcatttctgtctgagcttgcttctagaacccacaagaagttaagaaatcccttccagcaaaaccaatccaagaagaatttagcacaaggcctgtaaaatagaatag

SEQ ID NO: 19547 - DNA, 2300 bp, Homo sapien
tcaatgcaccctgcctgtggcatggcagtttgggggcatcgttgcttaaggacatctgctgtgtagctgtagtagcagctgtggaaacagcctcccctctttgagtttcactctgttaatagcagtaattgttagaaagtagttttcttgtcgtatgagattgcagcagtgtcaatgtagacctttaagattcactctgaggtggtcccacctcacactgcaaccaccgaattccttgtcttaataaaggtatcttttcatttataaaatgcatccctgaagagaacaaatacatactgacgactgtgcagcagccgatcacttccacatttaataacatttcacatggagagtcctgacaaagcaggaacagcaaatgtgttccctgagatttggtgtgtggcactggtatagaagatatgggttgcaattttaagagtagctaacttctccaaagtcgagaggatgaattgactagcttaggaaaataaggaagtagtatgtcagcctaactccttccaccaatgtaaaactcgcttcagattctctctcttcattaaattaacaatctgtttctggcatactatcatttacctgctggacatcctgtgcaagggaattgtttgaatgataatctaaaagcgtagggacaatgtggattccttacgacagttacccaaaatgataggcatgtttacaaatatcaaatcaacaagttgaaagtaaacctgcattttatctaatcaaacttcctcatttggtagaaaattaattaactttcacaaagttaaatagtttactcagaacctacaattatccagatagaataatattatttattgtccatcttgtttgaaccctgctaaaaatttctggattaactatgataaatagagaagactatcagtatgtctactaggctttttcttaatgtagactttattgcccagaagttctttaaaacattaatttgagtatgaataaaaagatatgcttttaaaaaaaactgtaggagaaggatgggacttgttatggtccactaagaaataaactgtaacatcccaggctgctgagtgggctcaccggaagctctctctccctgtattctttctctggttcaggatctcacacagtcttcccacggttgccaatcgacagttcgcatcagtaactctcaggtggggacatgatgcagacgtctcactcctgaaaacacttagcttccatggcacatgctttagatggcagagtgggattcgtctacacaaaggttgactgaaagcacacattctttcaagaaatttttaaaaacttaccaaaaatgtgaatgacttgattcttgcaagatggtttgttgcgttactaaaaaagcatgatataatttgcctcagcagtctcagtatgctctctcctttacaaacctgcaatcctgtccactctcagatcagttgccatgcctagggttcagagcaaagcacgctattgatgccaccctggaatgcatttggcattagggcgttactgcaacaggcatacaggaatgcaatagtggatgatatgtagcatgatatgtgatctctgacattccttataattcttctgttctcatctcctttttttcctttctatttcaattactatgagcagcatcaagaaaaaattaccaatccaccaaaatgagtaagtccccctgtgaagccatgaaatgcttgctctacatgatgccatttcatgcttctacaccctaaactctgaccattttctcctctgggaaaaatgtcaagtttaggtgttgatagctctcattaccaactaatcactagaacccgaattaaaaaagctaacaaaacctaaccaagtttacagtttgtttttagaaagaacttaaaacaaacaaaccaaccaaaaagaaagtgacaaaacgctaacaccccaccttgtgaggtctttgtacatgcactgatttcatttgtgtttatcctccttttacttgcccctcagtcaaatctctcccaacaccctttcctcttctgactcagctgctctctgccaacagactggcccacccggaaggaagcctcccggacctcaccatgatgcatctgactgccagcctggagaagccggaggtgaggaagttggctgagcctggggaggagaagcttgagggctactctgaaaaagcccagaagggtgatcttgggaaagacagcgaggagtcagaggaggacggagaggaagaggaggaatccgaggaggaggaagaaacatcaggtaatcagcccactaccagcagctgg

SEQ ID NO: 19548 - DNA, 2300 bp, Homo sapien
tgaagaaaaaggtaaattagtgtatatgtgtggctggagagtttggtgctcagcaaaattacagagaaagagccccaaaatacatcagacagcttcagaataaatgaaactggaatgtaaacttggagcaataagtaacgttattacagcgtgtgacttttgaggtacacgtgagagttgcacaggagtgctaaaaatgtgccagttgggccgggcgccgtggctcgcgcctgtaatcccagcactttgggaggccgaggtgggcggatcccgaggtcaggacattgagaccatcctggctaacacggtgaaaacccgcctttactaaaaatacaaaaaactagccgggcgtagtggtgggcgcctgtagtcccagctactcaggaggctgaggaagagaacggtgtgaacctgggaggcggagctcgcagtgaaccgagacctcaccgctgcactccagcctgggcgacagagcgagtctccctctcaaaaaaaaaaaaaaaaaagtgccatttgatcctcacgaaggtgattcccaatgaaagaaaaactgaggctctgagaaattaaatgcttcctcccaggtcatacttctagtgagtactggaaacaagaagctaagtcacatctttcacatttaaaacttctctcttctttcttaacaatagtataccacaatgtaaaaacagaggatgatgatgttatcaccttgataattttagacctgctatataggtaaaataagaacagcttgctccctaattccctaggtatgccaataaatgtaaatttaatatttgtagaatggattgaagactattgtgaggttaagaagcactgtctgtgaaaaggagcctagaaatgtccacagaagctgggctggtcaccttcagattaaaccagtaaccataagaatgaatacaggcatatatatatctccatacacacacacatatatttatgtttagtttcttatttggacctaaacaatgagttgtttttcagtaacaaaagtctgtctataagattcaaatcttgcctgtatgagtttggatgtctctgttcaacatagtgattaaattaaccagttaattttggtaaaaaatggttaatttgagatcaactgttgctctgagccctcacttgattttcactcttctcactgtgaatctactagttgtttgaataaattattcaaattaaccccaataattattttgaaataattattcaagttcttcaaatataaggctgtgtaacacagagatgactcttatgtattttaaagcaacacaaaataagttttttattttgatccattaaattgttttaaacttaaattacaattactctttcaatctaatttaaattaaattatgttttgctgtaactcttaaatttttagttatttaaaagtatactttttgtttaagattgttagcattaaccacatttagtaaagtactatttggattgtctagagccatgaagcaattagaatttgaaattgatatagtcatttagatttgtgctattgttgcctatttattttttacatctcacagtacttaaagctatcactggatatcagaaagaaaaaagatcttgtatataaattagtgttaccaaatttattttcttgtaaactatattttgagaaggttatgaaaattgacttttaatctagttataaatgttgctgagtttatgagaatagtctaaaatcatccaaattatacaataacttagaaaatgcatgcctctacatcctatacctatcacatggtcaaagtgtggtctgcacagataaccagctaagtataacagcacagttttctatttgaagatgaggaacttcaagatatacaagtggaaggagagcccaaagaggaggaagaagaggaagcgaaggaagagaagcaagagagaaagaaggtagagcaagaggaagctgaagaagaagatgagcaggacatcatgaaagtcctgggcaatctggtggtggccatgttcatcaagtactggatctacgtctgcggaggcatgttcttcttcgtcagcttcgagggtaaaatcgtaatgtacaaaatcatctacatggtgctgttcctgttctgtgtggccctataccaggtaggtacacagttgaccattttaattctcacatctctcccaggagtatacatgagctacctctgcagagattttaaatcactagaatctcatgaacatggataaagtgattggcaagattcaaacatcgtatcccaagaatcctaaaatgggaaatgactgtcttc

SEQ ID NO: 19549 - DNA, 2300 bp, Homo sapien
catttacatttttatgttttctcagattttgcttttcctctctattcctactcaccacacttgcggtctttattgtttcatgctaaattgcttctgtgcttccctcacccccgcccctctccccatctttctctctccctctctctggttcattgaggtgcaatttacattcctaaaattctacccattttaggtgagtagttctatgaatttgaaaatatacacaatcatttaaccaccaccatagtcaggatgtgtgttatcttcattatccccaaaaagagtctcctgccctcggcagtcaacctcccacctcttcccccagcccgtggcaaccactgatctgatttttctttctctggctttaccttttctggattgtcatgtgaatggaatcatggagtctatggccttttgtgtctggcttttttcacatggaataaaccttttagatttatccatagagtcacaagtatccatacttgattcctgtttaattaattaatttttatttataaataatacataataattgtacatatttatggggtacattgtgataattcccttttattgctaatggtattccattatatagacattatataatcagttatctgctgattggttggtcgataattgggttgttttcagttttgggcaattatgagtagagctgctatgaatgtttgcaggcaggtggttgtgtggacatcatatttttctttcactctaggagtctcttaattggctgttctatcttcagtctgactgcctatcaatcctgcattaccctaaatgtttaccggacccatttctgaaaattaaagcacacttgaactgcatgaagaaacatatttaaagatattcttgggtgattctatttgtagtatgtctaccactctattttatgtgctttacaaatttatattttcatttattttatttgcttaacagaagctttaccttttgacagttaaaaactcagagctatttatcactcatttgattactattttatttctgaaaaatttggaattttttatagctaattacttttagcttgttataatagatttgagtacagcctttgagatccctcacctgcagtctcaaaattgcaatgctctgaaaacattttagcctagttttgtgatggcaaaacctgacctgaagtcacctggtagctgaagggagaccattcctgtgagtgcgaattgtcctcatgtgtgtgtttgaacagggccaatgcctagtgtctgcatcaagcggtacatcatgtatgtaacatgtgtctttctgcattctggaaaaggatgaattttgaagtacatttggctccaagagatttggaaagaggatttgtactgtcttcatctgttccctacacaactgccttacttgtttgatgatggtagtcaaactttttactgtgaccgcaggaagcaatgcactttcttttatttttttttaacagagtctcagtctgtctcccaggctggagtgcagtagcgcaatctcgctcactgcaacctctgcctcccgggttcaagtgattctcctgcctcagtctcccaagtagctgggattacaggtgcgcaccaccacacccagctaatttttgtatttttaatagagacagggtttcaccatgttgctctcgaactcctggccttaagtaatccacctgcctcggcctcccaaagtattgggattataggcgtgagccaccgcttccagccagcaatgcactttctgttttgatctggtacaacacgtgatttcaaactttcaaaggaaaaaaaaagttactcttaccacttgcaaggagattcgatatattttttatttcctttgttctattatattacagaaaaaataaagtactggttgattcccactaagtttattttataatatgctaattattcatgacctgcatttggaaaaacaccaggctaaacaccagtgctcagcaggagggatggtaagctcagaagcgaattagaagtttattccttgatatgatttggctgtgtcaccacccagatctcatcttgagccgtagttcccataatccccatgtgtcatgggaagaacctggtgggaggtaattgaatcattggggcagttacctccatgctgttctcgtgataacgagtgagttctcatgagatctgatggttttctaaggggattttcccccacttcacactgcacgtctcttgctgcctccatgtgaagaaggatgtgtttgcttcttcttctgccatgattttaagtttcctgaggcctcccca

SEQ ID NO: 19550 - DNA, 2300 bp, Homo sapien
ctcaaaataaaaattaaaaaaattagccaggcctgatggtgcacacctgtaatcctggctattctggaagctgaggcaggaggattacttgagcccaggagttctatattgcagtgagctatgatcatgccactgcattccagcctgggtgacagagagagatcctgtcttaaaaaaaaaaatccataaaatatttgttttcattttcagctgactttagtatacaaaatattatccttcttgtatgatattgataaagtttagctaataagttataatagaaaagcaattgctgtaagtctcttgggtctcagtttcttcaaaagcctttcctgcctcacacactactcttccccatctcgatttaaacaggaccttcctttatactctgagaatcctgttttttcccttcatggcattagcgtaatttacaattaatatatttacctgtgtttttatgattgagtatatttctacctcattagtctataaattccatgaggacccctgtctttgcctcacccagcaccaacaagaatgcctagggtactgtaggcacttaattaaatggatgaatggataaatggatagatggatgagtgaatgaatagcgaaaatgacagtgatatttagtaactttttctattttcccaagttagattttctatagtcctcctttcttttgctcaaatatctaaaagtatgccataattttagcaaaatttggggaacaatgttaggtcaaaagtagtacatgtatgcacatttgttatcagtaggacccccaaaagaaatgtgaatgccggatctccaacttcttgatttaaaaatgtaatccaggcccggcgcgctggctcacgcctgtaatcccagcactttgggaggcaaggtgggtggatccctcgaggtcaggagttcgagaccagcagcctggccaacatggtgaaaccgtctctactaaaaattcaaaaaaaaaaagaaaaaaagaaaaattagctgggagtggtggtgggtgcctgcagtcccagctactcgggaggctgaggcagtagaaccactggaaccggggaggcggaggttgcagtgagccgtgattgcaccactgcactctagcctgggcaacagagccagactgtttcaaaaagaaaaaatgtaatccaatgtagtatttacatctagtgccaacgggtacagtgcacactgtgctgcatgctgtgtttcattaagcagcctaatctggtgtgttaatgagagatgtatttaactatcagctataatattccatgtcattttccaaggaacacatcttacagcaggtttttcacaagctatattgaaatgttcacctgttgcagaagctctataagatgctatgcattcagcgggaaataaccgaagacatagcacctctggcaggcttgtttctcagcgtcatggagagagcgcacccagtctgaaggcgcatctgctcctctctgccctatattgtggattaagaaaatacagtgtataatctcatattctcatttcagcaaatataaatagtacatggcaattatatgtgctcggttttcatttttaagggtggagattgttgaaaatggtgtcgtggaccagactccagaattggagattttgtagagatcaaaggtatagtactattaaagtagggataaagagtgtgcagacgtgggtgtaagataatgaacagaaaagggagtggcaaggtgcagagatctctgcaagaaatggattggggaaattgaaggctttaaagccacggtctctattcctacacccagctttccgtcctcggttactatcgcccaagatcaaagccaccctggttttctgattgccgcaactgcggctccaggtgctgagtgcacagccactgcggcactgtccgcagctgcgcgccgggctcagacggcattatttacggtacagaatactcgcccgcgcgacggtatttacggtaacggggaccagcctgggcggcagtatttacggtaacgaaagccagctgtatttacggtagcgagggctggaccggcggcggcatttacggtaacgggggccgggctcgcggaggcccgtcggttcggtccgctctgggcgttagcaagtgatctccagccaaggcggccgccaccccttgcacacagcagaaaatgcaaaatgaccctctggggcagtgaggggctgtggccctcggccccggcctgccgcacccccttcccgcagctggcggccggcagcgccgaacagggtccgggtgcagccccctcccgcccctc

SEQ ID NO: 19551 - DNA, 2300 bp, Homo sapien
agcagtggcagacgccacggaaagaacaggacagatactcaggaaacggacccaacgggatgcggtaactgttggggtttgtaagaaaatggaatctggcataactcccaccgttctggtttggaaaattaggggcccttattccagagaaagaactgagaaaggagcaggtagaaggcgtgagggtggcacggggcatgagctcaatccttggcaaggtgaattccagacacctgcggcaccgtgggggcggtgtgtctggggacggtggtggtcagcaggatgggctgggctagggatccgcggtgggcacggtgagagctgagtgggcagagtatggaggatgcagtcagcccgtcaggaacgtgtgtgggttgagaggctgtgctgtggggacggctcctcggacccctgggtggaggagcccggatgcaccggccagagggacagcctgaaacccaatgcagtctctaggagggatcaaagcaggagccacagagacggaaagaaaataaagaccaaaattcatggatgagacttggcccctggggggccctagatgaccttgatgagagtattttccctatggggtgaatgtggaagccaggctgccaggtactgaggtgggagcagcaggaggggaatacaggcggagtcagacgacctttctaactcttggctgcggtgggcaggaggaaaactggtggaactaacaaggggcgtgagatgaaaggtgttgtgtggttcaggtgggacagagttgaatgtgttcgcttgcttgagggaaaccagccggtagcaggagaggttgaagcaagagtggagaggggaaggtgcgctgggtgaggggcgaaggtccacagggcagcggcgggcctgagggtaggggaagcgccgcctggggagccggggcgggctggggtctgttctcctgaagaaggccagctccgcagtgaagaagaccgtgtaggtttcttggaaggtggaggcactcgacgacagagctgagcaaaggcaagttagacagcgcagcgccaagcccgagacggtcaactgggagccgccacacacaaggaacagtgatttctccacgcccacggctggtgtccacgacttcggcccggccccctcttctgacctccttcccccaagtacaacactgcaaacgccaagctgccggctctggccctattggaggggtctcagtaacggagggcaggtgccagtctcgcgccctagttcgttcctctgctacaacgccaagttcgaggccacagtgccttctggaagagttgttgtgctgcttgggagcactgcacaggagaaacgggggctggaggtaaagacaggaggctcgggaggcggcgacgtgggcgagctggaatagtctagaagctgagcagaacaaaggcggtgtgactggtgagcctcggagggatcctcctccctgctagaatatgcatgatcctccgcgagtcttcgcccgccaggagcagggacgcgtccgagccaacacggggcgcgcgcccagacgcactttcccggctcggggtgcaagagagccaggcggccgcggcgcagcggaggggctgcgggcccggaacccaggccggtcagcgtgtaagcgccccagccggccgggctccgtggggggtcagctccctgacccctacagcgcggtagcgcctctccgagagctccgggaccagcggcccggccgcccccaaagccagcctccctctcccttccccgcaccgggatcccagaccagggagggggcgcacgtccgacggctgaggaatagcagggcgcgagccggcccggcaggtgcccatcgtcgccctctgggaccccggtggcgcgctctgtcctccgcgccacgctcagccaccaccccggctgtttgggacccggcacccagccgagcgcgccgccccctcggggacccgctgggcggggctgagcgaggcttggagtgcgggcgaagggacgtggggcgaacccggggcgctgcgccacctcggctgtctccagcggagaccggcgccctcgccccccgtctccgttcattgtgctgtattcatccagcagattttgaaacaattctcgtgtaaaaaggcattttactccgcgcgtcttccttacagccatttagttgggagtttgcggtgggcagggggagggagaagaaacgcctgctctgaatcggaaaacaccgaagagaccagaccatctctttcagcagcaggaaagagaggagccgtcgcaggagccgcacacgtctccaactctctattgct

SEQ ID NO: 19552 - DNA, 2300 bp, Homo sapien
aaacgctcagagtcattcttgattgatctatttcccctcagtactcatatccacatgccgacaagtctaaatggttgtttccaaaataaatcccaactcaggccacttttctccacccccatgatcccctcccactgcaagctctcccattacctttccactgtattattagactagtctccgaagtggttgccctccttcaactcctgcctccccacaatccgttctccatccacagccagagtgatcttgatgaaacacaatgagatctcatggctccactgcttagaaccctccaaagcttcgtgtgtctggacacacctggcctgtaaggctgatgataagatccagcctctgagtctctctgacctccccacagcagcccttggctgataggtactaaccacatttgcctgctttctgttacaacttcagattcatggaattcaactgaaattcaaatgaaagacaccacagagagcaaaagacccaaagagcaacccacccgtatttcccccatgtgcaatattctcagagaaaattctcaagatgtttgtttctaagataagttattcttctccttttccttcttaaattgaagaaccctaaaattaatttttaactttaatataatgtatttgtttcaaaagttatcttacccctacaggaaaattaacttaagaccctcaaataattgaaccatgacactgacaggctttctcaaggattcaatctcaaaaaagtactggactgagtaaaacagtgttttgtttactattaaaatacttgatttagctctacttgtatgtttataaaaaacatacattcttttaaataaaagttaattttccaatggagcatataagtcagatttgtcttgatatcattctgaatgaggatcatcaaaatatgaaaccaagaactacataatttaataagtaatataaatatttccaagcactatgaaataaatgtcactaaaattctgtgcatactaaaattaaaaatagcattttcagaaggaatgttgcatatttaacattaatttcctgatttatataagtcataagtcggggctatgttaaaaatatataaatatacataaatatatatataaaatatactctcatttgacatgtgcatagacatttaagacaacagaatgttaggcttaaaaaacaccagtaaaactaacccccacaaaagtattacctctgaaagagcactgtaattacatttgcatctgctggtgctaaattctcctttactgtaatgataattaattatgctttctgaaaataacttttaagtaaccttaatttatctatctgaaaatacatgcattcaaagcaaatggtttctcaagtttttaattaaaaatgttcatgatttagctccaaaaacactttcacaaattagatgttttggattccttagataatataggtgggagttaccaattgtttctggatttggggttgaatatgggatgcctcatcaaccgtgagactgttatgaacaggagaaagaagacatgggaccgattaataaatcttaattttaatttctcactagatgttaagaatagcatttccccccaaatatataagatgttttacgattacttctaggcaaacatgataggataaatccaagaactcagatgcttttctataaatgtctaaatctgaagttgaaagggaacaccactcctgatttcaaccaggaccatgtagttctgggtgattttgccagtgtacatagcatcagtgagaaccgggaggacatctgcacctccagttagcagaggatcctggtgtggctggagcatcttctgccgaccccttcccctgccacgtcaaccccttgccctctccaagccatccagttaaagacatggggccagatgcccagccccttcttccagccagtgtgccactcctcactcctccattttagaaattctacagatatcactggctctacactggcatgcttatcagaagcaaaaatcatattaaaggatgaaaataaaagctttttaaaaaagttattcttggctgggcacggtggctcatgcctgtaatcccagcactttgggaggccgaggcgggtggatcatgaggtcaggagatcgagaccatcctggctaacacggtgaaaccccatctctactaaaaatacaaaaaacattagccgggtgaggtggcgggcgcctgtagtcccagctactagggaggctgaggcaggagaatggcgtgaacccgggaggcggagctttcagtgagccgcgccactgc

SEQ ID NO: 19553 - DNA, 2300 bp, Homo sapien
cctgaccaacatggcgaaaccccagctgtactgaaaatacaaaaattagccggtagtgctggcgtgtgcctgtaatctcagctactcgggagactgaggcaggagaatcgcgtgaacccagaagggggaggctgcagtgagccaagatcacactactgcactccagcctgagtgacaaagcaagatttcatctcaaaaaaaaaaaaaaaaaaaagaaagaaaagaaaaaagaaaactatggagcatgacatggaagctggataagaaacttgtttgcaaactccaagaaaaaccaggacctaaaagaagggaagagtggaatggagggtgagcagagtagggggcctaagctctctatatccactttgaacagatttcttccccttttttttggttgtttatattccatttctagaaaagtttcatttggaaaaagggttctactgctttgcggggcaaaaaggaaccatagctaagctgctaactagggtaacatcctatcccctctgaaatacaattaaattcagcaacgccatctggattcagtggctgctgtgtgcagagcgcctgctgggctccatggagaggggaaggaatcagtgtctgcatccaagtagttcacactgtaacaggtgacctatacacacagaccccttgccaggcaatgtgccctgtagtatggccacacagaggaggagtcctggggaggctccatggtgaaggtggcttttgaaggactggcagggtgtcaataggcagagatgcatggacactaaaatccaggcaacaggaacagcatagccacaggaccgggcgtcagtcacattctccccgctggccgaatgacgcaaataatgctcaaattccatgctgcggtttgctttgactggcggaggtggaggggcgcgaaagacgagccagcatgctgcacagcaggtttagcctccatgcccggggtttggagcaagagagtgaaaacatcagagctatgtcttcagaaggtcttgtgttgtgaaactgactggcaagctatcacaggaagctaagcgaggtggcaggctgctagattaaaatgatctctaaacagaattcgctctcagagttcattttcagcctacctcattagggcagatttggtcttctcacattgttattgctgtatcggaggaatctttctaaagagaaaagtgacagcacacattgctgccatttgaaagccagcatttttaaagggcgtaatacatagtgacagttttgatgtatgcccgtgggtgtgggtcctgatatctcaacatactctgcctgcataatttaaaatgacagtttagcctgtcaaacttaaatgtgagtgaagttccttggatatttataaaacatcaaaaagacagaatggtgtcagcaaaagatgggtctttttattactaaaccacgggacgatttttggataattgctggcaactcacctagaagctgaacttccagacaaagtataaatttggtggtgccacagttttgaagattattttcactcaatgcaataaaaggatattacagaactctagcacaaattgtagtcaaagatggagacgcgtcaatgacccgtttgtttttaatgtgttttaatgtttttgtttttaatgtatccatggtttccagttcccctgagaaagtggaaattacccatgctaataaagcaagcgttagtgcgaagacctagctgatgtttggctggtttttagcccgctagccagtcaccctttataaagcctgccaagtttggagcgtgggtaattttacacgcgggtctccacagatcctgtctacttcggtagatttattactaggaaagtgcgtgggggcactaatttttgtgaattgactaatgcgttagaattttaaaaaccgggtagaacgcagcgcaggaagcgagcgttccccgccgcagcgccggagcgtccagccagaatccccctgcatgcgcagcccctggcgtcttacgtcccacaggccccaccccggcgccttccgtcccgcaggctccgcctttggcgctgggctctgacgtcaccacctgcgccgctcacagtagaaacaggaagtgggaccaaaacaaaggagcggcggccgggagcggacttaccttaccttctctgccttcggcgcgcttctcagccgggccgccgacccaaaggagccgtccgactatgtctaacatggagaaacacctgttcaacctgaagttcgcggccaaagaactgagtaggagtgccaaaaaatgcgataaggaggaaaaggccgaa

SEQ ID NO: 19554 - DNA, 2300 bp, Homo sapien
gacattttgtcagagcctgttcttatagcatgcccagatctgaagcatttctccaccagggtctatgaatggtcttcaggggatcttgaaataataggtgtatgaaccaaatattttttgggattgccagttattgttttaagatgggagaggataccatttaaaaatttggcattaggctgagcttggtggcttatgcctgtaatcctagcactttgggaggctgaggcaggtggatcacttgaggtgaggagttcgagaccagcctggccaacatggcgaaaccctgtgtctactaaaaatacaaaaattagctgggcatggtggtacacgcctgtaatcccagctactcaggtgactgaggcataagaatcacttgaacactggaggcagaggttccagtgagccaagatcatggccactgcactccatcctgggtgacatagtgagaccctgtctcaaaaaaacaacaaaataaaacaaaaacttggcatcaaattaaataacagtaagtattaattgtaattttaaaaaagacatattatggccaagtgtggtggctcacgcctgtaatcccagcactttgggaggccgaggcgggcggatcatgaggtcaggagatcgcgaccatcctggctaacacagtgaaaccccgtctctactaaaaatacaaaaaattagtcgggcgtggtggcgggcgcctgtagttccagctactcaggaggctgaggcaggagaatggcgtgaaccccggaggcagagcttgcagtgagccgagatcgtgccactgcactccagcctgggcaacagagcgagactccatctcaaaaaaaaaaaaagttctacatcatctttatgggcatctgatttgaacaggggaattcattcacttctcacatcaaaatagggatcattggctgggtgcgttggctcatacctgtaatcccagcactttgggaggctgaggcgggcggatcacgaggtcaggagatcgagacaatcctggctaacatggtgaaaccctgtctctactaaaaatacacacacacaaaataagttagccgggcatggtggcatgtgcctgtaatcccagctactccagaggctgaggcaggagaatcgcttgaatgtgggagatggaggttgcagtgagcagagatcgcaccactgcacttcagcctggagacagagccagactcgtctcaaaaaaaagcaaaacaaaatagggatcctgtttttttagccacagggcagagatggttctctggctctcagcagtgattctttttccctcaggcctgggcggatgatgtggagcggtttcagaaaatgttcagacacccaagtcatgtacagctgaaggtagttgctggaaaccatgacattggcttccattatgagtaagtagttcacaaaagccctgcaccctgagagctcttgttaactgtaattctaaatctgttggaattcaggtgaaagccctatttgtgctgtcttgaaatttgttttcttcaaaagatgtgagctctgggatattaaactctttaaggggtttttacttggtgcatagtacaccctcaacaaatatctgtggaatgaatgaattgtatgtgcccttgggaaacatctaacttgaaatgtacatttaatggccaattattgtctttgggaacgaaaaaccaagatcatttagactttaatagctaacatttatatagtgctctagtgcttataatgtgccatctgtttcaagtactttacttccatatattaacacattaatctttaccatggtcctgttgttttacctacggtaccaatgtggaatctgaggccctgggcagctgagtaacttgccccaggcttcatagtaagtagtggaactaaaatttgagctttgctatcctggggccaggtagagcccttaactaataatgctagtctgaaactcaagtgttgaaagttattttgtgttcatgatgactctaggagtttctaaaatggcttgtcctgaaaaatgtttcttctcacaattgaatataggatgaacacatacaaagtagaacgctttgagaaagtgttcagctctgaaagactgttttcttggaaaggcattaagtgagtattatttgtaaattcttccaagacctttagtccttggaaacttcattttttaaaggtgcctgccatactgggatctatcatctacctgcgttctgtttagcctggtttatgatctttaaacagcagtgccttaggctgtccttgctggtgctcaccatgggagccgatagatggga

SEQ ID NO: 19555 - DNA, 2300 bp, Homo sapien
gaaacccatttttgtgaaaacatataatctggttgcagtactcaatattcatattcacagatggtggctctgttgcaatcacccacaggttcttcctgcccactgcacagacaaaaccattcactgagactatggtactgcagtaaataagtagtttgggctgggctgggcacggtggctcatgcctgtaatcctagcactttgggaagctgaggcgggtgaatcacttgagctcaggagttcaagactagcctgggcagcatggcaacaccccatctctactaaaaatacaaaaaaacaaaattagctgggcgtggtggcacacacctgtaatcccagctactcgggaggctgaggcatgagaatcacttgaacctgggaggcagaggttgcagtgagctgacattgtgccattgcactccagcctgggtgacagagtgagattctgtctcagaaaaaaaaaaaaagtttaattaatgaaggctggccactgagagatggaattattactcaaatcagtttctctgaatctcagaagttagggtttttatggacaattttgtgggcagggagctggggaataggagttgttgattggttgggaatgaaatcatagggatgtggaaaacagtccttgtgtgctgagtccacttctgggtggggtcataggatcagttgagccatgaaatatgggtcccagcagggtcagtcaggtagggtaaatcagttgcccgaaagtctgaaaaatatgtcaaaagaccaatcttaggatctacaatagtgatgttatttataggagaaattgaaggaagtcacaaatctttgttacctctggcctcatgactcctgagcatttagggattatagaaactacattcagcagaattcaagcccctcccctaatcctaatctcgatacctttcattagttttcaaaggtggtttcagcctcagaacagggagtagactattatcatcatccttgcttcaaagttaaactataaactggcctggcaaagtggctcacgcctgtaatcccagcactttgggaggttgaggcaggtggttcatttgaggtcaggagtttgagactagcctggccaacatggcgaaaaaccgtctctgctaaaaaaaatacaaaaattagctggacgtggtgacgagtgcctgcaatcccagctacttgggaggccgaggcatgagaatcacttgaacccaggaggcggaggttgcagtgagcccagatcacaccactgcactccagcctgggtgacaggggagaccccatttcaaaaacaaaacaaaacaaaacaaaacaaacaaacaaaaacctataaaccaaatttctcccaaagttagcttggcctatatccaggaatgaccaaggacatcttggcagtcagaaacaagatggagtcaactatgtcagatttctgttactgttataattttgcaaaggtggtttcactgtcagatcctggcctctgggtccaatgtggaatgaattccttggatctttgaagcacattgtccatgaatattcacttattttgtggaaaagcagagtagaaaagtgatgaattaacaccaaaagcaacacattacaggcggcttgtgacctgttgatttttaaggtcaaggaggggtggtggggaatcctgggagtcaaaattacacttaaataatactgaattttcccattatgtctcctaccttgacacacatcattctcatggattcccatttgatgatttctagaatattaatgaaactttatcatcttggtgagaaaagcattctaatagctttattctgacatacggaggtatggagagcttgaaggagtcagagaggtcagttgttttccttattagtaatctggcatattattattgtaaaagtataagacgattaatttggaaatgtagataggattatgtaactcattagttcttaatagagggaggtcgtgatacctgtattattagggaacataactgaattcttttccttttcccgtaggtgcccagctaagacctgaatgccatcaccctccccagggctctgcagttttctcgtggtgaacccttgatggatttgttgttgcttgagaaatggcgatgatcgaattggggtttggaagacagaattttcatccattaaagaggaagagttcattgctgttgaaactcatagctgttgtctttgctgtgcttctattttgtgaatttttaatctattacttagcgatctttcagtgtaattggcctgaagtgaaaaccacagcctctgatggtgaac

SEQ ID NO: 19556 - DNA, 2300 bp, Homo sapien
gtgacaggcccgcgcgctaccgcggaaacaggaagttggctgggtgcgcgccggctccggctgcagttcccgggtccctcggccaccgaagccaccctgccctggtgaaagggctcccgcaccgcccggtgctccccatctgcctggcgttgtgcgcagagctggaaagcatggctgttgtatgtattcttgcgcccgtgtgacaacatttaaacttctaaaaacggaacctccttccgtgttaggattgcaagttaacctaggaaaaacagcattctgcaaattatttgctggaaaatctcggtgacttaaggcccatgtattactttgcaggggtctctcactctagtttgctggtgtagattttttaaaaaatccatcttatcaaaaaataccgtttaaggtggaaaatttcaaatgcaagtcgcagttgatgagattgcaattaatatatttaagatagtgaattagagaaaaactacaggtcagtgcatattaagtatttttttcatattttggggggattagatttttaacgataactttgaagttaaaaattaaaagataggctgggtgccgttgcttaggcctgtaattccagcactctgggacgctgaagtgggaggatggcttgatcccagagatgcgagaccagcctgggcaacatagcaagtcccccgcccccaccataacaacaaaagtaccaaaaaaaaaaaaaaaaaaagccaggtgtagtggcacgcacctgaagtccctgctactcgagaagttgtgggggaaaggatcgcttcagcgcaggagtttggggctgcagcgagctgtgacgcagcctgcggttgacaaaaagtcaaaactctataaaatatttgaagggattaattctgagccaaatatgagtgaccatggctggtgacacagccatttggagaccctgagaacgcgtacgcaaggtggtcggggcccagtgtggttttatgcattttaggggagccatgagtcatcagtcaaatacatgtaagattaagatgtacattggttcggtccataaaggtatgacagctgaggaggtgggtgggtcgggggtttccgggttataggtagattgaaaattttctgattggcatttggttgaaagatttattatcaatggaaaggaatgtttgggttacaataagaggctgtggagactgaagttttatcatgcagatgaagcctccaggtaagttaagtgtccagcatgttaaatgctggtctgcttttcctgaattctaaaagggaggaggatgaaatgtgtcaagttccacccccacttcccatcatggcctaaacaagttttgcttaaaacaacctaaaacaaggttaactctggaatgcccttggtggggtccatgcagatggttgaggggtcttaggatttcatttttgatttacaatgggcggtggagtgagaccctatctctaaaaataaataaataaataaatacaaattgaaaagttcaaagataaattttttttttttttttttgagacggagtttcgctcttgttgcccaggctggagtgcaatggcgcgatctcggctcactacaacctccgcctcccgcattcaagcgattctcctgcctcagcctcccgagtagctgggattacaggcatgtgccactaccctggctgattttgtatttttagtagagacggggtttctccatgttggtcaggctggtcttgaactcccgacctcaggtgatcacccacctcggcctctcaaagtgctgggattacaggcatgagccactgcgcccagcctaaagataaaatatttggctcccaattatggcttgcagtgattattcacacatgttgggcagaaatgttttatataatttatatataaatacaggtattttatattgtaattcaagataggtattcttggccactaacccaatgtcttgtttctttagcttctcagcttcttttttactttcaaagttggtcaggtttcctgttaatagttaactaaatgaaagctcactcactgacaaaacacacatttttggtttcatttcagataaatgaattctgattttggggagcagatgccaacttagagcctcgtaccaatctctctgtctttaaaagatgaggtgacttggtgattttcctggaaaattataggtaatatataatctagcttccatattttacggatatgtctggaggtaccagagaggtgcatctctgcctttccatcctaggccagcctgaactgtcttgtggaagctgtacactgttcctgct

SEQ ID NO: 19557 - DNA, 2300 bp, Homo sapien
tccaattctcatttgcaggtaaaggttctcggaaggacccaatgagactgggctcactgggataatccaggatcatctcccatctcaaggttcttcatcgcatacttgcaaagccccttttgccatgtcaggtaacttgttcacaggtttgaagattagaatgtgggcatgtttggggggcataattaggcctagcacaatgcccatgtacccatctccttgcttaaacattaaacactttgccaatattgtttctcctatctctcactttgttctctaaaaaactccaggaatttgttattaaattttattaaagcaaatcccagaaataatataatttgcctgtaaatatgttaatatgtttctctgaggcctttaaaaatcatagccactatggtattatcgtaataaaattacctgaagttatttaatgtcacctaacattcagtccatgtttaagtttcccaatttttttttttttttttgagatggagtctcactctgtcgcccaggctggagtgcagtggcgtgatctgggctcactgcaagctctgcctcccgggttcacaccattctcctgcctcaacctcccgagtagctgggactacaggcacctgccactacacccggctaatttttttttttttttttttttttttagtagagacggggtttcaccgtgttagccaggatggtcttgatctcctgacctcctgatctgcccgcctcggcctcccaaagtgctggcattacaggcaagaaccaccgcgcctggccgccaatgtttttaaaaatgccatttatttatgtaaaagtttgtttgtcttaatcatgacccaaacaaggtccacaaattgcatttggctaatgtgtctctcaaggtccccccaccctcttttttttaaagacatggggggtctagctgtgttgcccagcctggagtgcagtggctattcacagctgtgatcatagctcactacagccttgaactctggccttaagcaatcctcccacttcagcctctgaacatttatttttgaaaaaagaaattgggtcatttggtttgtagaatttcccacattctggatttggcagattacttcctggtggtgtaatctaatgggttcatttggcccctgtatttcctttagcctgtgattagtgttataagcttaactggttctagtttccctttctttgttagtcagagagaatactttagaggtgaggctgcaaacaatccacggtgccatattagtgtgtttatggaatcaggctgtcccagtttcgattatgtcaaagttgttcacctgatcatatctgaagatattacaatattcttaataataataaccatttaccgcatacttattgtataccaggcattttgctggctgtgtcctatataattcctcaaaccacatctccgtgtattaaccacactcatagatttgtgaaaatgtaccagaattgactggttggaaggctctatgtggattattactctgagcatgtttacttcttgaaatatgaaataatggctcctgcttttaatatacaggcttattttgaggattttttgaacggatgtgagagcacttagaaaactggaacgcgccgcgctacaccattaaaattagtaacatcagtgagaaaaaagcaagtgcataataaatattatagttatcctgattgtctcctttattcatcacacacttcctaagcacatctctggagggcactttccaaggctccgggggaggagaggaaagaggcgcagccaggcctggtgggtcccggaggggcagcgcggcgcgggaggggaacggggaggcacggcctggctgccaccgcgcgcggaacccgggagcggctccggggctgtcagctgcccgcctggctcctccaaggcctggagctcggacgcgggctctgggggcttctggggcgcggaagcgggctcgcggggagcagtggccgcccccggccgccgcggtggctgtgctcagaagccggccctggcgtcaggaggccgggcgcgcggcgcggggcgcgagttcccctgcccgcctgtgcgccccgcaacgggcctttcctgggccctaacgacagctcgcccgtgcttcgccctcgcagctctcctgtgtccccaaaatgcctttcccgcgtcccccgcccttcagcggtgactgcccaggggactctgtaacgcgacactcagactgccgagcctgccaggcacttcgcggagggcgctaggggccgggacgcggccgccgagcgtaggttccggcctttac

SEQ ID NO: 19558 - DNA, 2300 bp, Homo sapien
atttattaaacacctattgggtgccaagcggtatgctgattgcttgaggctacccacactggtgcataaatgaccagtctttaataataatagcaaacacatacgttccaagcacaagtacattaacccatacaatggttacaaagaccactttacagttgaagaaacaggcaaaaccggttatttttaacttgctcaaatccacacagtaaggaagaagagaggccaatattttaatttaggaaacctggctgcttcaaagcctcatgctgttaaaaaccacactacgctgccttaagatatgtcatttgggaaagaaagttaactctttttccagttgtttagataagctgggatctatcatgaaagtttatctaaagatataactgagcttccagatggggtgacagtaccaggagcacaggcagaggtgttcagaaaggagaactgggaagaggcggaagagacattttgccacttctttgtttgcttggtgttggaagtgaccgctaatgaaaacctgtcatgaaaatcaacaagagaatgcatttcttttaaagtaacgcattcacagcacaatcttaagtgcattctgaagtcctgctgtctttttttttttttttttttttttgcgacggagtctcactctgtcgccaggctggagcgcagtggcgccatctcggctcactgcaacctcagcctcccaggttcaagggattctcctgtctcagcctcccgagtagctgggattacagacacctgccatcacgcccaactaatttttgtatttttagtagagacggggtttcaccttgttggtcaggctggtctcgatctcttgacctcgtgatccgcccgcctcggcatcccaaagtgctgggattacaggcgtgagccaccgcacccggcctctgtcttaaacatcataaaaacataagaacccaaaaaagatggaggggagtgcgcccttagctgccccaaactggcgtggtgggaggcagggcaattggtctagttttctgagccgtaggattagggctctgggtgaggccagagtccctaaagttgtacccatatctgcgtgtttgtatttcctgtttgtaattcctcctgtttgtactttttgtctcttatacggtacacttaaagtttctccacaaggtgtttcagcataaagtactcaaaaactaaaaacgtttaatttcattattaggttaagtgtgtaaaaaatgccccatcaaggttcttgtacaaactcccattattctcccagactccgaagtggcactccagaataattttacgtgggttagcatcttttataaaacgggcaggcagagcggcttatgaaattaaccttggaaaccacgcggccactctttcgggaaatgcctcctatttatgtttacatgggccagcaagagaatccaaggttggaaaggtcattcctcactacagaggctcatcgcaatcacagttccgtctccaaattcgagttttgggtgtgaagagtttataaagtccagccgctgtcctcgcagtgtttggggttagcggagggagagcttgtttgcgaccaaacttgccgcgcggggcggccgcttgcaggaacactgcggccttgtgcgctcggcggtctgagctcctgcgaggccgagaacgacgcctagcgcccagcggcctccgcgaacaaaaagcgaccggtcggaaggtgctggcccagccgcccctggcgctcgagcccgaatccggccacagaccatgaagggacgcccggcaccacgtgcgcggggatccgcggacgggacgctccccggcacctccggggctgggccggcaccgcacggtcccacccagacagtagctgccccgggcccccaaaacagccgctcctagctcctccctcccagctctgcggtggcccaagccgccctccgcgcgcttgacccagaacagtacggagttctgcacgagccgggggtggggcctgtctcagcgcgcggcggtggggcggggcttggacacgggcccggctcaacttgagggaggcggggctcgaggctcagaggagttggagcccgctctgcgcgctgcgggacggggcacggcggagcagggttgggtccgcctcgagcggggagggtgatgctgcaccacaggggcggggctggaggtaaagcgcggagcggagagggaccaggctcggcactgatttgtgttcagggctagcccagaggggcggggccaggtacggggcgcagccgggagcgggaggggcggtgcaggacggggccgggcac

SEQ ID NO: 19559 - DNA, 2300 bp, Homo sapien
ttatctaaagatataactgagcttccagatggggtgacagtaccaggagcacaggcagaggtgttcagaaaggagaactgggaagaggcggaagagacattttgccacttctttgtttgcttggtgttggaagtgaccgctaatgaaaacctgtcatgaaaatcaacaagagaatgcatttcttttaaagtaacgcattcacagcacaatcttaagtgcattctgaagtcctgctgtctttttttttttttttttttttttgcgacggagtctcactctgtcgccaggctggagcgcagtggcgccatctcggctcactgcaacctcagcctcccaggttcaagggattctcctgtctcagcctcccgagtagctgggattacagacacctgccatcacgcccaactaatttttgtatttttagtagagacggggtttcaccttgttggtcaggctggtctcgatctcttgacctcgtgatccgcccgcctcggcatcccaaagtgctgggattacaggcgtgagccaccgcacccggcctctgtcttaaacatcataaaaacataagaacccaaaaaagatggaggggagtgcgcccttagctgccccaaactggcgtggtgggaggcagggcaattggtctagttttctgagccgtaggattagggctctgggtgaggccagagtccctaaagttgtacccatatctgcgtgtttgtatttcctgtttgtaattcctcctgtttgtactttttgtctcttatacggtacacttaaagtttctccacaaggtgtttcagcataaagtactcaaaaactaaaaacgtttaatttcattattaggttaagtgtgtaaaaaatgccccatcaaggttcttgtacaaactcccattattctcccagactccgaagtggcactccagaataattttacgtgggttagcatcttttataaaacgggcaggcagagcggcttatgaaattaaccttggaaaccacgcggccactctttcgggaaatgcctcctatttatgtttacatgggccagcaagagaatccaaggttggaaaggtcattcctcactacagaggctcatcgcaatcacagttccgtctccaaattcgagttttgggtgtgaagagtttataaagtccagccgctgtcctcgcagtgtttggggttagcggagggagagcttgtttgcgaccaaacttgccgcgcggggcggccgcttgcaggaacactgcggccttgtgcgctcggcggtctgagctcctgcgaggccgagaacgacgcctagcgcccagcggcctccgcgaacaaaaagcgaccggtcggaaggtgctggcccagccgcccctggcgctcgagcccgaatccggccacagaccatgaagggacgcccggcaccacgtgcgcggggatccgcggacgggacgctccccggcacctccggggctgggccggcaccgcacggtcccacccagacagtagctgccccgggcccccaaaacagccgctcctagctcctccctcccagctctgcggtggcccaagccgccctccgcgcgcttgacccagaacagtacggagttctgcacgagccgggggtggggcctgtctcagcgcgcggcggtggggcggggcttggacacgggcccggctcaacttgagggaggcggggctcgaggctcagaggagttggagcccgctctgcgcgctgcgggacggggcacggcggagcagggttgggtccgcctcgagcggggagggtgatgctgcaccacaggggcggggctggaggtaaagcgcggagcggagagggaccaggctcggcactgatttgtgttcagggctagcccagaggggcggggccaggtacggggcgcagccgggagcgggaggggcggtgcaggacggggccgggcacggcgcgggaagaggccaggagcagcaacgggtgcggggcggggccgggagcgtcaaggggcggggaagaggggggaatgggcggggccgagctctgcgaggggcgaggtggggaatgcagagcggggccggacgcgggagcagggagctgggcggggagcggggcggggagctgggctgggctcggcacggggcggggcggagggtggggagcggaaagcaggacgcacggctcccgcggcccgctggctgcccttcccgccagcgcaggtgtgggacgggcggcggactaggcacagagctgcgggagcaggcacagggagtgtggagcctggcggcgggacggcgggatccggtgggagccggagtcc

SEQ ID NO: 19560 - DNA, 2300 bp, Homo sapien
tccactgattggctcccgtacccccgtcttccttcatctctgctgtgctgggcagcttgtctcaggtctctggacccctcagcagcctcactccctcctctaggccaatgccagacagcgcctccagcagacctgccaagtcctcgccagccagctcatagctgtgcaggaggctgtcactgggcgaggccgtctgttggtacatgtccaccaggctgcgcagccccagccgctctgccagctctgcccagctgccctgggcttctggcccatctagcagctgctccaggttctgcagggctgtgtcaccaagtgacagccctggccctgcagggctgggtggggtcaggggcagctagctccatggtgttcagagtggcatttagcagcaaggtcttcaccttggtgctgtggataaggtcgaggcgtgtggccctggaagctgctttgggtgtccttctcaggcccctctgagtcccagtcgttatcagaggtagggggtgagggcagtgggcacaggggctcctcattctcagcatagatgtcagcactagccttcagaaggagggtgagggttggggactccagtccagctgccaggtgcaggggtgtgtttcccacaaaggtgtgagcattcccattggcccgaagcttggtgaccagatgggtgaccaaccccagctcctccatctctgtggctagatgcaaggctgtttggccccctgctactctgtggcctccacttcagccccactgtccaccagcagatccaggcacttggggctttgggcttgggccgccaggtgtactgcaaagtcaggcatgtgcaacagccgaggcacagcgggagctccactccaaagcagtgcatgcagcagctcagaggcaccagggcctgcctgcagtgccaggtgcatggctgagtctccatgccaatcagcagtgctgggtctgcatccacctgaagcagaaagctcaccaccctcatctgcctggtgatcactgccaggtgcaggggtgtctggtgcaggtggttggtgaggttgacgatgccaaggtgctgggtgtggtagatgacatgggctatgtgcttgatgaccctggtcggcccatggatgatggacaggtatagtggcgtgtctctgttctcgtcctgctccagcaggtggcattgtcccgccagcagtgtgctggcgtccgtggtgacaccatagttgagtagggcctgggcgctgcgctgtgccgtgccacaccaggctgaagagcgttgtactctcgggctcactgcagcatctccagggcctgcagctggcactggggaggggtcctggagggggctagggctatggccgtgcggggccaaggctagggctagggccaggtctgcactagggccagtgtgagggccaaagcaggatcagggcagagccaaaggcagggcagggcagggcagggtagaacaggcccagggtagcacagggcaaagttagggcagaaccaaccaaggcagatctatggctctgcggcttcctcctgagtccctgccgggcactaaaagcctggctctttttttttttttttccagacggagtctcgctttgtcacccaggctggagtgcagtggcgtgatctcggttccctgcaagctccgcctcccaggttcacgccattctcctgcctcagcctcccaagtagctgggactacaggcgcccggcaccacgaccggctaattttttgtatttttagtagagacggggtttcaccgtgttagccaggatggtctcgatcttttgacctcgtgatccgcctgcctcggcctcccaaagtgctggaatcacaggcgtgagccagccagcaggcggcgctcgcgagagtgcgcagctcccgcgaagggcctcgcgggcaggctgaggtgcgcatgtgccctggtgcctaagggttctggccggggaggcggggggcggtgggaggtggggggagggcgggtgcgccaccacgtggcgcccgcgaatggagggcgcgaggctcagggctgtttctccgcggatggcctcgtgggccggctgaggtgcacatgcgcgctggtgcctaacggctctgctgggctaggtgctcctccgagcagctggagactggagtgtccctgacggaggttgcggctggacctggttacgtgctggtgctgcgctccagagaggcagaaaacgagtgggagctgaggtgtcttaaagccgttcctcagcctgggagaagatctctggcttcaggatggaggtcagggggtcgttcctggcggcct

SEQ ID NO: 19561 - DNA, 2300 bp, Homo sapien
accaataccaataggatgttattttttaaagatacctactgtgtagagaagtcagaaaataaattccttattgagaagcacaggccgtgttacatattctcataccaagaatgtctcactagtattgacttaattccccccaagtggaaataaaatgagatatatttacttcgttagggtgagatttgttctatctgctagttaattgtcatgataatatcaattttgttagaagaagacactctgttaccattagctaaaatattattataataatattcgaatagcccaactctaggctcagcacattatagtaaaagtacagcaaccattaccagaacagaccgggggctgcctctttgaagtaggacacatgctgtgccacacagccccacaacttaaaaatacatgtaggataatggtataattaagtatgatgtgttgcattaaaaatatgccacagcactctcccataagctttgacatttatcctctcaggatcatgatttgctattcttaactgaaaaacactttttttttgcaagccattaggttcattttggaatgtgtgtacttttcttttttttaattatacaacattttatttaaaaacaattcatagaatacattttcacattagagattcccatagtgggaaaatagcaatgtattacttatagtttcatattcatggacagattgtttcagaacaagtaaaacacatttgagacttgagtctcagtttagaatttgtaatattttgatatgtctacaaggggaaccttgcccttaaatggaacttctctatattcagaagcactccaagcttttcttcctaagatttagaaattcataatgtgagatatcagcatttcctaattttaaaatttccccagtatatgtaaccatcagtaggtggtatctactgaatagagagggaagttttcaaaaactgaacactctctaattttctgcgatgtttttattcatgaattaacagtatttccctttgtccatcattcccagggcaaaaacagaaatttgatcatatattaatagtaataaagctggattctctttaagagattgataaaaggcaaaagctcgtatcatgtttagttatactgtgactcttatgagaagctgggaggcaaccccattaactcaccgcaatacaaaactcagtctcacaatttcttagtcgtaattcctctcaaaccttttcctcaaatattaaatttggaaaacaatcttgtgattaagagaagaaggctgtccaccaatggacttaccctgttatttcttccttattgtgagttgaatggcatgacaaagcagaggcaaagaggcatacatcagttcttcaaagtattaagtcagaaaggtcagagcttccacagcgtggcaacagctttgcagatgcccacatcatggtagttgaaatagcaaagcccagcaaaggttaaagctgaaagtgccagaagctctgccttgggagctttctgcaaggcatccccatgaacatagtcagtaacaacttgtccaaggcccgagtaactatgaagagtgagggttgcagcaaggagtagagtccgtcacagagccaaggattcaaataagcagctggaagcaggcccaggagcaaaacactgacgaccctctcactagtccagtggagagacgcaacctgggaaccagaatggtggcttggtgacaagccaatgtactcactccacaccattcgggggtaggtcggttctgaagtaatgctgagataggagcaggtgtgaccactggggttcgcagcaacagagctcagcctccttgggcaccgcgaagggtactcagtctccagagaaccgccatctcattcctgaaaactcaaggtcatccaccaacccccactttgtattttagttatagtcggttaaaacataaactcgcttttgaaaccttaactgcatgttttatgaaacctgtattatataaaactgtttgtctggggaaagagccagaatcagagaagagtttacacagctgttgaaaaatgaaatttgtcagaatagtagaggaagacatttcagatataatgaacggggtgtatatggatgaaggtataagcagtaacagtcatattggaagttactcataataagaagcaggtttagtgtgttattataaaggtaatattaggaagtaaagaacaatatgtagtgttagtttatctgttaatactggattttcaaattttgtttttctgatggttttgttcatttatattgttgggtggattcatttgt

SEQ ID NO: 19562 - DNA, 2300 bp, Homo sapien
gctcccgtccaggattcctcatctctccagtctcccaagctcaaaaccccagggtgatctcctgctgggtcccttctgccatcgccatggcctggaaatgtttgctagtccccaccccacccccatgtccacactcagtgcccaggtctttatttttattttgttagaagtgataatgtcactatggttatgtatgagatcatgtccttgtttctccagagatgcaagctaaaggatttaatttggaagggttcaaattcaaatataaagaacaaagaaatatgtcaaaatgttaacagtggttgaatccaggggctgggtgtaagtgtgctcattgtactgttctctcttatctatctatctatctatctatctatctatctatctatctatcttatatatagatagatagatatatacacacaaacagatttttttctttctttagagagaaagtctcactctgttgcccatattggagtgcagtgacatgatcacagctcactgcaacctcaaactcctgggctcaggtgatcctccctcctcagcctcctgagtagctagcactacaggtgctcgccgtcatgcttggctaattatcgttatttttgtgtagagatagtagtctcacagtgttacccaggctggtctcaaattcctggcttcaagccatcctcctgttttggcctcccaaagtactgggattacagatgtaagccagtaccctcagccctgttctttctatgtatctctatatttgaactttttcacaataaaaaggttagaggtaagttgacctgaattgattggacccattttctcatccatcacattggggctgtgagtgggaggggcagtgaatgacctcctaaagctgtgtccgctcagtgcctctgggggaagctgccccctgtgagcctggagctgggtgttcccagcaggcggagtccttgactctggaaggcaattgcctttggcttcaacagtcctgcaagtcacaaggcttgttgaccacggtgaccctttctgagagccagcggaggaagagggcgggcatagggtcaggtcttaagagatcaggtcagtctgctcaaaccaggtgggctcaggaggagccggcgagggtcccgctgcagctcccgaaacgctgtttccaggcggcagtcagcagttgggcacgagaggatatcctagcaagcctccatcccagaaagttacacctcttactgcccgagtcccacccctcaacactgagcccacctcttcagtcctgtagtgaggggttctgggaaccccttgtaactgcccgccttcctcggaggtctcagaggccctaattgcgtcttccgatgggaacaaccatgagagcagggtgtggacggaagtcccccagccccagcggggttcactctttgcctcctcactctgcgagggtcccttactacagctaaaaggcaattcatgcagtccaaaggctcctttcccctcccgttctgcatgcccttctcactgtccccaaatgctcatgacatggccttgagagcagcgcagcgggcaggaagcccaggcgcctcggagaacctgaagggctgcaggtcccggtgtctgcggcagcttccgcatccctgcagggaaccagcggctcgctgagcctggggctgggctctgggggactccagagctggaggcaagtggcgctcacatccgtctcctcacctgccccacccgtggcctgggtttaaaatccacatacccgtctttccgcggccaaagtgatgctgccaggattggttatgaccccaactgccccgacccccagaagtgcaaaacgaacaggctggcaagtgaccaaaagagacccggggagcatctgggcttccaaggtcctcggtacggcccaaggcagcgaaggacgcgcggctccaggctgcgggagccaggacgaccgggggctcccagagcgcgaagtcgcgatcctcggcggtggagagctcgtgccaaaacgtcctcccctgcgccagtcaggccttcgcggggctggcaggcgggcgggggcggggccgccgcactttaagaggctgtgcaggcagacagacctccaggcccgctaggggatccgcgccatggaggccgcccgggactatgcaggagccctcatcaggcgagtgccccgcgtccccctgattgccgtgcgcttccaatcgccttgcgttcggtggcctcatattcccctgtgcgcctctagtaccgtaccccgctcccttcagccccctgctccccgcattctcttgcgctccgcg

SEQ ID NO: 19563 - DNA, 2300 bp, Homo sapien
agagcctggagagccccaggccgggctcacaggtcagggtttcacctgccggctcccagaagggagtggccaacagacaccagggaagtcagggttgggattcaaagagaggccaaggctgcagagagactgggagccactttaggaaagaaacgtgaattcaggctttgcacagcagaactgtccccatgtcctggggaggccttggttcattctgcggggaaatcccttgtgtcttgcggggccccgcctctgatgagagggaagggagataagctttgcagggggaaggtttcctcccggtctcctcactcttcgagcactgagtttctccagacaaagcgcactccgcgggcaccaatccctgcagacagcgcagagcgcacagcgagcaggagcccagaaaccagcaggtcggcttgtcccttgtcaaatccaagtgacaacggacttccggaagccacgctgacacctactttctggctcgatcagacccctggacttaaattccagcccaagggctagcactgaaagggtggctatttcagcaaacgaccaaagcttctaaagtagacactttcttttaaaccacttgatggctggatttcttagagagagagactaaagctggaggaagggttcttccagggatggcacaggccctccgctctcgggctccccacactagacttcgggccggcaggatgggttaaggtagcactcgttggagtcaataattaagcaatggaaacaaacagcctaaataagggtgttgaggactcaggagaaggtggctgattaatctcaggctcatagtttgaaatgggagcgcaggggctgggctgtggcctcctcatctgctccctgggcgtgtggctgtgtaaagaggtgtggggacccacaagaaggccgaggagcagcactggggtggagagagcagtggggaggcggggacccaagggttaaaaaaaaaaattcctcaatttggaaacatttgcaaaactccagaagaaaaacttttaaaagttctccactcccttccaaacgtacaaacatgcacacacacaattaggaatttcccaaagttttcatctgtctaaaaagaaagtgccagtgcaaattacagaacatcgtcgcttcctcatgtgcggcgtttctacgggcctgggaggggacgcagaggctaccccggtggtcccagcctgcagcgttcacgtgaggaaacttccgcaaaagccctgatgcatgcacattctgactgcagaggccagagcatcccgcattttggaggctgaaaggctcccctaggataaccttttccgttaacagaggagtccgctgaagcgcagagctaactgaaaacagctagaattaaaatccaagtcacccggccggcatcagcagtcattcctttccaccacacaaaactggccaggaagacggactctggcgcgccctcccaggccgaagcgcatttcttcgctaacgcgcgaggagtaggctgcatagacccggcgcaggaggtgttcattttcggatccagccctgtagtcactttagctaaacccggttccaaaggggtgggagtcgtcggagaggaatggcctctgtatctccggagacggaaacaccaggacgaagaggccctaagaacgtgtgcccggggtgcgaccggggggtggggggcagggggcagagaccctgaaaagctccaccgccgaaccccagggcagtgtcccggcttggctggactgggcgcgggcggctgcaatgctcccgggcgcggcgctgggaccccgcgggccacgtcggctccgctgccccgacgccagggcccgactcgcgtctccctctggcggggcaccacaaggggcagcgaaacggtggtgggggcgggcgccgcgctccttcccgtctcctccccgccagctccgggcccgtccttttccgcccggctcccggcaagggtcccccgactggcgcccgcgcgtcctccctcggctgctgcaggccgggccgcggcgtcgagcgggggcggcggggcggggcccgcagccattggcgagcggcggggcgggggcgggggcgcggagggtcggccccgggacgcgcgcagccggcccgcagttgccgctgtcgtccgcagagccagttcctagcgcagagccgcgcccgccatgagggagatcgtgcacatccaggcgggccagtgcgggaaccagatcggcaccaaggtgggcctggcgcggtgcagggcctctccgcgggtcggctgctggcgggccccgggtctcccggcg

SEQ ID NO: 19564 - DNA, 2300 bp, Homo sapien
tggcagtgagcgtgttagggtgacttttgacagttcatctgagtagagggtacaaaaccagacgagtggggcttccagtgaggacatagaggctggtagagcaatgtggtttgccggggataggtgcccagtaaacaatgaattgttgaatgaatgaatcaccagcccttttattctataaatttgttattgaaaaggtaaacctcagatggtaagagttgtgaatggaatgaagcaaaatataataattcactgtagagacaggtgaaaactgtgtatttatgccttttttttaggttaaggagaagtgatcagagagggcagggcagagcgggcagccacgcagccgcaggttttgctctgaggcagctgctgggccccgcaggcagtgttgtgtagtgagataggcactgagaaaatgaatgactcctaaggtgaactgtggggaaagaaggcttctttgcttttacaggtaagccagaagtgttcatcggcagacagacttaactcctgttttgtaacttcccgccctgtggcatatgcttgtcttgggttgtgtcattgggaacacagcttttgtttttgtcttccagtctccttaacatcagctgagaaattctcaggtggattaccatgaacatggcaaaactacttttgccactgtgtgatgatttgttttagtacaaatggcgcagttagtttttacagcacagaggtatggagtgaggggcagagcccacgttgatccaggccagagaagaatcacgctcagactagagtccggtcagcactgtggtggacgcaggctgcagcacgggtcttgtgggccctgtgtcgctggggtttgccctctgggtctgctctgccacttctgtggcttgctctgagccatagggccggctggttaggtgagggtgcgccagcatcagcctggctggctccacctaggtagctccgggtgttgaactggctgcctgctttctcagactctcttctgccttccagcagaacagacagcaggtagtgtcttatggcagccatcttcgcgtgcccagtatttgataattctgaatacctagactatgcaatgaggacctttccagagttttggtttctgtaattttgcgtgttttaaaatgaccttaatgctgaattttattttacatttctatttgtttcccaaaacacagggtgtgtggcttaaaagtgagagagttagggtgaaagcaggcctggggatgggggagtgagtgcatttttgctgtagttgtattttgaacctgaccttttgcttttattctgaccttgattgggaattctatttaattttttaaaaaaatttttaacttaatttaattttttttttttttgagacggattcttactctgtagcccaggctggagtgcagcggcatgatctcagttcactgcaacctccgcctcctgggttcaagtgattctcctgccccagcctccctagcagctgggagtacaggcgctcaccacgacgcctggctaattttgtatttttagtagagacggggtttcaccatgttggccaggctggtctcgaactcctcacctcaagtgattggaccacctcagcctcccaaagtgctgggattacaggcatgagccactgcgcctggccttgattaggaatttttggattgtgataggcagctcagtctccaaaccccattttaggtaaggcaatgtatagcactgtataactgtcttttaatgtcagtgtcactgtaacaatggcttgggtttttttgttgttattttgttaggcttagagaagaaaacgcaggttctgcagcctgaggagaagaagactgtggcataccacgaagcaggccatgcggttgccggctggtatctggagcacgcagacccgcttttaaaggtgaagcagggtagctgcactaggcagccagtgcatgggtgagcagatgctcgctgcagtcactcaagaagcaagctacactcctgcaaaggagaaagaaacaaggctttagccaaaacttctggtaacttctggtaaccatagttgcacaaaccgtcccatagataaatataaaatttggacagaaaattatttaaagggaccacagagtgtccaaaagcaggcgagagctggagagtttgctcctataaagcagcagttgcagtgggtttgaactgggagcctgtggctttcttgccaaagggtttttcataatctccacactacagtggtatgagacatagtctttattatcctgaggtggtagaggagatagtccaggacttaa

SEQ ID NO: 19565 - DNA, 2300 bp, Homo sapien
tttcatgtgtgaccatgagcaagttttgtcatctgtagaatggaaacaggagtcagggctcatattcagtcagtagacacgagtacaataggaaataattatgtgctgattggtagaatagccttgacctggcccctgaggtgtccctgtgctgggccctctgggtctctgcagctctagagaataaagagggagtgcctggcacagcaaggcgcatctgttccagttgcacagtggggtgcggtgctcggattttgaacatcacccccagtgatggcacctgcttcttaggatggtcctcaggattgaatgaactaatgcatctgaagggcccagaacaatgcctggtacttagtacatgcccagtaaactttagctcttatccctgtttcacagtagttttaaatttgggaatagggagctaaaatacctaggaaatagaggaagagggaaataatgcatatttattttaaaaaggattacgttttcaaataggtttttcattctgttttttgagtttataattttagagccactgagatattgctgctaaagaaatgcttatttgccaagaattgccaagtgttctcaatgagtgacatttaatcaccaccattattaaagccagtcttttattattgtttattctttaatttataaattttcagtatttctggaaaattcttaaaaagttgaaccgtttagtgaattgaaccttttagtttcactacattcttaggatatttgtttttttgtttttatagcaatacgtttggtttaatattggcagtgtggacacctttgaacggaatctggaaactttacagcaggaattgggcatagaaggagaaaatcgggtgcctgttgtctacattgctgaaagtgatgggtaatctcaaatataatattttgtagactgttgactgtgctgcctgtggttcactgtgttctgtccctgggtgcagggctatacattatattctcaaacaggcctttatcagtttggccagatttttaaaaaactattagtaactcactagtttttgcatgactcattcattttcttttttttttgaggtggggtttcgctctgtcgcccaggctgtagtgcagtcgtatgatcttgactcactgcaacctttgtccccaccccagttcacgcgattctcctgcctcagtctccagagtagctgggattataggcttccaccaccatgcccagctaatttttgtatttctagtagaggcagggattcactatgttggccaggctggtcttgaactcctgacttcaggtaatccacctgcctccgcctcccaaagtgctgggattacagttgtgagccaccacacctggctttttatctttatttttatttttatttttatttttgattcattccttttgtacacatttatacttatcttgatgaagcagtggtttagggtattaacattcaatgcattgacctttggtaggattttagcataaagaacccctttgtatcaaagagtgccattcccatctttgaactatcatttatgtttacatttcacagttttccaggatttttaggtgattcttctctcatcagaacttcttctttgggggttgtctttaataagaccatgttagtaaccccacttaaagtctgggcagatgctccatttatttcgaagagttggttgccatggagcttatttgggaattctgttgcctttgaagaacacttgcaagttaccctcctttgtattaagtgcagaaggtataccttggtgtagctatatatatttatattgatatcttgcaccacatgtgaaagctggaggtgagcagccagtcctaacccgtgttgcgctgtgtgtccccagctcttttctgctgagcatgctgcctacggtgctcatcatcgccttcttgctctacaccatcagaagagggcctgctggcattggccggacaggccgagggatgggcggactcttcagtgtcggagaaaccactgccaaggtcttaaaggatgaaattgatgtgaagttcaaagatgtggctggctgtgaggaggccaagctagagatcatggaatttgtgaatttcttgaaaaacccaaagcagtatcaagacctaggagcaaaaatcccaaaggtaaaatgaaatttaagattaactttttgaaatgtttcttgatctctgaagttataattctgtgaagtttgattacttattatagatagctgtttttctgtccttcctctttctcagcttactaggctagcctctgcccaactcgaggatcgtt

SEQ ID NO: 19566 - DNA, 2300 bp, Homo sapien
tttctttctttttttggcctgcttgctggtctcaaactcctgacctcaggtgatctgcctgccttggcctcccaaagtgttgggattacaggcatgagccaccgtgctgggccaatttgtgtcattttcttttttcctgattgctctgactattgatcttctcaaagaacacactttgatttcattcatttctctatgtcttttagtttttaattttattgatttttacttttatcttctttctgttctttggttttacttcattttctgtctagttttttcttttttgaagccgaggtctttgttttgcccaggcttgtctggaactcttgggctcaagtgatcctctcacctcagcctatttctgatactgatttctaatttaatttcattgtggatagaaaatatgttttatatgacttgactcctcttaatatttttatggcctacaatatggtttattttgataagtgctctgtgaaaacttgaaaataatgtgtattctgttgttatgagtagttttctataaatgtctatttgatttagttggttgtgtttaagtcttctatatacttactattttcctgtctaattgttctgtcaattatcaaaagaaggatttgaaatctccaaatataattggaagttgtggttctgtcagtctttgctccatgtattttaagcttctgttaatgggaacaaagatgtttagggttgttatgtcctactgatgaactgacccctttataataataataataataataataataataataataattctcttggccagatgtgggtggctcacatctgtaatcccagcactttgggaggctgagtcaggaggattgcttaaagccaggagtttgagactagcctgggcaacaaagtgagacttcaactctacacaaaataaaaaaagtcgagtgtggtcgagcgtgtgtggtcccagctacttgggaggctgaggcaggaggatcccttgagcccaggagttagaggctgcagtgagctacgattgcaccatggcattccagcctaagtgacagactgagaccctgtctctggaaaagaaacccgatcctcttcatccttagtgatattcttttccctgcaattaattttctttggaatttccttgccctaaaatctatttgtctactcagttttcttttgtgtgagcatggtatgatggtgtatctggtatatctttttgttattgttttactgccactggggtaatcacaggactcacctggttttgtctcctgtctctcaaggattactgtcctttgcctgaggtccagcgtcgccagcctgggcgacagagcgagagcccgtctcagaaaaacccccaagtcccccacctcagttcaaagacctctcctttttcctccgctgtcacggtacaggaaacaatgtgtagtttccactacctggaagactcgacttgctctccgagaaccagttccccgacagggttcctagagcgcaggctgcacggcacagccccaacattccctgctgcttgtgaatcttcgcatcgccctcccaggggtcaggaatgtgtgcttcggtgtctccagagcctagcaccaccccatgactcagctggcgctcggagggtccttccatctgccgccgctggggccttcgctacttccccctcgctcctactggctggcccacccggctgcccaggctcggaagcccaggatcccagtcacgcgtctccccttagtccccgcctccagccacgccccccacacccctccgtcggccccgcctccagctcctgctcgctctcctagtccttcctcggccccacctccagccacgccccccacgtgcgccatcagccccgcccccagctctcgctcgccctcccgagtcctccctcggcccggtccccgcctctagctcccccttgccctccagggtccttctcggccccgcctcctgccgcgcccccaacgctgctccgtcggcccccgcctccggtcccgcccccatgctcctcccatttggtcctgtcttctgcactggcggaggtcgcggcgggcctcggagaggagacgccgacgtcagcgcgccggggcggggctggcggcaggagacgccgcgttgagagcttgggctcctccgtgagccgccggcgcgcttcgctgcctggcggcctttccccgagccgagcccgcttcccgaggccgccagtcgtcgcctgcccgcgcctgcgcagcgtcccgggccgagagggccacggcggcggccatggcgcaccgctgtttgcggctgtg

SEQ ID NO: 19567 - DNA, 2300 bp, Homo sapien
aagaaagaaagaaagaaagaaaagaaaagaaaagaaaaaagaaaaaaagatgctaagggatagttatctggctagccttagctagtgatagaaggaacggatgttctaaagatactagtaaaccgtaatgtccacacatggatgcatctaatccttaccacacaccagtggggtgggcagtatgatcctcatttgacaggtaacaagacggactggatgaatgaatgttccacagctagatctgttcctactcctagaggataataaatggcaagactggactttgaaatcaggatgtggctttgaattctgggtgggataactcctagatatgtgacctggaacaagcgtgttgcctcatgttttttcaatagtgcttggcatacaagaagtgttcaacagctggcccagtgataatctagaatcagtgcagcacagtggggagggggaatcttgtaacctgggttctcacctcagcgtgtgatcatggggtagagagctttgaaacctgcttgaacttcagttaactcatttgtaaaacgggaagaatagcaccaactttggaagatcatcctgagcttaacgctgtaggaggtagaggtcaatgtgagtggacggtggagccaggactgtagcccaggtctttcgggtcatgctgtgtgctcttccacttccctgcctcactgcacaaatgcgctccccacgcccacggacgccccaggggcgccaggcgctgctctaggctgagactcagccgactcagacaagggccctgccctctcgccctatctcatcctggagaagagtaccctcttcttagaacaagcatctcacttccgtgcacttcaacttcgtttgtggcagtgcagggtactttgcaaagctaaaaagtagtttatgcgaaagggagactctttttccttagaggatttgccaagttgtaatcacaaattctttttgagatacacgtacatttttttaaagctaaataagatttccccccagttttataactcaagaatgtattttctcaaggacttgggagtcatctctttgaaatgtcatccccgtctcccagttttgtgggagggtaggagcccagctaccagagagcacctggcttcaaattgtaaacctacctcctgtcataaaggtatgaaaattcatttttcctttggataaaggcaattagcaaacgcaaatggccactgcatttaccaatggccactccatcatcaggcgaatttaggatgaactctgcgacaaatggtgtagtggagtcccctccccggagggctgtctcgtttacctcgggagcatgcgtggggtaggttgcatcctcccggctgtttgatacaggctgagatttctgtctttgcagcctatttggcggattgcttgtgatgcacatcacatgctggttttgttttgttttgttttgttttgttttgttttgtttgagacggagtctcgctctgttgcccaggctggagtgcagtggcgggatctcggctcactgcaagctccgcctcccgggttcacgccattctcctgcctcagcctcccgagcagctggtactacaggcgcccgccaccacgcccggctaattttttgtatttttagtagagacggggtttcaccgtgttagccaggatggtcttgatctcctgacctcgtgatccgcccgcctcggcctcccaaagtgctgggattacaggcgtgagccaccgcgcccggcctcacatgctggtttaatgtttgttcaagacccaaactgcagtggagttttgagggttggcaggtttgtttttcatcacacgtccccgacagtacaaaccggcgtagctggacagggccttgggagaatttggacagtgggagtaaggacgagcgtcgcctcctacgcccgcggcatctgcagcaagcgcgcatcgcgcaccccagggtagcagcgcaggtctggggctgcgccacagccgcgcccgcagagctatttttagccgctgcagccagcctagccaccagacggggtgggcggcatccaagggcgccccgcccatcgaggccccgcccacgccgcgcccggagccgcgcggcccgaagcacccggcccggatcgcagagcccgcgccctgcgccggcggcaatgaagatctggagctcggagcacgtgtttgggtgaggccgggctgagggccgcggtggggccgtccagacgccggctcctgctcccgagcccggctggagcggtccaggaaaggccggacctcacagcgggcctcgcggagatccccgcccc

SEQ ID NO: 19568 - DNA, 2300 bp, Homo sapien
tacgatatcatccaatgcaaagaaggtatgtatctcaatcctaggagtcctgtgtgtgctctagttgttaagtgccagattaagaatatgacatttttagtctcatcagtcttcctggctgggcatggtggctcatgtctgtaatcctagcactttgggaggccaacgcaggtggaccgcttgaggccaggaattcaagaccagcctggccaacatgctgaaaccccatctactaaaaatacaaaaattagctgggcatagtggcacacctctgtagtcccagctactcgagagtctgagacatgagaattgcttggacccatgaggcggaggttgcagtgagctgaaccaccactgcactccagcctgggtaacagaatgagactctgtcttaaaaaaaaaaataaaaataaaaataaaaaataaataaataaaatcctgagtgctggggctctccatttatgctgagctcataatgccacagtatttcaaaactagggtagggaaaggctgacccaggtctgagggaagtgtgtgcatgaaagccaagggagccaaagttactcttctcagtagagaaagtatggggtaaacctggagcataaacccagccaaggcaactaccacttcaaagagcccaaatgtcataagctcagttaccaaagcaaactaacccacaacatcagaaatacaaggtgttaacagtgtcaggtaggctattcaggacttatagtagtttcctatttaatgggcattaagtggctttggctgaacctctccagcagtgacgcttccatggagcctgctgccgtcttcacagctcctctctggcaggatttggcagtaagctttgtggaggtgagaggagaaaggatagatcccaggaggccatccatggtactccctttgtgtccagggcactggaacagaggaagagattgttctaggagtccaggttgccctcccctccagcagagttgatggaaagagcttgaatgtttggtaggaagatgttcctcacatttaaaagatgccacttgccagagcagggcctttgcttttcacctgggcccgcctcacaggctcatgtcttctctttgtctgtccctcctacccctcactcttccctttcctccctctttctcttccctcctttttgggggtcagaaatgagtcttcatttttgagatcagtgggtgattcctaaggctgtacttccctttccaatgtccttccatgcttaactctccaactagtggaaaaccatttatggcttgcatttagtctcatcaccaatagaatagcctgtctatctaattctgtagaatccagatttgagaaacagagatttgagcagcttagctcagttcagaggaggtagggcagcgaaggccaaagggggagagctttgtccatgctggaggaaggagaccggatctcacccatcgttgtttccaatgcttggcttagggcagaagccctaaatgtttgccaaacaaaatattataagaggaagggaatattcagtgaggccacagctaccttagaccttttatgtgaaaaatttggggtaaactcagtgagggcaaattggctttcctttatttcactttattagaggttgtgttgaaggcttaggagagaatcactaaggtggggagaggtgttgtgcctggaaacagcggagcggcctgagggcaggtgcaggggatggggttgggggtgcgtggaggtgtcaccctgggctttcctggcctcctggggcagcctcagcgctgggatttgggaggtgagggacaggacttgctgtattgagctaagccgggcgctggtttgctaacacagcagtgactcttaggcactgttttccttcccccttctgagctggaggaactgcctgcctgtgtgaagatcactcggaaaggtcactgctgtgtctccttgtaactgcagcgcttgccttctgcagtttagcctgtggacttgtcgcttgctgtctgcagcgggaggcgggacgacccactcagtgctgaaatctttctgtgttgcaggggtgggctgctatcgagtggataattgaacactctgaaagcgctgtgagctaaggaggcctgtgcctgtgcttgtcataaatggtggtgagtacagtattcactcacctgggggggtacttgcagcctcttgtgacccgtgtgcatggtgcacatggtgaggggacgccagaagtacgcagctgctggtggctctccagcccggagctccttagttttccacggtgacacagaatcactgggttcatc

SEQ ID NO: 19569 - DNA, 2300 bp, Homo sapien
ggcggaagttgcagtgagccgagatcgcgccattgcactccagcctgggcaacaaaagcgaaactccatctcaaaaaaaaaaaaaaaaaaaaaaaaaggagtgacttttctgtagaagctgcattgctcgttaggctctcctgtgcagacgtgggctcgctccctcctcggccacgctattccctagaggctccacacaatgtctgctcacgagcctgaggttcaggttagagctgcagaaatcctcatctttggctttctactctcctaaaaactcttgctgctgggaggaattgggatgtgaagctttctgctgtcaccctagggaagggggttagggatggaggcagatcagggacaacagatagacgattgctgcagtcagaaggcagccccaaagcaaagaagaatgtatacaagacgggcaagcttcaagtgagccgcatgccctcgattcacagacaacctgcctcattgcagcagctgtgaccattcccagcacgggacccacagtgtctggccctcttggtgccaaaagaaatctgaatactaagctgtgtcaaacatgcagatgcttcttcagctctcaagccctgaggacataaacttccagatgccccacatttccggagcgctgtcctgtcagttctggagcgcttgctgtcactgcttccatcaaacgggctccgaggcagccaccagtatcgggagcacagctgcagtgccctgcacggcaatggctaacatactagacaccatgtgtatgttaacaagatgagctggaatagtggtgaaaattcagtcttccaggtaactgcatctgaacttttttttccacccaggctggagtacagtggcgcaatctcggctcacagcaacctccgcctcccaggttcaagcgattctcctgccttagctttctgagtagctcggactacaggtgcgcgccaccatgcccagctaatttttgtatttttagtagagacggggtttcctcatgttggccaggttggtcttgaactcctgacctcaagtgatctacccacctcagtcttccagagtgctgggattacaggcgtgaggcactgcgcccggcctgcatctgaacatttgattcgtgtaggcagaggccttttctttttttttttttgagatgggggtctcgccatgttgcccagtctggtcttcaactcttggatttaagcagtcctctcacctcggcctcccaaagtgttgggattacaggcatgagccactgtgcccggcctagagctttatattaaggtcttagctcttaaaacttttttgggtgggcaaagggagaggtttcgcatgcctttggctaataggagggaagcaccacgccttttattagcattataatcaatgtgtgtgtgcatgtgcctggtgcgagcacttgcacattctgcagcgatatcaggagtctttatttatttgagactgggtttctctcttgttgctcaggctggagtgcagtggcataatctcagctcactgcaacttccgcctcccgggttcaagcgattctcctgcctcagtctcctgagtaactgggattactggcacccacccccacgccaggctaattttttgtatttttagtagagacagggtttcaccatgttgggcaggctggtctcgaactcctgatccactcgccttggcctccaaaatgttgggattacaagcatgagccaccatgcctggccaaggagtctttaaataactcgtgtgtgcaatcaagccctttcctaaagatagttttctttatgaaattgtagactgtgatttacaactgtacatcttttcctcaactggagctggtaagaaaaaagttaaatatgtgttacccaaagcttttcctacttatggtatccaaattctttgtatatctgcaatacaggaagcacgagtcaaagattatgacttggacttagtcactggacatgtggattatgagttggacacatacacacaagtatcttgacatacacatatcacagaggaacttcagaggaaggggctcctaagaaatgtctggcaactgagggaacaggttatgtaaatggattaatataaaactcaactttatataatgtgtaagatatttagaaggtaaaccatgcattcttagttaagataaaaacacaagaactttcctctgctcgtatttcaggaatacgtctgctgagggacacgttctacaaaacaatgaagtttgctgcatcaactgcattttcctttcatgaaaaatttctctgtaccatgcagtggtgttt

SEQ ID NO: 19570 - DNA, 2300 bp, Homo sapien
cctgtaatcccagcactttgggaggccgaagtgggcagatcacttgagcccaggagttcaagaccagcctgggcaacatggtgaaaccccatctctgcaaaaaatacaaaaaaattagctgggcatggtggcatgcacctgtagtcccagctacttgggaggctgaggtgggaggatcacttgagcccaggaagtcaaggctgcagtgacccatgatcgcatcactgccctccagcctgggtgacagaatgagaccctgttgtggaaaaaaaaaaaaaggaccactgtagatttgctttttatctattggtatataatgtacaacacaacactaagtaatgtctttttcataggtgtagaagacaactgacacaaaattggtttagaataaaatttttttcaagatttcaagccctgcttgaaatatttcaatatagccctgcttaacggaatagagttacttgagtcaaaatacctgagcaaacgtgaggaactttcatttattggaaatttcagtagatcacttggtccccacatgttttctgccatctttagtcttagtgtaattggaaatgatgtggtccccagagggagccagctctgccccagtggtcattgggaaacctgttctcttctctgaagctactaatcaggggtctgatctgaagggaaattttgcacttccagaacagggggtaggaatctcttattcacgtgacattttgaatttcaggaggaattctgctacccagtggaatgcctcgctcttactgtggaagaagtgatgcatattcgccaggtcctggtgaaggcagagctggaaaaataccaacagtataaagacatctacaccgccttgaaaaaaggaaaggtagtgctgtttaaagttgattgatcagaagagtagaaggatggccagtcccatgcatagtctcctgggagagttatctgctagccaggtggcacagactttgaggggatttgggatgtgtgatgttcatatcctagtagacagtacatgtgctgtctcgttcacaagagggggcatttttgtttctgccttagaaatcaaaactggaaggttttcaagcaaccataacaaatatcgatatgtcttcctaaaaccatgcatgtggccaggcatggtggctcatgcttgtaatcccagcacttcgggaagctgaggcgggcagatcacgaggttgggatatcaagaccatcctggccaacatggtgaaaccctgtctctactaaaaatgcaaaaattagctgggcatggtggtgcgtgcctgtaatcccagctactcgggaggctgaggtgggagaatcgcttgaacccaggaggtggaggttgcagtgagctgagattgcgccactgcactccagcctggtgacatagtgagactccgtctcaataaaaaagccatgtgtgcatttagtcattacacttttaaaggatctgtaaagaaaatgtatctgagaaggccgggtgcagtggctcacgcctgtaatcccagcactttgggcggcctaggcaggcggatcacaaggtcaggagatcgagaccatcctggctaacacagtgaaaccccatctctactaaagataccaaaaaattagccaggcctggtagcaggtgcctgtagtcccagctactcaggaggctgaggcaggagaatggcgtgaacccaggaggcggagcttgcagtgagccaagatcatgccattgcactccagcctaggcgaaacagtgagactccatctcataaaaaaaaaaaaaaaatgtatctgagaaacagaggagggtttttcagaaccttctgcagattccttccatgatgaggagacacttaagagctgtggccttttattaccttttaaaatagaattataattaaatacagagctacattatcagcatcacagagccagctgttataaacaggatttctgaattgtcttcctcctcttgtctgttcagcttcccctatatatagatgtaaagcatattcaaacatggatattaggaaatttgctgttggcaatgttttttttcctcttaaatttgtattttttagctctgcttttgttgccgaaccaggaggttttccttcttcacttggtcttatacctgtcagttctgtaagaggtaaggtattttgtaattgatgaaaagataaatttaacagtcgtaagagaaataccaattatcttccttatttcaccatctttctaaacaggaataaaattagaaatgactcactctgttacgttaccttgtgctatccttgtaggttagg

SEQ ID NO: 19571 - DNA, 2300 bp, Homo sapien
tgtcctgggacactgccaggagggataactaaagtagtcaattgccttggaacttagaagatccattgtttaaattcatttttataatagaaaatagtgcgtggtggctcattcctgtaatcctagcactttgagaggccgaggcaggcccattgcttaagtccaggagtttgagtccagcttggacaacatggtgaaaccccgtttctaaaaaattccaaaaaaaattagccaggcctggtggtgtgtacctgttttcccagctactagggaggctaaggtgggaggatcatctcagcccaaggaggttgaagctgcagtgagccgtaattgtaccactgcactccagcccgggtgacagagtgagaccttgtctcaaaagaagaagaaaaaaaaaaaaaagaaagaaaagaatggctacagtgccaggtcagactgtaaatccagtgaaaatattacatgttttcagtaaaaaatattttaaaacagtattgtttaaaaacttagaagttaagaatttttaagcatgatattcattttgaatgctagtgttgagaaaatattatttcattggtaaagtagatttcagattttgtagagaatttttgaatttttgtagagaattttgagtgaggcttttaagagctagtcaatgactctcttgtatttaactcatgttagaaacttctgactttcttttttatttgtgatgcacttttttaaaaatgcggtattaccagctataaatgaaatactgaaaatgaaagattttatttattttgggagtaactgataaacattggaaaagaatgggctaaaggaaggagagagcagtgagatcattattgagtccctgtaataagtcagatattgtaccaggtacttccatgcatagtgaatgcatagtctcaacagaatcttattaaatggaggtatcattgacatccccatttaacggatgagaaaagtcatcactaaaatgatttgtcctgaggcagctggctagtggtaaaagtcaggatttaattttaattctttggcttcattgcctgtttgttgttgttgttgttgtttgtttgtttgtttttatgagatagagttttgctgaagtgcagtggcgcaatgtcagctccgcttccccagttcaagcgattctcctgcctcagccttccaagaaactgggattaccggcacacgccaccacgcccagctcatttttgtaattttagtagagacagggtttcgccatgttggccaggctgatctcgaactcctgacctcaagtgatctgctcgcctcagcctcccaaagtgctgggattacaggcatgagccaccacgctggctgccagtgttctttagagagagagagagagacacagagagagagagaacaataaaattaaaaggttttatatgtgcttttttaaatatatagcagaaaggcactattgagaaataaagtgggatttcctgtattggccaaagtctggagcagttgtcgaggtggtatgcaacagtggtgtatctactgttcataaatgaggttcatttgcccggcagtaatattgatggaggtgtgtggtagggagggttatctgtgagctgccttgaaaattcagggtttgcaaaaggtctctcatttgtttgcatcgtctgagagagatgtgttttcagtgattgaatggaactagagaagtgtgtatacatggatatgaatagatttttgttgttgtttaggcttgagttaattgctacccgtaagtgagttttcagtctttcagatacttgggatgtctgtgcatctctaattagataaacattggcataagagttctgagaggatatattctttgataactatatctgttctcagaaatacctttgggaaatgtggaaaatcaactcggttaatattttatatatgaatggcaaatacaaattttaacacaaagtataaatctaagagaatataaaaagggtttgtgtatgtgttgtatgttggtttgagggaaaaaatcatactaaacatcttatgcctcacaattagtcctagaaagctcttcattcatctccattaaccacttttttaaatgttcctaggtcattgaatctttgggaattattatttataaagcactggactatggtttgaaggagaatgaagaaagggaattaagccctcccctagagcagcttatcgatcacatggccaacacggtggaagctgacggtagcaatgatgagggctatgaggctgcagaagaaggcctgggagatgaagatgaaaagagaaaaatc

SEQ ID NO: 19572 - DNA, 2300 bp, Homo sapien
gcaaggccttgttctgtcacctgttctggagtgctgtggcactatcacagctcactgcagactggacctcctgggctcaagtgatcctccttcctcagcttcctgagtagctgggactacaggcttgtgccaacatgcgtggctaattttttatttttgatagaaactgggtctcgctatgttacctaggctggtttcaaactcctgagctcaaacaatcctcccacctcagcctcccaaagtgctgggattacaggcgcaagacaccacacccagccaaattactcatgtataaaatgaatggattgagcaagatcatttccaagatccctttaagctctgatgtcatgtgattgggatttttggattcctagattagcttttgagcaggaatttggatggcagacctgtgtagttggtcaaatactttgtacttacagccttttcatattaccgtgagttactcaccaattcaaattgaatgaccaagagctgttgaattctcacaaaaatttttagtacttttacagcattttcagttttataatgcaggtcattgaaaaaaatcttattttatagactcttatgcccttttggcactcctctatcattgtttttaagcacttcattgttttctggtacaaaaagatgttcctgacttaccttgtaatttccctgtcccagccctgaaatcagccaatttcccaaggaatcctgattctgttgaaggggaatgggcttggcgtgccccatgggcttctcccacttttgatgagcagagctaggaaatgttttgaagttgtgtaatatctctagttacagtttgccaccacagggctccttttcttctcacgttaggtttgtgtattccttctcccatagtgtaagtcatgactcccagcaatatcagtgtatttactcatgtgctcattgctgcaatacattaaaatagtttcagaattttatactaccaacaagaaacgtactacaaaaacttatagatttctttgtaattctctttatcttcagaatatatcctactgaagatgtaaactcacatactcttttttttttttttttttgagacagagtctcactctgtcacccaggctggagtgcaccggcgcaatctcggctcactgcaagctctgcctcccgggttcacgccattctcctgcctcagcctcccgagtagctgggactacaggcacttgccaccacacccggctaatgttttgtatttttaatagagatgaggtttcaccatgttagccaggatagtctcaatctcctgacctcatgatctgtctgcctcggtctcccaaagtgctgggattacaggcgtgagccactgcacttggccaactcatatactcttaaagaggctactctctgttacagtttgcctgagtgctcctctcttcctccctctctctcttccccccatgcagagtaggctctcagtaactgtttgccgaaaggcagtctgtacccttccttgagctgtttctgtccagtagtactttgccgagtaaaattaattaccaattttatgggagttaagtattcttaactaccaaaagcattaatggtctgaacaaacaatcatatgtataaataaataaaatgtatgttataaatcactgttgaatgtagagttttatgtaacaataaataaatatataagtaaaataacagtcttatacttatcaaaccctattatataaacccttagctagtaagctcattttatatatatgttcatgtagtctttattgctcatatataatttttaatttaattcatagaacctaaggccccttattttctggtctcagtttcagccagtgtttctcattaggatcattaagagatgaggagttgtggttgtcttcttttattttttcatttttgtttttttttcaaccaactcatttcaaataagaaattgtggtttcaattttattttttattttaagaattgggagcatacaaaagctattatttgtgatttttcttttgtgatgtcataatacagtctgaggcatagaaattctagttaagtactaaaaaaataacaaggctgttagaataaccactgtgggctaggtgtgagggtaaatcctggggagaggaagaagtgggaggatagtattgggtgaagggaaaggtatagagctaaatgcatatttgaatttaggtcagtgaaatctaagtgtagtctggggaaattaaattttctagtactgactgggcatggtggctcacgcctgtaatcccagcactttgggaggccgagg

SEQ ID NO: 19573 - DNA, 2300 bp, Homo sapien
ttcaccatgttggccaggctggtctcgaactcctgacctcaggtgatccacctgcctcggcatcccaaagtgctgggattacaggcttgagccaccgcacctggcagacattgctgtattttataaatgtatcttttgtaccatttaatacactataaattataattgcaagtatttcccactaagattaagtccaagtttaaaagcaataagcccatcaaagaaacaaaaatactatttgaaatagtttcaaaagaacaattaaaaagatggctttaaataaaaaatcgtttacctgacgctaaaaaataaaagataaaagcatgtaaataaaaatgtgtttacctgacactaaaaaataaaagataaaaacgttctggtggaactgaaagaataactataaccttgaatattgttttaatcaagttagacaagggttttcattaaatgtcattttactaattcgaaattacatctttcaccttaagcattttgacatttccatcaactttctaaaagtgagggtagattgtttttctatgtttttaatagacttgcctctcaaaagaatgaattagataaaaactgatgggagaaaccttttctcaacctcctcctcctcttcaatgagcatctgagtaaaccctggctataaattactgtttaggtcataatcctgaaaattttacattagacaatgacgtaactaaggcccattttctctttgtatcccgacatcctgtcaacttttcactttacaagcctgtttttcatcacaacaaattttcacatacaggaatgcaatcagtattttctaacgtccaggagccaaaaatcactatttagtctatttttccatttctccccaaagagcagaattctcacggttcagaatcatctttacatttccgaaccgaggaaaggctgtctaatgtggaatactgctagtttcccgtgaggagtgcggtgtttccgacagcggcactgaggatccgtgcggagcccccgcgtgaagcctgcgatgccctccccaccccgtgaacccggccgtgtgtcagcagccacggcgtgaggcgcacaggccgctggcccggagcagggcccagcccaccgctcccaaacgcgccgcgggcagctgtcccgcgggcagcacaatgacgagcgccccgcggcccgcaggcccaggcccacccaaacgtcctccgcacagcggatttgcgccgtcgcccgccacgaggctctgacctccgaggggccccggccagccacggcctgacgccgtcctcccctgcgggtccccgccggatcctcccgggggtctcccgtggcaaaatggggggggacggcgggggcggaagggccggggacgctgagggtaaggcggcccagccgcgggtgttccaagaactacgagggaaaggggcccggcggcctcacccgcaactgggggcggctctcccgcgtcgtcggccgcgggcgccagggtgacggcgccgtccctccagacgcggatctgcgcggccgagcgcacacggtggcggggctggcggcggcgggcggcggcgcgcagggaaccgcagcactggtagcacacggcccacgcctgctcctcgttgatgggctggttgtacagccgcaggatctcctccaggctcagcgcgtcccgggagcccccggccgcgccgccggctgccccgggctcccgcggcccctcgccgcccactgcctcagtccgcggctccccgccgcccgccgggccagccgcctgagccatcccgcgggtgggcgctgcgctcggcagtcgcgccgtgtgccggcgtctcctcagctccggagcatcgtcgtcgcgcgccgccgcctcaccatccccggaaccgccgccgcccaacgcggccgcgcgcgccgccgccgggaccaggcgagtgcccgggaggcgtgggcaagaggagggcggcgaggacacggctgcagtcccggtcagacagccgccggccggtagcgacgcgatggcgtccggcgccccgccccgccccgccccgcctcgcgccgtccagcgccgcccagcgcccgccccttagggggccgcacgggccgggggatgcacgctctggaggtgaggaccaggcaggagggcctcgcctcgaggcgagatggccgcacggtctctagcccgcagggctctcagagtcgcaggcggtgacgcccggtcggggggcccggtcgcaagggacacacagctgggggcgcaatggtgagggcggcgacgcacggtccggaggggatgcgcggccgggtagggc

SEQ ID NO: 19574 - DNA, 2300 bp, Homo sapien
cagcagtatcccataaggccaggaggtggtagtgttgtccataaaagtagaccttcattttttttcctggattgttcaaaatattttaaaccagtctgtatttgcaaaatccacacaggataaacttttgaaatagcaaaatttgggaatgtttgtctgtttttaatcaagaggacagagatatatttatatgtatatagtgtcacacataaggaattacatgtttgcctctctgggctttggcacacatagatactgcattgctacaaatgagattatgaacctataattaagtgatgctactttaaggggttgttttgtctctctcgtactgaaattataataagttgcctggggagctttcttctcctctttcaatttattatttatttttttgagacagactctcgctctgtcccccaggctggagtgcagtggtgtgatcttggctcattgcaacttccacctcccaggttcaagcgattctcctgcctcagcctcccgggtagctgggattacaagcgtgcgtcaccacactcggctaattttctttgtatttttagtagagacagggtttccccatgttggccaggctggtctcgaactcctgacctcagtgatctgcccgcctcagcctcccaaagtgctgggattacaggcctaagccactgcgcacggccctctttcaatttcttaattttccttttcgtcctgttgcttttctccctcctccccattcccagctgtatgtaagatggtatctcattttaatagactgttgttatttaaatagactgttgtagtttctaccgcaagatgcaattgttgagagcgtgatttctaacattttacataaaactgccgtaaaaggtttactggaacttaatatacattgcctatttggttgatgctttcaacactctgtagggctttcacacaggactagcctcagtggaattttatcgattaaattaatctaccaatgggtgattaagaattatctgttttattgcatatttaataggttgggggggcggaattctttctttctacggctaattgccctcagttcaattttaccactgtgatattcattccacatgctctgatgagtgtggtacttgagacattaccttagtgagggaagggaccaatgttacaaatgaatccggaaggacgctaaaactaacacctgcaaattatgtacatgtttatattccaggcgctggtttagcttttgggagaagtcagtgaggaaaacccgtaaagatccccgtctttacggtgcttaccctgaagatgggagtggagagggaggtattcaaccagcaagaaatcggaaaacgcgcagagcggccgcggggtcacgggaaactgccggaggctttcagggcccagggcccggcggggaggcttcagcgggcctgcattttcttaggcatccgctccaggcgggttcaagttttcaaccagaccttcggcgatccagcgcctagggaacgtcaatgcgggtgacttctcccgctgtgcagggcggtgacccgggttggcgcgcccagttccccgccagagtcggccggggacttccctgataaatgcgacaccctcttgcccctgcgccccccgaccgcgcgcccggccccgcgtgtcccccacgccccacaaccctgcacgccctacccggccgcgcatcccctccggaccgtgcgtcgccgccctcaccattgcgcccccagctgtgtgtcccttgcgaccgggccccccgaccgggcgtcaccgcctgcgactctgagagccctgcgggctagagaccgtgcggccatctcgcctcgaggcgaggccctcctgcctggtcctcacctccagagcgtgcatcccccggcccgtgcggccccctaaggggcgggcgctgggcggcgctggacggcgcgaggcggggcggggcggggcggggcgccggacgccatcgcgtcgctaccggccggcggctgtctgaccgggactgcagccgtgtcctcgccgccctcctcttgcccacgcctcccgggcactcgcctggtcccggcggcggcgcgcgcggccgcgttgggcggcggcggttccggggatggtgaggcggcggcgcgcgacgacgatgctccggagctgaggagacgccggcacacggcgcgactgccgagcgcagcgcccacccgcgggatggctcaggcggctggcccggcgggcggcggggagccgcggactgaggcagtgggcggcgaggggccgcgggagcccggggcagccggcggcgcggccgg

SEQ ID NO: 19575 - DNA, 2300 bp, Homo sapien
aaaaaaggtgctgtattaaaatacttattccctattgtattatgaagtccatccaattttcacattatattacccaggtattgaggtcacagtttccattattgcctcactttcaaatgaaggcctacttactaattgtgcactgagagactatcatcccattattgacctatttgtattaaaagatttgaggactcttatgcagtcaattattttcttaaagaaatttgtaatttgttaatcatagagaatataatcccaaaagagtgcttattttaaaaatacgcttaatctaaaaaagttacagatcataatgaaaaagaactttgttatggtgaactaattggactaaagtatgtatattcaaatttacagacctagaaaataagagaaaattctgtcactgtagagacaggaataagatatctaacacaaatttcattgatacacaaaactattcagtatattcaagggcagagctagcctatacttgaaacaaggacactagtaaacagaatgaccttgaagtggttttactaaaacgaaaggccccacatcggaaccttataagtagtgttacgcattagtatatacatatatactctcatttatttccctaaaagattactcacagtaacaaaattaagttctttcatcacatcgtcaatgattcctcgacgtctaagggctttgatcaaatcttctgttgataaatgctgttgatcaggtgccaattcttcccgtatagtctcagcaaggatttctcttattctaccatggacatccatctatgtagaaaactcatattacaatttataacatcacaaagcagtcaaatactgcttctgaagttttaaggttctccagctaacagtaaatgcacaattgttaccacaattgaatgggaacaaaggtaagcttttaaagaatgaatcttttgagtacaaattctagaaatagtctccactggttatctggcacctttgttaccatttctccacaaacaacactcaaccaaaaggaatcttctgagagggagtatagtataatcagaagaacacggactgggagtaggcagatcaaagtatgatcttattactttcatactttgatctgcctaatgataagggaatcttaccagctttcaacttagtagatgtgtaacctcaagccaacttatttaccctttataaatctgtttcgtcaccgataagaatggaaaaacctagtgtagtgccctctcacgatagtgttgtgaggattaaagatactagacagcacaaagcctggcacacaagggcaccataaatggtcgcttttatcacttcagcatcttgcactcagtcgagcgagcgctgcagaaactggaggttcttctggagctccgaaatattaacaaattccgtcattacaaaccctttagtaacttctcttccatgacttatttgagaattgctgattgaagctcctggttcaacttcgctgatacccacatgtttcagcggtaaagaaaccctgatatctgccgggcgcggaggctcacgcctgtaatcccagcactttaggaggccgaggcggccggatcacgaagtcaggagttcgggaccagccacaccaacatggtgaaaccgtctctactaaaaatacaaaaattagccgagcgtggtggcgcgcgcctgtaatcccagctactcgggaggctgaggcggagaatcgcttaaacctgggaggcggaggttgcagtgagccgagatcgtgccactgcactccagcctgggcaacagagagactccgtctcaagaaagaaaaaaaacctgatatcttacagcagaatataaacctccaaatacaacttacactcgatccgacttccagaagtcgctcgctaagcgcttcattctcacggccgtcctaaaacgccaagaccgctcgttctatcgccccagactcttgctagcacctgctcggctcgttttctttctcggagacgaggacgctctcctgcctcaaactcaaagctctgcctactctgcgttgcgcaccccacaatcctcgctacagtcccggcaagcagatgccgctgtcggcccggggccgccgggcaggagggaaaggttatgggtcggcccggcggtctctcccagcacccgcgactctcaccttgctcagctgctggtggatgagctgcttcagctcggaggctttctccggaggcagcgacatgctggcagccggcgtctccccgccgcttctccccgcctcagatgccctaactgcgcggccccggccgggccagggag

SEQ ID NO: 19576 - DNA, 2300 bp, Homo sapien
acagtaacaaaattaagttctttcatcacatcgtcaatgattcctcgacgtctaagggctttgatcaaatcttctgttgataaatgctgttgatcaggtgccaattcttcccgtatagtctcagcaaggatttctcttattctaccatggacatccatctatgtagaaaactcatattacaatttataacatcacaaagcagtcaaatactgcttctgaagttttaaggttctccagctaacagtaaatgcacaattgttaccacaattgaatgggaacaaaggtaagcttttaaagaatgaatcttttgagtacaaattctagaaatagtctccactggttatctggcacctttgttaccatttctccacaaacaacactcaaccaaaaggaatcttctgagagggagtatagtataatcagaagaacacggactgggagtaggcagatcaaagtatgatcttattactttcatactttgatctgcctaatgataagggaatcttaccagctttcaacttagtagatgtgtaacctcaagccaacttatttaccctttataaatctgtttcgtcaccgataagaatggaaaaacctagtgtagtgccctctcacgatagtgttgtgaggattaaagatactagacagcacaaagcctggcacacaagggcaccataaatggtcgcttttatcacttcagcatcttgcactcagtcgagcgagcgctgcagaaactggaggttcttctggagctccgaaatattaacaaattccgtcattacaaaccctttagtaacttctcttccatgacttatttgagaattgctgattgaagctcctggttcaacttcgctgatacccacatgtttcagcggtaaagaaaccctgatatctgccgggcgcggaggctcacgcctgtaatcccagcactttaggaggccgaggcggccggatcacgaagtcaggagttcgggaccagccacaccaacatggtgaaaccgtctctactaaaaatacaaaaattagccgagcgtggtggcgcgcgcctgtaatcccagctactcgggaggctgaggcggagaatcgcttaaacctgggaggcggaggttgcagtgagccgagatcgtgccactgcactccagcctgggcaacagagagactccgtctcaagaaagaaaaaaaacctgatatcttacagcagaatataaacctccaaatacaacttacactcgatccgacttccagaagtcgctcgctaagcgcttcattctcacggccgtcctaaaacgccaagaccgctcgttctatcgccccagactcttgctagcacctgctcggctcgttttctttctcggagacgaggacgctctcctgcctcaaactcaaagctctgcctactctgcgttgcgcaccccacaatcctcgctacagtcccggcaagcagatgccgctgtcggcccggggccgccgggcaggagggaaaggttatgggtcggcccggcggtctctcccagcacccgcgactctcaccttgctcagctgctggtggatgagctgcttcagctcggaggctttctccggaggcagcgacatgctggcagccggcgtctccccgccgcttctccccgcctcagatgccctaactgcgcggccccggccgggccagggagcgttaggagcgactggagcacaaagcgccgcagccgttcgcctagcgcagctcccgggggacgcaacgccgcgtcaggccgggggctgacctggaaatgaggccccggcggcggcggcgccaactgttttcaaacagtggcggacaaacagggcttggggctggcccgcacgctgcctgatcgtttccgcccgccgctccacctccccgcgggccccgcaccccgagacctcagcgcaccccatcgccttgcttgccagggtctccgaaagcgctgctggcccctcttcgcggccacccggcggcctctttccgccctctgaaccggcagttagctggacgggcctcaagggcccggcgcccagggactcaaaggaccctcccgcgccccgcgaggctccggggtctcgggcttccgccttcttgctgccctcgttcttgccagggccgcggttagtccctgctggccaccccactgcgaccatgttcgttccctgcggggagtcggcccccgaccttgccggcttcaccctcctaatggtgagtctccatttgcgctcggggctgccgcctcccgaggcccctgcggtgtcgccaccccgacgcggggtgtttggcggtgccttgggag

SEQ ID NO: 19577 - DNA, 2300 bp, Homo sapien
tcttctgtaccatccttcttttcctcacaatattgtattattcccatcagcacgtaaacatgctctaatatctttcattctaaaaggctctcccttgaccccacatagccctctaactgcaacctcatttcttgtttctctatgtagcaaaaattctccaagtcgtccacgaaaacataagcagaaactttatctcttattaaaaaaaagttttttgagacagggtctcactctgtcgcccaggctggagtgcagtggcacgatttcagctcactgcagcctctgcttcctgggctcaagtgatcctcccacctcagcttcccgagtagctgagatacaggtgcaggaaaccacacctggctaatttttatttatttttttgtagagatgaggtatcactatgtcgcccaggctggtcttgaactcctgagctcaagcgatcctcctgtactcggccttctaaagtgctgggattacaggcatgagccatcatgcctgtctctgaattaatgactgaatatatattatacaacccaaatctttaacttgttttctatcattcattcaacccactccaatatggctttcctcttcaccacttcactggtaactgtttgtccaggtgaccatcattaacatgtcgctaaatccaaacatacactttcttcaccttacacatctctgggctacttttgacatggccactccctcctttttgaaacactcttctctggggctgtgtgttttatatgtaatgaataaggatgacacttccagctctctccagccttataccactccaaacagtgcattttccaatggtgccttctgggttcacagggcctacagcctattctctctcaatgtgtcattccaaattcttggcagtcttcaagtccccctgcttactgactctgttttagacatccatctttctgaaacgcctactttcccctactcccagcccacgggccctccatcttttgcatactactttctctataaagcctttcttaacaagccatctgtccctcccctcccaattatctcaggacctttctataccctttcaagcttctagcctagcatttattgctcttagattacatgtttccaactacagtgtaaattctttgagggcacgcacctagtcttattctaatactcgcacataacagactttattaaaacaatgaatgaatataaagagcgataaaactgcgctaactaccggcaagagttaatgtttattgccctatcagtagttctccggttaacaacgataatatgctagcttaagactaattctaaaactagtcgtagaaagactttctaggataaaactgaaggatgccctgcaaaacataagtacagtgtatctagaacgtacgaacacatcacgttttacaggaaacagagactacaaattgtagacttgactacgtttggttttacagccgacaaaggttctgtttggacggctgcctccggctacaacctccctgttttttccggccgaaaacatgaaatagaaactagtgccctatttctcccaaggcaccgccaaacaccccgcgtcggggtggcgacaccgcaggggcctcgggaggcggcagccccgagcgcaaatggagactcaccattaggagggtgaagccggcaaggtcgggggccgactccccgcagggaacgaacatggtcgcagtggggtggccagcagggactaaccgcggccctggcaagaacgagggcagcaagaaggcggaagcccgagaccccggagcctcgcggggcgcgggagggtcctttgagtccctgggcgccgggcccttgaggcccgtccagctaactgccggttcagagggcggaaagaggccgccgggtggccgcgaagaggggccagcagcgctttcggagaccctggcaagcaaggcgatggggtgcgctgaggtctcggggtgcggggcccgcggggaggtggagcggcgggcggaaacgatcaggcagcgtgcgggccagccccaagccctgtttgtccgccactgtttgaaaacagttggcgccgccgccgccggggcctcatttccaggtcagcccccggcctgacgcggcgttgcgtcccccgggagctgcgctaggcgaacggctgcggcgctttgtgctccagtcgctcctaacgctccctggcccggccggggccgcgcagttagggcatctgaggcggggagaagcggcggggagacgccggctgccagcatgtcgctgcctccggagaaagcctccgagctgaagcagctcat

SEQ ID NO: 19578 - DNA, 2300 bp, Homo sapien
tgaaaaactgctttcctgggtgaaaagcagtggctgtgccagagtcattgttctttcaagcagtcattcatatcagcgtaatgatctgcagcttcgtaggtatgtttctgcctctggaaagttatttttggtatggtttatactatgataatttctctattaaaaagttaaactttaaaagccacgtagatccttacctcttcttactggagtttagaaagaggggggtaagagaaggtcaggagatgggagggagtacagttaggcagatcttttcagttcctgtgagcttagtagagttggggcatggggaagacatcgtgtagagagagagagtttgggaaccatgtttttagtgtttcccgtcacatacatggcaacatcacagagctcagctaattgaagagaataagcagaaaaggtactcaagatttataaagttgctaacttttgaaaggttaatattttcagttatttccatatgttaccttgaaagattaatattttcagttatttccatatatgctaccattttttaaaaaacatttactttttgtagagacagggtctagctatgttgcccaggctggtctcgaattcccaggctcaagcagtctgcctgcctcagcctcccaaagtattgggattgcatgtgtgagccccccgcacctggccacatgcaaccattcgtatttgcagaaatccacttgcctaaagggtagctccctggcatgtcagagtgagttcttaaatgtaagacagagtatcccagaaatagaactataagctatcattaccacataaagttgataacatatcatatagaatactcttatactctaagatgtagcttttatttatttatttttgagacggagtcttgccctgtcacccaggctggagtgcagtggcatggtctcagctcactgcaacctccacctcctggattcaagcgattctcctgcctcagcctcctgagtagctgggattacaggtacctgccgccacgccagactaatttttgtaattttagtggaggctgggcttcactgtgttggccaggctggtctcaaatttctgacctcaggtaattcgcctgctgggtctcccaaaatgctgggattacaggcatgagtcactgtgcccgtccccaggatgtagctttttttttttttcctctttttttttttgagacggagtctttctcagttgcccagttctcagttgcccaggctggagtgcagtggcgcaatctcgagtcactgcaacctctgcctcctgggttcaagcggttctcctgcctcagcctcccgagtacttgggactacaggcgcatgccaccacacccggctaattttttgtgtttttagtagagacaggatattggccaggctggtctcgaactcctgacctcaggtgatttgcctgcctgggcctcccaaagtgctgggattacaggcatgagccaccacgcccggccccaagatgtagcatttagatcatttattttttattttttattcttttggggatggagtctcactctgtcacccaggctggagtgcagtggcacagtcttggctcactgtaactgttttagatgatgtagatcataacttttatcacttagacacctataaaaccaggatgaaaaaataccaacaagccaagagttacctttcaaaatgagctaatttccaggactttcacaaaagacattacaggcttcatggcagaagggaggaaagctgtgggaaatttttgcaatgggcttgcctaagtgtttctgtctttttatattgtctcctaagtaagtaagtaagtagcaaatcagagcaatattttttacttaagtctgctgaaacttgtgttttgcctgtgcagcagaatatatggagaccaagagaattttagctaaagaaccgatgtttgctttagagtttttaaaaagttaactatatgattatttctagtactcccttccggtacctacttacaccttccatgcaaaaaagtgttcaaaataaaataaagagccttaactgggaagaaatggaaaaaagccggtgcattcctgaaatagatgattccgagttttgtatccgcattccgggaggaggtatcacaaaaacactctatgatgaaaggtgagtttgtttgcctgttcatttgtttcccactttacttaaaaatgaaattaatgcagtgagctgagatcgtgccactgcactctagcctgggtgacagagcaagactctgtctcaaacaaaaaacaacaacaaaaaaaacaaaattaagtc

SEQ ID NO: 19579 - DNA, 2300 bp, Homo sapien
tagatccctcaaactcccctcacccatgtttttcatctgcgtcgcaaaattccaggtacctgtactaagaagtcctgaaggtttctgcgcttttcctttctgccgaattagtttacgcttaagaaagtcagttaacgtcatttcatttcctgcttatggttcagaatgggttgatagtgatttgtcattctaacaaaattctagcaggtgtaggaatttgaatatgtgaaaatcttctggaattcatcatataaacaatgtttgaatacttgctgacttaaattgttatgacactctactaggtaggcccgctgagaaaatggaagtagcagtcctttttccctgacagtcaaatttaggagaaatgaatcagtacaggatttcttgactctccgaacctaaactgcagactgctcctctccgctttgtccccgtggctccagccacattcttcatgtccctcagacatgttaggtatgtaccaccttaagtcattcgccgttctctgtgcttggaacactgttaactaaaatatccgtgagactgaccccttccacatctgtgcttacatgtgacccacctgggtggtcagccacaaggcccatcctgaccaccctgtttagaattgcaacctgcccctctccccagcgctgtgagtcccgttactcttttttcttagcatttattactcatatactttacttagttatgcttattgctatatcaccaatatagatatttggtccgcattgtttgcatggtgtctcatgggcctttggatgtgatgaaagttaaatcttttcccctaagtccctccaccttcaatttgtttaggctctaactctcctagaagcggagagtctgagtttcaaagaaaatggtgcaatactgctgagcgccgtggctcactcctgtaatcccaacactttgggaggccgaggcaggtggatcacctgaggtcgagagttcaagaccagcctgaccaacatggagaaaccccgtctctgctaaaaatacaaaattagctgggcgtggtggcacatgcctgtaatcccagctactcaggaggctgaggcaggagaattgcttgaacccaggaggtggaggttgtggtgaactgagatcgcaccattgcactccagcctgggcaacaagagcgaaactccatctcaaaaaaaaaaaaaaatggtgagatacttactgattattttaaagtgaagattagtatgtcttattttatacaagctaccaaagaggaaaaatgtctgttttccaaactaatgaattttacctattttgtaaagacatttctcaggtattcttttcattgcagactcttggggacagattaaagaggactttttcaattaggagatttgtggaatcagaatttaattagtgacattgtcctgtcaagtttaggatcttgaaatcatgatgggttgaaagacgctgatgatttcaaggacagtaaactattgtttggaaaaggttgaacttaccaaatgtttcctaaacaatgtatactttattagcaaagctgtgatggtgctaccttggaaatactctttacattcccaccgccactacttgattcaggcctcatcaccttttgattacgctttcagtgtattggtgtatgaagttgccttcttcttggttcagtccatcttctatgctgctgagagttattttcatgaaaatcaaatgtgtttataccagtcctttaaagaacttcactggggccctgtccagagcctgtgcctgtagcacggcccacgtgcccttcagggtccgcccttaatgtgtctggggagccctctctagccagctcgccagcctttctgaatctgccagtcctgccgctacaccattccctttcattcctctttatgatgtgccctctgctggaatttccccttcctgctgatctcactaggcctattcaggtagcaactactcaagctccttcccacaatattttatgcaataaagtatcagtactcagagtcacggcttaatataatttcttttttcctttttaaaagcttcaaacaaataatgtcttacctttagatccctataggttaaaatatgtttgttgactaaaaattgtgtatgattgctgaaagtattcaatgcagggaacagaccagttcatcatggaggcattccatcagagcgtctagttagagaagatatgtcatggactgcatcggcacagaagtggggtttatgtgagagaggagttggaagtcacacctgagtggagagcaacgtgaaaaggtgatgtcagcaag

SEQ ID NO: 19580 - DNA, 2300 bp, Homo sapien
gccttgttccagtgaaagaagggactccaaactctcgctatgcttcatttcctttggtctagagcagtggttcccaaacagggattgaaggggccaaggagtaagttgaagacattgctatgaatccaaatatgtaatccaccaagcattatctgtaaaatgagtatctcatacatatatgtactattatttaaaaatacactttgctacttaatttcataattcttttaaatgaatttgtaattttttaaattaatagactttgttcattatatatttcctcaaatatataaacagtatgcacataaaagtatgcctactatcaaaggactttgaacaatttgggggcaatagggaagcctgacattttaaaatcctgagaacttctgatcttgacttcaaaaggggcaaaagtctacatttggggtcctttagaaacagcaagctaggaactagttgggttgggagtcacatatgtcggagagaccaagtcatatcttgtcagcaggatatctcgaagcaagttaacctctgttttctttttacccccgggcttcagtgcagccctgtataggtattcttctggagcaatcattctcaaactctgggggggcacaggcatccccaggagagcttgcttaagtagtctcctggggccccaacaccagagattctgattcagtagtttggggtgaggccttcaaatttgcatttcaaagaagctcacactggatgcaaatgatgctggtgtgagaaccactgttctagattcttcgctgcactcagcaaactaagataggcaaatacagctcccggaaccagagaggctgacaaatgaattccaaagagatgctgaatacttggcgataagaactgctgctttgagataaagatgctcctcctttgtagaacacagtattttttggttggaaagcaatctgatgagcagactaatgcgaacattcacaggatattctgggagataccatgcctttaatcaaaataatcagattcaatgacagaatttcagaaccaaggaccattagacattgtggggtctttcgggggaagctttcctgtatctctaaatcatactatgtaagtagaaagcttgctgactgcttttttgttaatacgatttcttctagcttccgtagccaacttttttttttttttttctggctagggttttcattattttatgtgattaaggacacttttctgccccaagtattgtaatcctctcggccggctctgtccaaaagaactgtcttcgatgatagaaacgttctacatatgtactttgccacatagcagccactagccatacatggttatggcacacctgaaatgtggctggtgccactgaggaattaagttaatatttaaaatttaaatcccaatactggacagcacggctaaacctttcctaacccttcacgtttcttatgaagattatatagcaggatattacaagcactaaaaaagaactatcttaaatctgaagcaagatgatttccctaactagtacgtttgtttggtaaaagaggacgtgctattttttacagttaaatctaattcgtaagttgtagaacgttttcttaacaaggtatccctctcccaaattccgggagaggctggctgcctttccttttgctccagcggtttatttggcataaaatctgcaggcttacaggagctgacaccagggcagaaaagaatgaggaatttgtttccaagttggtcacaggccgctaatctgacctagatgatgtttaaaataatattcaaatacagcactttaaaaaactatgaaggctgagaagaaaacgagaaatgggaagcaagaaggaaggcggagcgtgccggcgacttctcaggggacttcctcagggagtcccattccagtaaccccgcgctacccacggaccaccgcctctctcttgtcggaagacgcaagcccaaggggcggctcacctcgtgccgcgcgcagggaccacggccgccgggtggtcccctggccccgccccctcccacctgggcaccccgagccccgccccccgagcgccccgccccgccccgccgccgacttcgcgccgcgctcgggcgccgagtctgcgcgctgacgtccgacgctccaggtactttccccacggccgacagggcttggcgtgggggcggggcgcggcgcgcagcgcgcatgcgccgcagcgccagcgctctccccggatcgtgcggggcctgagcctctccgccggcgcaggctctgctcgcgccagctcgctcccgcagccatgccc

SEQ ID NO: 19581 - DNA, 2300 bp, Homo sapien
gataattgcccaaacacagaaacaaccagaatgccctttagttggggaatgaataaacactgttacagcctgacaatggaatattattcagcactaaaaagaaatgaactctcaagacaagacatggagaaagcttaaatgcatattactataaggaaagaagccaatctgaaaaggctagccactccaagattcccattatatgccattctggaaaagtcaaaaccatgcagtcagtggaaagatcagcggttgccaggtgttgtcggaagaaagggatgaacaggagcactaaggattttcagggcagtcaaactattccgcgtgatactataatggtggatccatgtcattatatatttgccaaaacccacagaataaaacaccaagagtgaaccctaatgcaaactctgaattttgggtgataatgatgtgtcaatgtaggttcactgatcataacaaaggtaccactttggtatgggatgttgacagtggaggatgctgtgcatgtgtgacagtaggggtacatacgggaactctattttctgctcaattttgctgtgaacctgaaagtgttctaaaaactaaagtctattttaaaaaatccactgtttcacctaattcaacacttcactcccactctgataatctctggcaaccaatgatctgtttactgtctgtatttaaatttaattaaaacaatttttaaactgttttgatatttttataataatcaatatattttgattggacttttatagtgagcactttctttggaaatgagtgtctttgaccttcaaaaaagttatagttgttatcagttatcataagaggtggggcccacctcttaaagtagcaataaaatcttatttatggttgaaaaaggtcaggtcattgcgccacttctctttgcaggtttctgtgcaatccatcaggggacagctgggactaatcatttaaaaaactttccagcctgctaattttaccatacctcacatttttgtcattcctggccaaaatccaaagggcaagtcccttctgcagcctcattttttttttttctgtactttcgctcccctgacgcaagcttccactgtctcccatcctaactttaccactacgccctctagaatgccttttcctgataagcaaaaccccccgagtcgttggctcctccactttccggttttggcagaatccttgatctgagccaggcctcttcccaggggctctggccctcttcacttccttttccccggaggactctggctcccgggtagcaagcagcccacttccccggccgcttccttcccccgggatgacacgtttctacaggcggactcttctaattcatactatttccctacccccgtggtggctcctagcacccccaggcctgttctacctgtaaaatcttgacacatttaaactactacttctgatcctttcctccccgtccagccttcgctcttaggctgccgagcctggactgcttgtcatcccctcaggcgtctccccggccctccctgctcttcagccgtcccgacggagcgcggctcctgaccaaacccacggttcgtcttctccacctgctccgcgcgcctcgcatgtgtctggggggaaacacatccaaacgtcgacttaaatgattcagggccgaggaccgtgagaggcagtcttcactttttcatctttcttcatttgcacagtataccaataagctcttactacttctcagcacaggtaactcgccttttgcagagcaccctccgccgccgaacggtcagagcctggaggaacccgcaccaggatcgtagggcatgacgggccgggggcgggacgaggattgacgagccgggaacagggcggggcttgagggggcgggagggtggggcgaggcatgacggctctggtgggagggtaggcggggcttgacgggcctgggggcggggcggggcttgagggaccggaaggtggggcgagtcatgacgggccggggcgtgggcagggcttgaggggccaggggactgtgtggggcctgacgggccggtgggtggggcggggcttgaaggaccggagggtgtgtgggcggggcttgataggcaggggcggtgcgggggcgtgggcagcacaagccgtgcgctcccgggctgcgaggtctggctaggctacgggccacgcgccgccgccgctgccgccgccactgtcctcttcggaggcgcgggcccgacggaaaccatgtttgtggctcgcagcatcgcggcggaccacaaggatctcatccacgatgtctctttcga

SEQ ID NO: 19582 - DNA, 2300 bp, Homo sapien
ggggcctctgcaggctctactcagtgtctaaagagatttggaaatcacagtgggagttctgttcctcctttccagttggcaagtgaggtgagatactgaggtataagataatagctaatgtttgttgagtatttccatgggccattatttttctagataccttacagaagtagctttaaatcctcacagtaagcctctgaggcaagcgctttaattatccccactttacagacaaggaaaccggctggttaaagctacttgcccaaggctacacagtttggaagagggaggtagagccaggattcagatccaggcagcctggcgtcagagtccaggctctcctgctgccgagactctgaatcagagatctctgttaatagagtcctatcaggttactgagtgttgtggggagtgctgtggtgacttgaggatatttatggaggaaggacatttattaacaaggatctggtgtgagtgacagtccggaacctgtagacacatttaagcagttcacctccaatgtgtgaccgctttgtagaaaaagaggttaagagaggtcagctctagggctgagcatttggcttacttttttgggattcagaaaatcttgagattttctgcatttatctttgctcactgagtgtggacaaaggtagaataaaggtaattactctttgcaaataccaaggctgcagggttccaagaagaggtgtcgaactgtggagatatcactgagtttgacaattaggagtctattcctgataaagttttaaggacccagctagacaccatgaaatgcgtcaaaataaggtgtaaaaagtggaagcctggcttcctctatggaaaaaaaagtggagaccattaagggaaggaaacaagaatggtcattaggtgatgaaacagaatcaaggaaggggtgtgtgtgggtgtgtggtttgagtggtgtttgtgtgtggagggtgtgtgtggtgtgtgggtgatgtgtatgtgggtgtgtgttgtgtatggatgtgtgtatacgtgtcacacacgtgtgtgtggtgcatatgtgggtgtgtgtggtttgtggtgtgagtggtgtgtgtggtgtatgggtgtgtggtgtgtgtgtttgggtagagaggtgctgcatttttgtaggcagagagaaggaaaccagtggagaggatatccaagaatgacaggtgagccatgtttgcaggaggtagaaagtggtcaagtaaacagacgtctttccccaccaagtaacctcaggtctagggacttctaaactttgcgttttccctcttctttcctccaaggtgcgccggacatctttcagtaacttgaacgaagttaaggagttagctttggaaaagagggactcttttccctctgtgactatatggaataaattttgagataagggaccttactgaaaaagactgagatacattttgagtgaaaggcatggtctcagtgaagtagttaagggcctgtgccgagcagatggcggtgatgggttttgtggcctaagaaggatggagaaaagtaggaagcaatcgagacaaagcctactctgtcacaaagaggcgactagatgtggcgaaatgtcatgaaacttggatcccgaggaattagctgattgaaggtgaaacctgacgcctttcagcgcctaccaacaggaaaggtctgcatctgcccacggaaggacgaaacctatcgggggggatttgttggcgggggatacttctttgcgcatagagtgactggcggtgccctggagacccaaactgaataaagtaagcattattttcaaattcgccaagaccttgaaggcggcgccaacgggagccgtcccccgggtcccacgcagcgcagagctccatttcctcctccggactcgcagggcgcgcggcttcctcgcttcaaatccaggaacgcgctgtccccaccaatcaccgggcttcttcccgccccatgtcttcccgctgtccaatcaaaagccagctcagtctcctccccttgcctggtgccgcgaacagacgtaaaccagaggcgggcgcggtacggccgttccgggctccagccggtgcgggggccacgcgcacgcgcacttgcagtgccctgggacacctcttcagtccgtggactttcccgctgcacactgccctccgaagtcggggacgcgggctcggtgaggggggacgctggtgcctcggcctgcgcctaggcgggaggcagacgcatgcacctttggcctacgtttcggctgccggaccgacgggacagtgacggttgggccgggtgggggcgcaggc

SEQ ID NO: 19583 - DNA, 2300 bp, Homo sapien
atggatgtgaaacccgagtgtagtcagtgctaactgtaggacttgaatattgcatattttggtacatgcaggggtcccggaaccagtcccccatgtatactgagggttgactgtaacagctacatggatacttctgaagattctgattagaaattttgaaagttctgtaaactgttccttttctccggggctgcttgcatagtttgttcatttttatttttgtctcttgaactgctcctttttttcttgtctgatttgtggctgtcttctaggctgcctagtgtgggcatccttatctgttgtgtatgtagctcttatttctcattggcttccacacaagagggacgttgttcctggccatttactgtagagtgtgcaggttggagtcttcaattttatgccagatgtttaatgctttcttctgggccgctgtaactgccatcgcttcgttctccacaggcattttctgtgccttgattgcaggcaagcccttccctccccgttgtcaggtgttcactgtcgtgtgtgcatggctgttgtctctggagtgggaaagaagggtgggtgctcctgccatgcttcatgccgggctttccgtccccactctcctgccctccccgactcccttctgccctctttctgactgtagtcaaggaacatttttgtgtttctccctggcagatttgtttccttttctgcttccgggcccttctgttcttggattgtggctttctctccccctgcacaccccatctgcttttcagattccagaatctggggtaagcgtgggttaggactggtagttcttacccagattgcttcacttttatagatttccttactgtcattttattggacacttggaagttgctcttgcctctttaacttgaaacttatgacttagtttgaaaattttttttgagctaataaaaatatgggatagctgtcgttttgaggaagtagcatttttagagagatggtggtgaatgtcgagtgccctgctctcaactgtccctgtcactctaaagttctggtggtcatactacatgcttttctcagggagggctttaaacatggaaattgacctaactgtcctgacttgtttatttatttcctgtcaccatcttgctcccccacctcttttcctttctgtccttgctacctcttgactttgtaactatgtatagtctttccacctatgcctttcctttcctgtactcaatgaaattttcctgtacctacccatgagtgcacctttggcttaagctagtgactttttatgtactacagccccagtaaagagatggagaaactgggaagtaaattgtagttagggttggagagttgcctcaggcatgaaaggttgggatttgagaaatatggaaggacttttaaaaaaaaatccatcctggccaaatttgagtctggctctaggtatcagtttgtcatgtaatgaatttgttgcatttagaggctttttcctgaagttccgttcccacccctctctttctgtggtgagctgctctagacccaagagcttttggagtagggtgggaggaacattgcctgtaagaaaaatactttcatccacacagaaaacagcagaggtagaaagaaagataaggacaagaactaggactagggataaaagtaaaaacgattgaaacctttattaattcagagatttggctattttggcaaatatgccaatatcctttaagtctgcagattttagaaagctgaattatgtagattggtagtttcaaggatacttattttggaagtaaaaaaaccactttttgctgcttgaaagagtagcagtatgacgttctttgattttggtagactgtatcactggacccaaaatgttggttcagtccccagaatacagtgcagtgttagcagttgtagttttctggctagactcaaatgtttctttttattgcttccattttttctttttaagaggtaaaatacataactgattaataaatattttgtagatttacccaaggtaactaacattttatcattcttctgtttcctaataaaaaagttctatctctaggaaaaagagctatgtggaaagtcaacgtttgtcaaatgctctcagcaaacagtcagctttacaaatggagacagcaggaccagaagaggagccagccggagctacagaatccttgcagggccaagatctcttcaacagggcttcaccactggaacaagcacaaggtactgaactatttgaaattatttcttaatgcatatgttttaatttcctttttcatttccttatcttt

SEQ ID NO: 19584 - DNA, 2300 bp, Homo sapien
gaaataatttgaggctaagggagatgatatcttccagactggatttatgtctgcttctgacagggagcaaggaacactggcaattgcagatcactttcattcgtttattggaattgagctgattggagctgagcctcatccttatgagaaccagttggatgctggtttacctttactgctggggtgtatccctttgtggtctcatcccaaagcatggatgttttactgtggtatctttctctccctcaaacatacacacacacacacacacctcctaaccccccaatgccagtcattcattggcagattcagtttttatacctgcactcccacaagaacaactttgcttagccttttcttgaagcagcagatatgcttagggaacagcatccccagtgttgggcttacctctctgggttactttcttctcttagattttggccccataaatttacactgctttttaagcttgctggtgctttcaaagataagtttttgagtatgctattcagttctaattgttcttagcgagaggttggtttgctttacctagtctgctgttactggaggcagaagtcttaacatgtattttttgttgttgttgttgttaaatagtttatgtttcttaactgttgggcctatttcagttttttactcatggttcctatttatgtctttcttataagtaattctaacagttgaatgaaattaccaagaattatacttgcaatcacaatgactcagtggcttttcaatctcaatatcttaagtttttggttttaaattattatctgattcaattttaccatgtctttcattcctgatgatttttaaaaaacaaatgataatcaattttgtaaataacctggtactatataattaaagttgatagcagctgtctttttcattaggatatttaactggtatgcccttaatttttttgttgccattagatcctacatcatgcttataaagatcaaactaatacagtagcctgctcttttccacagttttgcctccttcagttttagttacccatggtcaactgaggtgcaaaaatattcagtggaaaattccagaaatagttcataagttttaaattatatgtctttcttagtagcgtgatgaaatcttcccaccaatttgctccatcctggtaggatgtgagtctttcttttgtccagcttctccacccgtcttcacttgttgcccgttagtcacttagtagtgtttggtgatcagatcgactctagggatgttgcagtgcttgtgttaaagtcactcttatttcgtaatggccccaaagtgcaagagtagtgttgcctgcaatttggatacaccagagaggagctatcaagtgcttccttcaagtgaaaagaggaaggttctcgacttaataaggaaagaaaaaataatgctgaagtttctgaggtctgtggtaagaatgatcttttttatgtgtaattacaaagaaggacagagaaattcatgctttgcactccaaacttcaaacgttccagccacagtgagtgataagtgcttagttaagatggaaaaggcactacatttgtgggtggggaagataggaacagaaacatgctctgatttatggcagtcggatttggtactatctgaggtttcaggtatccacttggaggttttgaaacgcatctcccaatgataatgggggactaatgaatgttcatgaaactggggtaaatttatctgatgtttaattttctcacttctaggacactttcttcatgagcaacaaaccccaaagatacaaagacaagctaccagatagtggtgattctatgcttaggatcagcaccattgcttcagccattgcagaggcatcagttaatactgatccttcccaacttgctgcaatgatcaaggcactttcaaataaaaccagagacaagacttttcaggaagatgagaaacaaaaggactattctcatgtgcgtcatttcttacctaatgatttagaaaaaagtaatggatccaatgcacttgatatggagaaataccttaaaaaaacagaagttagtagatatgaaagtgcattggaaaacttttcaagggctagtatgtctgatacttgggatttatctttgcccaaagaacaaactactcaagacattcatccggtggacttaagtgctactagtgtaagtgtgagggcaccagaagaaaacacagcagctattgtttatgttgaaaatggagagagtgagaatcaagagtcatttagaaccataaactcctcaaattcagttacaaatagagagaat

SEQ ID NO: 19585 - DNA, 2300 bp, Homo sapien
acttagaattctttctttcttaggatcttgaaaatatttgtgcagccatttggacctcagtatgaggtagtgttaaaaggcgaagtcatttcttcaggaagtaaacctctgtcacctggaccttgcttagatattccatcgattttgtccaacaaacaatttctggcttggggaggagtccctctaggtagaacacagtaagtgtcaaagactgacaaatcgtccactatttatacatattttggagcagactacaaattaatgtttgcaggaaaattttgtcataatagacactcttcaggctcaattgtgcagaactggaaaaacctagatgggcacgtgtcctgattcagcttttctttaacatatattccagtcctgcaaagagcacctgacgcatgaccaacaatacagttactgctgaggagggagtatccccttaaattcactgccactctgtatttttcaaaagccagctgagagagagatttatggagagctgcatagagaatatgcagtacatccattcttctaaatgatctaaatttctcagtcaacaaccacatagttttagcaaaacccatgaaagtgtttttaatgcaccagacttgggtgtcatacttcccgaccacaccgaatggagcaccgaagggagaggggtaccttaggaaatgggaggtagtatttactgtaaaattgtttgttgttgtttttttttgagactccctgtattgtacaggtttatctttaaaagtatctctggaagaaacatctctcagaagcctatggcagaaacagttacacttcactcaagcaataactggcttgttcttgacttttgagtacatttaactgatgatatgactctatggaaacctagcctctcccatcccacctgataactaactctatacttgaaaatgataaccacagtgctttacaaattattaaataaatacatgagaatgaaaactttacaaaataatgtttctttcacgtaattcttccccagtcattgtacctgtggaaggcttttcctggagatgtcaatagccaaagttgtctgcgtttctcttaacacaaggtggatgagacgtagacctcagctgctgatttattagctgctgatcttccccaaatttgagtaaaacagagatttactcatgtattctctgttctccaatgaagacagcattcacatagtttccacaattgaagtgtttttatcagtcaggtgctattttatgtccattcttttgcattgtagcttctttaaaagtagagttaattcaatatactgtgtaaaagactactttgtgcaaatgagcctcttagcctaggaccccttgtttccctgaaagctcgcttggttgagccaggtattccaggtaggtgtgatattgacttaatgactcgatgaatttcttcacctggattttcattgattgatgttttatatgacagataatacctatacacatagtattaataataaggtcagctgcagagctataactggagagagattaaaccaaaaagcctctataaggtgagtcttgagcctacaatttcagaaacgtagagcctaggactgtggggagacaattccaggctactgaaatggcttgtatagttagtccatctctagacattgtggttggttttaattggctttattcttataatggtagcaatatccatggagaaaaaccatatttaaaatgtctaattgtttttaggcttcagaaactagctttaagaaataattctgcatctacaactcaacatttacgactgcttattagaggacaagatcaggactgctttcaggttcgtagagtacgtggattcttgttatgtcttctgtctgggtctggaacacttgcatatgcagacctttttgtgttatttagcttttaagaatctgtgttaatggtatgttttatttgtgctactgctttgttttatgcatttaactgtttttaaattgtagcttcagaacacttttggttcagaacagcgattgaccagtaactgtgagatcagaattcacccaaaggaagacattttcatctctgtattatttgcacctactcgattatcttgcatgttggctagactagaaatcaaacaacttggaaatcgatcacaaccaggcattaagttcacagtaagatcattttattgcctttcccttcccctggagtttatgccattttataactattggtttaatgttgtaaattatacagtctgccttttataagtgaaactatgtaattatctagacttacaaacaa

SEQ ID NO: 19586 - DNA, 2300 bp, Homo sapien
tgccatcgcttttggtgtttagtcatgaagtctttgcccatgtctgtgtcctgaatggtattgcctaggttttcttccagagttttaatggttttatgtcttacgtttaagtctttaatccatcttgagttaatttttgtataagttgtaaggaagggctccagtttcagttttctgcatatggctagccagttttcctaacaccatttattaaatagggaatcctttccccatttcttgttttgtcaagtttgtcaaagatcagatggttgtagatgtgtggtgttatttttgaggcctctattctgttccatttgtctgtctttctgttttggtatcaggaccatgctgttttggttactgtaaccttgtagtatagtttgaagtcaggtggcgtgatgcctccagctttgttcattttgcctaggattgtcttggctatacgggctcttttttggttccatatgaactttaaagtagttttttttttctaattctgtgaagaaagtcaatggtagcttgatgggaacagcattgaatctataaattactttgggcagtatggccattttctcgatattgagtccatggaatgtttttccatttctttgtgtcttctcttacttctttgagcagtggtttgtagttctccttgaagaggtcattgacttcccttgtaagttgtattcctaggttctttattctctttgtagcaattgtgaatgggagtttactcatgatttggccctgtttgtctattattggtgtataggaatgcttgtgattttcacacattgactttgtgtcctgagacagctgcagttgcttatcagattaaggagattttggactgagacgatggggttttctaaatatacaatcatgtcacctgcaaagagagacaatttgacttcctctcttcctatttgaagacgctttatttctttgtcttgcctgattgccttggccaaaacttccaatactgtgttgaataggagtggtgagagagggcatccaaccccttgcacttcccaggtaaggcgacgccccaccctgcttcggctcaccctccatgggctgcatccactctctaaccagtcccagtgagatgagctgggtacctcagttggaaatgcagaaatcacccgccttcagtattgatctcgctaggagctgcagacaggatctgttcctatttggccaccttgccagccaccagttcatctttttagtgcatttcaaagtaaattaaaaatatgtgaatattttactctataaacttcttaatcaagcatatctgtactaatctttatattattcctgtgtcatcaaagcttggcttttgaaatagttaattcttagcctatcagaagccagatacttttgcagctctttggtttgttttttccttaagacaaagtcttgaatatactgctggactggaaatggggaactactacccaaagtacacaaacatttaaatttttaattgtattaaatctttctgaattttcttctcactgtaattcagtgtttcgctttctgcttaacattaaaataattttggatatgtatatcttttttagatacctttgtctggatatggaggaacaagcaatcttattttggaaggcgttaaaaaattatctgacagttacatggtaacagtgaatggcttagtacctggcaaagaaagtaaaattgttttttctgtccgcaacactggctcccgagcagcttttgttaaagcagtaggttttaaggattctcagaaaaaagttttgctggatcctaaagtattgaggatttttccagataaatttgtactcaaggaaagaacacaagaagtaagtacaaaagtttctgtgctaaaaacatcaactcattttaaaattgttaataattatgtattttaaagccaaaagctaaaataatacttgaaaataatgtaggaatagaagtacttatgtgatcttggaaatgccatgcgtatgcacttgtgtctgtgtcgaatttttaggctcgtaagattgttgaatcagattgaaattacttaaaaatatttaatatttactcctgatttttttttcttggcatcagaatgttactttaatatataatccatcagacagaggaatcaataataaaactgcaacagaactatcaactgtatacttatttggtggagatgaaatttcaagacagcagtatcgcaggtagattacttatcttacacaatgttgggaaccattcagcagaaataatgaaggcttctgtggcttgggatttggaatttttag

SEQ ID NO: 19587 - DNA, 2300 bp, Homo sapien
cgcgcccatcctggcctccgggcggtgcagaattcagtcttgcaaccgcgggacaccctgcgccccagggcaccaggaaacagaaaacggggtgggggtcggcgaagtccctccaccggcgtaaccccgcccgcgggccagccccggatccccgccgtgcccaccggcaagcccacccggaccaagcctcacagacctcgcgcgctcggcgcccagcttctccctccggccccagccgacggcgcaggctcgcggacgtccagttcccaaagcgtccggttcccgagtcccccgccacccctccctccggagcgcagcggtgaacttgggccagaagccccgaccactgcggccacctcgggtccgcactcacctgggccgcccccccggagcggaggcggggactgcccgcagtgcggctccgcggccaccggccctgctggccagggggaggggcgctgtgcggggcgcggcagggggcgcgcggcgggccggcggggagcgcggcgcgccggggttctttaagagctgaggacctcacccccgggcctcccccgcgctccccgccctgcttccactttcccaggcacccgcagcctgtctggctgcagcggcggcagcggctcagtggcttgcaggggatccccggccggccgcggcggcgcgcggagcgggcagggccaacgcactcgcctgctaatcccgccgggcccggtccgcagcctcagcgcggggagagaggggacgcggcgctgcggccgccggggaggtgtcccgcctccagtcgccggaggggggagtgtcccgcctcccgccgccgtcgccgccgtctgtctccagccgtgactgcgcgccgcggctgtgtctgtctccaactcctccagtctctcctcctccttcccactccgcggtggggacccggcgcgcggccaggccgcgggtaccggggccgccgtggcgggggctcaggggtccccggctcacaggctgcgccgacccctgcggggggcgggcccggaggccgggggtgggcagtgggggaggcgcgcgggcgccgaggccgcgggacccggggccgcactcccgcccagggctcgggcccgcgtggcgcgcgcccaccgccggccgcacggggaactccaagccgagcgcagagtacgctgcaggggcgcccggaggagccggctcgctgcccgcaggccgggggcggtttcgggaggctgggggcgcgttccagcacagagtacctcgcgggctgcgtgtgcaccacgggccgcgggacctcgggcagccgcctagagacgtgcagtcgggcggcaggacacttagtaggacggagcagtgctcggcgagccttgaggagcttgaggcgcccccggaccccacctggtcgcccccttagtatcctgccctctttaaaggaaatggctcctgcctagaaggtcagatggattcttcgcgctgtgaccctttctccttgaaggacctacacctcctgtgaagaccatttcggacttgacctccacctgagtgcagactttgttcagaagtacacgcattgcctccagccacccctaccatgtttgatgggggattggttactgccagagcatatgagcattttaacccaattttattgcagtcaccaaaattagttcgcctctgccaaaattaacccccctgcagacatatcaaaatactacactaagcaggggtttcaggctgggtttaagatagatgcagctgattaaaggagtgaacattttcaactgtccccacacaccccccaaaaagttgtccagttcatatttccgtaatgtcagagaaatgaatcttttgaaacctacgttttgtctaatttgtcagtgactttttagttagtgaaatgttggctgaattcagtttcccttaagccctcagctctcagctatggtggtaattgccgctagcctttgatcagtgctcatatgtgatgtaataataactaccattcatggagcgcttctgtgctaagcgctttacatggattgtctgattgagtcctcacaataactgggagctattacttctccattttacacatgacgaagttgaggctagaaggatttagtaatttgtcctcagaccacaaagagatggttttacatccctaactagctgcatagaaagctgggagctgaaccagcatgccatactgccacctacctacagcagcgctgacagttcttcagctcagcccgcaaaccagccagcatctgccctgtgcccggcaatgagcccgctccagctgggaatgccca

SEQ ID NO: 19588 - DNA, 2300 bp, Homo sapien
cagttgaaaatgttcactcctttaatcagctgcatctatcttaaacccagcctgaaacccctgcttagtgtagtattttgatatgtctgcaggggggttaattttggcagaggcgaactaattttggtgactgcaataaaattgggttaaaatgctcatatgctctggcagtaaccaatcccccatcaaacatggtaggggtggctggaggcaatgcgtgtacttctgaacaaagtctgcactcaggtggaggtcaagtccgaaatggtcttcacaggaggtgtaggtccttcaaggagaaagggtcacagcgcgaagaatccatctgaccttctaggcaggagccatttcctttaaagagggcaggatactaagggggcgaccaggtggggtccgggggcgcctcaagctcctcaaggctcgccgagcactgctccgtcctactaagtgtcctgccgcccgactgcacgtctctaggcggctgcccgaggtcccgcggcccgtggtgcacacgcagcccgcgaggtactctgtgctggaacgcgcccccagcctcccgaaaccgcccccggcctgcgggcagcgagccggctcctccgggcgcccctgcagcgtactctgcgctcggcttggagttccccgtgcggccggcggtgggcgcgcgccacgcgggcccgagccctgggcgggagtgcggccccgggtcccgcggcctcggcgcccgcgcgcctcccccactgcccacccccggcctccgggcccgccccccgcaggggtcggcgcagcctgtgagccggggacccctgagcccccgccacggcggccccggtacccgcggcctggccgcgcgccgggtccccaccgcggagtgggaaggaggaggagagactggaggagttggagacagacacagccgcggcgcgcagtcacggctggagacagacggcggcgacggcggcgggaggcgggacactcccccctccggcgactggaggcgggacacctccccggcggccgcagcgccgcgtcccctctctccccgcgctgaggctgcggaccgggcccggcgggattagcaggcgagtgcgttggccctgcccgctccgcgcgccgccgcggccggccggggatcccctgcaagccactgagccgctgccgccgctgcagccagacaggctgcgggtgcctgggaaagtggaagcagggcggggagcgcgggggaggcccgggggtgaggtcctcagctcttaaagaaccccggcgcgccgcgctccccgccggcccgccgcgcgccccctgccgcgccccgcacagcgcccctccccctggccagcagggccggtggccgcggagccgcactgcgggcagtccccgcctccgctccgggggggcggcccaggtgagtgcggacccgaggtggccgcagtggtcggggcttctggcccaagttcaccgctgcgctccggagggaggggtggcgggggactcgggaaccggacgctttgggaactggacgtccgcgagcctgcgccgtcggctggggccggagggagaagctgggcgccgagcgcgcgaggtctgtgaggcttggtccgggtgggcttgccggtgggcacggcggggatccggggctggcccgcgggcggggttacgccggtggagggacttcgccgacccccaccccgttttctgtttcctggtgccctggggcgcagggtgtcccgcggttgcaagactgaattctgcaccgcccggaggccaggatgggcgcgcggatggcagccccaactgtctccgcgcccctaggcctcggcgagccgtggcgggcagggactggaggtcagcgggaagcgggaagatcctgcaggacctgaccggggagtttgcgggaaggagggggcgggccaagccccgcagcccctcagtcccgcatcctgcaccgcgcgctccccggccccggcccctcgggcccgcttcacccggcgtccccccgggtccccccgcgcgcgttgacgtcggtcgcgggaccgcccggagctcccggcattggctgggaagtcgattgtctggggctgctgctgttgcacttaggctgggtctccgagccccggaggaagcaggcgtgtgttgaatttctctctgcccctcaccttggaataaacaggaagcgacaagcacccagcccggcccggcacttgcctttgtgaaggggtctgccctgcacagcctttaggaagcttcctcgggaccccttcccggtgcgccgccccgggtgggcctgggggcgcgccctgtgagta

SEQ ID NO: 19589 - DNA, 2300 bp, Homo sapien
gtgattctataaatttttaagacagggattttgaaaaataaaatcccacattagttctttggtacttccgtcgcctgctctgaattattccaatgaacattcaaatgacaggtaactttaaaaatggattcctgaattctggacattttgacacacactgattatatcaacaacagctccacacggccattcccacgagaaggccaacatgctctaacttctggtcttataaaaagatgctctgggccccatggcccatttctctgctcccacagtttaatgctgcaaacaagttttctgtactcactgtgtctaatttctgattctcccctaaacaaatccgaatcaggctttggggcccatcactgcaccaacaccgcctggccaggtccctggagacccccatgtggttaacttggcctcatctcaccagaccccagttgacacctctgctccctcccacagggaaccgcatccttcccatgtcccgacgcacatggcactgcactcctctccacacctctcagctcctcctccactccctgacctcttaaccttggagtgctccagctcacccttggctccattctcttttctgcatacaccattcctttgccatctctagcagtcactgtctcacactaacaattcccacatttatccctgacctttccaccttgccctagaccccagactcctccagtcacttgttcaacatatccttgtggaatgtataatagacatctcagcttactatgtccaaggccaaatacctcattttcccacccaaagtcactcccccagtagctttccctatctcagaaactgcactggggatagagatgccactgcagtcatccataaccccttcctttcccttacatcccaacccatccacacactctgttggctccacctccaaaacccactggaaatggaccccttcccaccacctcactacagtcaccctcctccaaggtacaatctcccctccccatggtgatctcctagctcctcccctgtccttccaccacggtttactcataagagagcagtcaggatgttcctgctgagatggaagtcagatcaggtctctccaacagctttcattttactcagagtgaaaacccaagtcctcataatgaacttgacatgaccctccctgatgtggctcccaccagctctccagcctccccttgccctcccgaggttggctctggatgcctggcctcctcgctgctccctgcacacagggctcatccatacctgctgctcctctgcccagagctttcctgagacccctgctcagccaactccctcactttcatcaggccttcgtgcaaacatcaccatcgccgtggcctccctcactccactccccatctcacctcccagactcccggctcctcctacctcctttcctgcttcactcttctctcctactcatatttccatctaacatgatagtcaaatatacacatcatatttcttgtcttcttttctccattagagcataaactacatgagggcagggatttatgtctgcctggtcttactaatgagtccccagagtgtggtacatggccagcaatcaatcagtattattactgtaagcaatcaatcaatattattaaagaaatcaatgaatagatgtaaaagcctgtggagaggttcttataggaaccacagttaactatgggtgtccctttgggtgaagaaaattttctctagctgagtaaatatcctcactagaaataaatatatggaaaatgaggcaggaaggagataaaagaaggaaataatatattattagcaaattgtgaaagatttttaaaggcagaattagttaaagttactggccacatggtttttttagttacctgtggtcttcaattatggaatcgttctctcctgtcctcaaggtcataaatagctaggctttttccatctgtccctacccagtcatctggctgtgctcctaaatcacaatgttctctctcagcacaacactgtgtgttttggagagaaaatccattgtctggctgaagccctggactgttgattcaggaaacagccagctccttcccttccagcctccggcaccctgagaactgggtgtgagtgctgatttctccacctgtcttatttcttaatatctgcaaccagctcagagccagggataagtcaagactccaccagcccatgtatggctgcccggctgcccccagccttgccctcaggtgggtcacagcttgctatttttttcccacttgggtaaaaactgcctgactttcttgcct

SEQ ID NO: 19590 - DNA, 2300 bp, Homo sapien
ataggtgctgcctgggagaggcaccaggtgtcctggcaccaggaccagggatgttcctcaggctgggctggcagacaggtcattttacccagtgggcacttaggcaggaggcctggggtttccaggctttttgggggcttatgcaaatattgcagacctgaaaaaaattctgcttccaagataggcagcgaaaactgccaaattaaaatgcacacatttaattaaatgttgacaaaacgtgatggcttgtcaaatagtcacctgcaattcattgtctcaagtgggatgtggtgctttttcctgggtttgatgtgacatctatgaggcccgtaaaggtcatgagatgcccttgggtagccatggtgagaagaggctggaggctgcaggggcacctgctcctgctgagcaggtagaggagacactaggagcagctcagcatccccccacagcctggacggctctgagggtgggtcgtcattccctctgatgagctgggccggatcacttgagatacaggcagaaggtggagagggggccaagtcatgtcctccccgtggctggggcagagctgtgcatctggcttcctccttccacacagccccagggaagatatccgggggcttggcaacctccccttcagctgcattcagccccacaccgggtgccatttctggtgatctaacatacaattgagcaactcttggtggtgctaagataaatggatgataaattgcagttgtatatttttaagattatgaagaaagcaaacatttaaaatacaagcctgtttattagtctgttttactcagagccccagcttccgaagtctggttgccctgaattccatgtagaagtcctgccgggacttctggcaggagcgcccgccatgtcccgcgctgtctgcattgttaggaaacgtgtccttgcttggctcccagcatatggaggagaagtgaatgtgtcactgctgtggcaggaacacatcttccaagaactaagggacatcttgtcacggactcctaggcaggaaacagggcagagttccaggtgtcaggtgctgtggtttgaggtgtgaataaataattaccaaaatgactggctgtggtggggaacgaggagcatgtacacgttttgcctgaaagtgggagcctgagtgttagcatggtccccccgccgtctgcctgccttcctgagcgtgccacatctacacgggggtgccccttcctgaccggggtgccctctctcgccttccctcctgctccctgtgcaccttgccagggtttccctgggcagctctggtgaagggcgtgcgtcacgctatccaggccctctccacgcctcagtggccagttgcctttcctttctttctctttctatgatgctcctgtattgcccctggattcctctaacccacatcatgttggattttaattatgtgtttaatgacttctctcttactagattatgagtaaatccctccaagggagggtctgtgttttgtttatttttggtccctgaatgtccagtgcagggtccatgtgcatgcacatatacacacaaatccatcagatacacatgtattcataataagtttgctttttaaaagggtattttatataaatagaaatgggaaactattatatttgcagacatgaaccaatgtatgctatcagtgcgggtttgagccccagcttcaggctcagtaaatcataggtcagcagaacaatgccacccatttttcttgggatatgtggttttttctagattctgtggcttacagtgctatccaaaattccttccactcctccttcacctcctttctcagctcccaggatttctgtctgcctggggaaaaccctcaccctgtgtttttcctctggtgtgagagcagagaacagtcatccacatagaagaacacttctgtggcctagtgtgtggggcttccccacagcccagcagtggacacctgctgtagtgtcagctccacaggccggggggtcagtccccaaggctgcccctcagactccagttgcaagtccaggcctcaggaatttctgaccgactggcttcaggttggggttctcacaacccccttgctatgtttgattaatttgctggggggtgctcacagaactcagggaaacacatgtttacatttaccagtttgctccaaggatattgcaaaggacacagatgaagggctgcgtggggcagggcatggggaagatgtggagtcctgtgccctccctgggcacccccctccaagagcctctgcatgttccgccatccagaagctccct

SEQ ID NO: 19591 - DNA, 2300 bp, Homo sapien
ccatgagcttctggagtggaaaaggttgtgtgcttacaatgtgggtgttgagttcttttcaaaccttaatgcttttggacatatattatgttcctaatagttttgctgctcttgatgttcacattctggattcttacttccttagattcattgagtaattttatgtagttcacagttcctaggttaaatggacttgatcaattcttccttgagctttagagaactaatgactactgcatttaatttgagaaaattagagattgatttttccaggtattctgcctcctccctcctctaactctaactgcatttatgtttaactttaaaatttacacccatatttttgggataactaggttccgatactgtcctgggtattactggtcaaattccagttggctgtaatatgttgggatttcacattttgcttgaaaataaatttggcagtggagatcacttgcactgaaaagtaaatttttttggcttattttatacgttaccctatcctgtcttctctcactgccttttggacttcggagattgtctctgaattatcaaatgatagtgcagtggatgaagtttggccacagatgctagttgctcagcagcagttcctttaaacgaataagggtctaaactgcccagagggccagcaccagaacagggtcttgcacattacataagctccataagtgtgcacagtctgatgatcatgtcatccagcctgccctacattgcagtttgctttgttctgggtggcacttgccccggggtcacagagctgccctgacaggtgacagagcctggccagccctcactgtaatacactctgcacccttcctgtctccaggcttacagacagcctagtaacggtttctgtaatctgagctgtctgctgcttcagaacacatttagagatcagtaagcaagtcacattttccgtgttaaccactgtgggctaaacacaagatgtttttgtgggtgggcaactttgtgtctccatggacattttttggccatacttatatagttaagaagttattaaattacatgtgtttttcccttcttttgttagggaaaatgcaaacttcaggagcttcagatcttcttcttggggatcccgtggggagctggatcctcagatatttaggagcggacaggtcctcacaggcttccaccttcatcgtcttcatcagtctccgtttattgtgagctttcagagcttatgctgaattttcttgctatgttcaaatcaccagggccccaagccttggacctatgttgggctttgatttcatgagagcgtgttagaggttactcatggaacacctgtcaggccaaggtaaaagtgtataaggtgggtcctaccctggcacacttagcctgtctttttaagcttgaaacatttaaaagtatttagagatcttgttgatgaagactctgattcaaagtcagaacttggagaaattcagatagacatcctgagaattttcagcagaaagtaatataggctttttcagctagaagggccatagctcaccattgtggatcaattcagggaactggggtgctggagaaagcatgatccatacagtcccaacagacttttgcctcttgccaggaagttggagagattggagattattgttgttgtatttcatgtgtactttgtcgtatatgttaactcttgtactaacttctagtaaactgtatataggtctcattccataataggggcccacccattttcaaagaatccataataactcgtggagggctgaagtcctgggttgtatcctgactctctctgtgaactgtgaccttggaagagtaaaccgtttctttaaacctcagtttcctcctctctacaatgagataataaaccaatttcacataattactgtgggaattagatgaatacaaataaatcacctagcacagtgtctagcatataataaatatacaacagatatcgattccatttataaagcttccttcctccatttataaagctaagagttaaataacccattctcgtataattgaccatggatatccgagtcaggtgggcctcgctgacaggtgagccaggattctagggccaaatagagacagacgaggtaatgggaaaggctgacatcataggccgtggtagccctctctggggactacttgttaacactgtcttaagactatttaaattccatatttgtgtctatgtgtatatttatttaaagaagccgtgggttcgcttggtcttgtaacttccaccttggacagctgtgtctctgagctaatcc

SEQ ID NO: 19592 - DNA, 2300 bp, Homo sapien
ggaataaaaacaaaactcaagagcactatctagtacatccgcccagacagcccctcagaggcgctgggagaggccctgtgcctgtgtttaagccacacatcccaagacagactctacaccatgtccccagacacccacaggagcgctcattatgcgtgtgtgtgtgcgtgtgtgtgtgtgtgtgtgtgtgtgtgttaggtgtgggcaatgttttcaaagtaaacttgtattcataaagtcaaaagttttgaaagtggtttttaaacaggttgaactgtgagaacattaaactgagtgggcaaggagcttaattaagatcggctccatggccgggcgtggtggctcacacctgtaatcccagaactctgagaagccgaagctggtgggtcgcttgaagtcaggagttccaggacagcctggccaacatggtgaaaccccatctctactaaaaatacaaaaattacaaaaattagcccggcatgttggcgcacgcctgtaatcccagctactcgggaagctgaggtgggagaatcacttgaaccggggagacagaggttgcagtaatcagaaatttcgccactgcactctagcctgggcgacacagcaagactgcatccaaaaaaagaaaaaagaaaagaaaaagattggctcccatggccaagatgcccagtgacagggaagctagccaaacacagtaagtgtgttgagacactggggaatagctgatggccgttaaatgaaagaaaaaaatgttgattttctttttttatatatgaaatattcattttacaccatgttaaatcccagagcgggctatttataaccatttcaaaatgcaaatatgttcattagcaaaggagagaagaacttttccagttccatgaagttcaccaaagccctaattttttttttttttttttttttttttttttttttttttttgagacggagtctcactctgtcgcccaggctggagtgaagtggccctatcttggctcatggcaacttctacctcccagttgcaagcaattctcctgcctcagcctcctgagtagctgggatcacaggcgtgtgccaccacacctggctaatttttgtatttttagtagagacgggtttcgccatgttgaccaggctggtcttgaactcctgacctcaggtgatccgcccacctcggcctccgaaagtgctaggattacaggcttgagccaccgtgcctgccccacaaagccctaattttaagaaacagacaggtacagtggcctacagcgctcctcactaaggccctggcttgagggcaagcctatcatgtgactgagcctgaccaggaagtgctggcccaggtggcaaggagcctcggggctccagggacaaggggcgctggtagccagggaggggcggcttgaagtggctgcagcttctaattctttctgaagctgcctctttctgagggtgactccctcttcattcacccagcagggtgactctgagaagtcagggaaagtctggcacagggaggggagttccatttttaattcggaaattgctcaggaagaatcataccatccggatttccctcgcggctgtatattaataaatggtcactttccttgctgaaattctctggtttccttttatccacgtgaagcttctggaaactcttctgggtggttcttctgttgcttttctgcccctgcccccaaaaatgagaacatgagaaagtgatgtcttctagccacctggaggaccctgcggtgacatcagggcccagtccctgctgtcatgccccaggtgacgtgctgggctgacagcagggctggccgctaacgtcactgtcctggcttctaacgctggtagtaaccaacagagtttagttttgctttgacaactcctcctacagccaaaactattgttatggcccacatgtcattcctatttaccctaaataaggaaaaacaaaggctattctgggctcccggcagtgcttgtggtgggggttatttgcagcgttaccatggcaggctgccctttccaccacggccaccccgtgattttctctgaaaactgcgacagactcgcagcctgccctgaattttcttcacacagcctgggggcatccgaatgcacgggagatgttttacactcagatgaaacaaactgtttagacctcggggaaaagagactgtgcttgaacaaaatgaaccaggagaaagcgccctcctgagacatgtctctgctttcatgtttgaattgcctgggattctgttctctaatttctgatccttataaactaaaactgc

SEQ ID NO: 19593 - DNA, 2300 bp, Homo sapien
caatagaaatgtgaccttatttctgctcacaggccatgggaagtatgacatgcttgtttacctaggaacacagtcttcgacttcggggttcagccctcaccactgtgttcactgcctttgtcctgagcggagtctctctgcttcctttcatgcttatccctgggctggtggctgacccctgcacagaccctcagggctgctggaggcgcactcgggcactctgcagccagtgcagccttatcctgttggcagtggctgtcctcacagagaacacacccatgcagctgggcagagcccaccggggccacacatcccagccccttctctcagcctgggggtgctgagtcgctcatcaattcaccttgtaccagttaagccacttagctgcctcccgtgtcaagaggggcaaagtaggggctccggactcagcctgggagacgtcacatggtgtgtgggggtagggtcctgagaaacacagggtcaaggccagagtgtcccagacacaggaaggttatgtgcaggggcagagtcgaagactgtgttcctaggtaaacaagcgtgtcatacttcccatggcctgtgagcagaaataaggccacttttctattggaacccaattgcaaagggcccaagcccctgctcgaagactcagagcaatttcagtcttttccaggaagcccccaacatgaaaattgttgataagccctggggagcgtttttgtgtgtgtgtgggtgggggggtggggccgggggggggcgggggtggcacatataagtgtggcagctccaatggacatttcctccccataggaagtagacactcaaaccccaaggctgggccgggcaccaggcccctagagtccctgccacttagcggacaggccacggggaacccaagagcaacagcacccccttggctggggcggggccggcaggcctcactgactgccagcttcgggagctgctcagggcatggcctctgagcctctgagcatggctttgtccgtgtccacagggaacagtgatgttcccaccagcctggcctctccctgcctgcgggggcagggggcccttggcaggtccacctgctctctgcacagctcagccaccagcctcctacacagtctgctcttcattctcaagacaccagcgcctctcctataggccccagtgtcccactgccctccactcccaccctcagtccctagggtgtgggggtctgagggtggaagtggagggccgtgctgaagggtaggacatgtggggatccagagaacccctcgtccagcctcaccctcggttcccagggtgtgggcagcagacgcacacagtcgtagccactggggaggcaccacctgatctctgcctgcatcgccccacgtatgagcggatacacttgacagatatgcctccccactggccggggcctgagccctgctgcggcacatgtacgtgcatgcatgtgtgtgcatgtgtgctgtgagcccagggcagcacagttgatggcttctctcttcttactcctgcctcccccagattcctgcactgtcttcctcttagcatccccgagccccttgctctgaatttacatcactgcacggtcagtcacttccttccagcacgggggacaaggagtgaagcaggcagcagagccatgggctggaagaggggagcagaaagtggctccaggccgcccgtgagccctcgacctgcttcctctcccaaaacgggggtctggctcacctgcttccagctgccggcccaatgtgctgtgactggaagtcactctgtgttgctggactcacatgtgaagtgtgtgtcaatggcatttaaggaatctttggggtggtggtgtcagaaacccaggggagacctgaccactcctaaagtgctgtgcctgaaggcctggaaacaatgtggatgtttcctaactcacctgcagagccacagccttggaggcaaggggctgaagttgatttttcctttcaagtatgggtccctaggggaattgctttgagaaactccactcaaccataaagacgggtttaacttttctagagcggtgacattggagaaatagcttcagtttgtggagacgttctcagctccctgtggtgggggatggcagaggcttcccgctccccgcagctggtttgcacagcctcccgactgtgccgtggtgtctccttccctaaagtgggacagtcgtttctgtgtcctgctggcctctgaggaacagacgtgtgtgagaggccttcagggcctgatggctggggtggtgacagtgcctggagaatggg

SEQ ID NO: 19594 - DNA, 2300 bp, Homo sapien
cgggttttggcctcaagctcttccaccacagcatgttgtagttataatgtccccatgtactgtgtgggtgaaaggcctgggaaaaaaagtttcctataaaagtaaataaattggggcagggggcaattgtcagtaaatagttaaataaattattatgtagtcataatttttgttatattattatacctcaataaagctggaaaaaactggtggtgatagaggaaagtgcttatgttatactctgtgaagaagagaatacacaactctggccacattatggttacaactgtataaatttaatatatgcaaatgaacaagcattagaaaagcacttaaagaaagaaactggcaaggtgcggtggctcacgcctgtaatcccagcactttgggaggccgaggcgggtgaatcacaaggtcaggagatcgagaggatcctggctaatatggtgaaaccgcgtctctactaacagtacaaaaaaaacaaaattagctgggtgtggtggcgggcgcctgtagtcccatctactcggtaggctgaggcgggagaatggcgtgaacccgggaggcggagcttgcagtgagccgagatcccgcccctgcactccagcctgggcaacagagcgagattccatctcaaaaaaaaaaaaaaaaaatgaaatccgttcaagtattaggatgatgggactgtagatgcatttcctcccattttagatttttaattttgctgttacattcctgcaaaaaacaaaagccaggcaggaaaagttcccatctccaggccatcccgtctggcagatgtcccaaggcaggaatggcctgaactcctctctaccagtggccaactctcctgctccaggcttggttctcaggctttgagaacctcagggcagaacacctttttccaccccagcaagcaaaatgaataggtaacaattgtgcccttgttttgagcaacaggagcagatgggacctacactggtgggctggcctgggaaaggtccagggctggcttggcccgggcagcaaggctgaggaaggtggtgtggcggggaggagaccccagggctgcaggcatgccctgcgttaccctctgcacccctttcctggcctcaggaactctctgtgggatgcgttagaagacctgccgacaggccggataaggccaatgagagagggaacggagaagaggggcacctgggttcacaggccttaagaaagaatttagttacttatttaacaaattaaacaatgtgtgtcacgcatgtaggtctgggaaatgcattattaaaaacacacagtgcagaggtgcagcaccagcatacgggtggatttgggactctaaaatggctttggttgtgtgtggtacaagggagaatgtatacatgtattacgtgtgtagttttttaaagtacacatatagaggaaaagatgagacaagtctgatgagatgtcaacagcaacaattcttagttgtgggtgctgtgaatttcccagagaggaggagagtcctttagctgggcatggtgatttcagcactttagcaggctgaggcaggatcacttgagcccaggagttcaagatcagcttgggcagcatagcgagatccccatctcaatagatggattagatggatggataggtaaatagagagagagagagatacagatatttagatagatagcctagattgcttgatgaatggataagttggataggcagagacaaatggatagagatagattagaaggatagatggatagattagatggatgaatgaatagagagaaacagattagacagagatagatggatccatcgattgattagataggttaagatagtccttgcattcaggcaagccacagcaggtgccgcctagggcagcggcctctgcccagacactcagtgctgcagaacaggagggaggccggggcctgtggcgggcgagggaaatgcggggcccgaggactggggtgagggagagaggcggcggcccagaggagcagcaggcgcgcctctggcggtttcctgtccgggctggcggggccgccagtcggcgtggggtgcggcaaggggagcggggcgctgggtcagccgagggccgggcctcgggggcgcagccggactggacggcggctcctgtgggcacttggccgggtttgctggtttttcgggaaataaggccactggggacagtcactacgttttcaggaaccgctcagcccctctgagtgccccgcagatggacctggcggcgttcctggctacggctgactgggctcccggagcgaggagcgccc

SEQ ID NO: 19595 - DNA, 2300 bp, Homo sapien
ggccagactggtctcgaactcctcaccaggtgatgtgcctgcctcggcatcccaaagtactgagattacaggcgtgagccaccgctcccagcccagtatcactttttaaaagacttcttgggagcctatttattttgcaagatttgcagtttcccttatcaactcatttgtactgttgttggattatctgtgagagtctgttaggagctgatgttaattattcatttgggagggatgagtcaggggattaatttttgtaggtggataattactaatgaatgtttttatatgatgacagtttttgttttgccagtcaactttgtacaccagataaagaatattcgtgtaagatggagtatctgtatttattgcagtgctcatttataggggtgctaattcagatctcactgtctgttacttaggatatagttaaagtgtctgttctcaacatgttagtagtaaggtagagctggcattgggagtgggaaggcatgtgtggtaccacctgatgttgaaggaaggggactgattgactatatggtaatggctactataattacatttaccactgggagaacctttgtctagagaggctaagtaattatctggaagtctctataattcttaaaaaaaaaaaaaaaaaaggcttgcagtcttgctgtattgtccaggctggagtggagtagctgttcacaaatgcattacagcctcaaatacctgggctcaagtgtcctcccatctcagcctcccgagtagctggaaccacaagccgaagccactgtgtctcgccatcttgtaaatctttgttctatgctgatgccagatcaaatagtgagacatcactctacactttttttctctccaccattgatatgggggtggggaagaaaataaataccaggcaattcttctcgccattcaataacgtaagtgatttataacttgataacttagtccgaaggcattatagtgtaaataatactaatatcaacaattcatcagattttaacatttgtaatcataaataacatttatgatgctcattagtttacaaaagtgtctttacatcagaaattttatgtaattcctggtgacaatcctgtaaagtcatcttcattttagtagtggacatgggcttggttcctgaaagggaattatgtggaattatatccccaaagcatcagaacccagatcttattttttcccccactatactacactgcttctatagaacaagaggcctcaaaacattattccccatggtgtcagctggactagtttaccatatcatatttaaatggtgtgttttatgagatttttattattttattttatttttgaaacggagtcttgctctgtcccccaggctggagtacagtggcatgatctcaactcactgcaatctccacctcctgggttcaagcaattctcatgcctcagcctcccgagtagctggaattacaggcacacaccaccattcccggctaatttttgtatttttagtagagacagggttttgccatgttggccaggctggtctcgaactcctgacctcaagcgatccgcctgcctcagactcccaaaattctgggattacaggcgtgggccacctcacctggcttattttattttatttttctgagctggagtcttgctgtgtcacccaggttggagggcagtggcccgatctcagatcactgcaccctccgcttcccgggtttaagtgattcttctgcctcagcctcctgagtagctggaattacaggtgcccaccaccacacctggctaatttttgtatttttagtggagatggggttttgccatgttggccaggctggtctcggaactcctgatctcaggtgatccacccgccttggcctcccaaagtgctggggttacaggtatgagtaaccacacctggcctttatgagattttaaaattacactgtgcttaaactctataccctaacatcagtttttgtggattatgtagcagtgtctgtctttttacttcctaatggttaatgattgattttcaaatgaattgatttaaaatggaaacctaagtattacctaatttttttgaaaaattgtctttgtagaagctgaaacctatcaacactcttcaaaatgcaatggaatgtaccacggactgtatctcgactggcacgcaggacatgcttggaaccacataatgctggtctctttggacactgtcaaaatgtaaagggacctttacttttatacaatgctgaatccaaagtggttttggtacaaggccctcaaaaacaatggttgca

SEQ ID NO: 19596 - DNA, 2300 bp, Homo sapien
ccaacagacctgcagctaagggttctgactgttagaaggaaaactaacaaacagaaaggacatccacaccaaaaccccatctgtacatcaccatcatcaagaccaaaggtagataaaacaacaaagaaggggagaaaccagagcagaaaagctgaaaatactcatcagagcacctcttctcctccaagggaacacagctcctcaccagcaacaggacaaagctggacggagaatgactttgacaagttgagaagaaggcttcagacgatcggtaataacaaacttctccaagctaaaggaagatgttcgaacccatcgcaaagaagctaaaaaccttgaaaaaagattagacaaatggctaactagaataaacagtgaagagaagtccttaaatgacccgatggagctgaaaaccatagcacgagaactacgtgacgtgtgcaaaagcttcagtaaccaatttgatcaagtggaagaaagggtatcagtgattgaagatcaaatgaatgaaatgaagcaagaagagaagtttagagaaaaaagaatacaaagacatgaagaaatcctccaagaaatatggaactatgtgaaaagaccaaatctacgtctgattggtgtacctgaaagtgatggggagaatgaaaccaagtgggaaaacattcttcaggatattatcgaggagaacttccccagcctagcaaggcaagccaacattcaaattcaggaaatacagagaacgccacaaagatactccacaagaagagcaactctgagacacataattgtcagattcgccaaagttgaaatgaaggaaaaaacgttaagggcagccagagagaaagactgggttacccacaaagggaagcccatcagactaacagctgatctctcagcagaaactctacaagccagaagagagtgggggtcaatattcaacattcttaaaagaattttcaacccagaatttcatatccagccaaactaagcttcataagtgaaggagaaataaaatactttacagacaagcaaatgctgagagattttgtcaccaccaggcctgccttacaagagctcctgaaggaggcactaaacatggaaaggaacaaccagtaccagccactgcaaaaacatgccaaattataaagaccatcgaggctaggaagaaactgcatcaactaatgagcaaaataaccagctaacatcataataacaggatcaaattcacacataacaatattaaccttaaatgtaaatgaactaaatgctccagttaaaaaacacagactggcaaattggataaagagtcaagacccatcagtgtgctgtattcaggagacccatctcacatgcagagacacacacagactcaaaataaagggatggaggaagatatactaagcaaatggaaaacaaaaaaaaaggcaggggttgcaatcctagtctctgattgactttaaaccaacaaagatcaaaagagacaaagaagggcattacataatggtaaagggatcaattcaacaagaagagctaactctcctaaatatatatgcacccaatacaggagcactcagattcataaagcaagtccttagagacctacaaagagacttagactcctacacaataataatgggagattttaacaccccactgtcaacattagacagatcaatgagacagaaagttaacaaggatatccaggacttgaactcagctctgcacccacccaatggacctaatagacatctacagaactctccaccccaaatcaacagaatatacattcttctcagcaccacatcacacttattccaaaactgaccacatagttggaagtaaagcactcctcagcaaatgtaaaagaacagaaattataacaaactgtctctcagaccacagtgcaatcaaactagaactcaggattaagaaactcactcaaaactgctcaactacacggacaacttgctcctgaatgactactggatacataaccaaatgaaggcagaaataaagatgttctttgaaaccaatgagaacaaagacacaacataccagaatctctgggacacagttaaatcagtgtgtagagggaaatttatacactaaatgcccacaagagaaagcaggaaagatctaaaattgacaccctaacatcacaattaaaagaactagagaagcaagagcaaacacattcaaaagctagcagaaggcaagaaataactaagatcagagcagaactgaaggagatagagacacaaaaaacccttcaaaaaaatcaatgaatccaggagctggttttt
